United States Patent Application Publication US 2026/0240958 A1, published August 20, 2026 (application 19/343,818).

The application's sequence listing, which the Patent Office published only in electronic form, follows.

SEQUENCE LISTING (21922 sequences)

SEQ ID NO: 1 - protein, 986 aa, unidentified
  source 1..986: note = Deltaproteobacteria sp.
MEKRINKIRKKLSADNATKPVSRSGPMKTLLVRVMTDDLKKRLEKRRKKPEVMPQVISNNAANNLRMLLDDYTKMKEAILQVYWQEFKDDHVGLMCKFAQPASKKIDQNKLKPEMDEKGNLTTAGFACSQCGQPLFVYKLEQVSEKGKAYTNYFGRCNVAEHEKLILLAQLKPEKDSDEAVTYSLGKFGQRALDFYSIHVTKESTHPVKPLAQIAGNRYASGPVGKALSDACMGTIASFLSKYQDIIIEHQKVVKGNQKRLESLRELAGKENLEYPSVTLPPQPHTKEGVDAYNEVIARVRMWVNLNLWQKLKLSRDDAKPLLRLKGFPSFPVVERRENEVDWWNTINEVKKLIDAKRDMGRVFWSGVTAEKRNTILEGYNYLPNENDHKKREGSLENPKKPAKRQFGDLLLYLEKKYAGDWGKVFDEAWERIDKKIAGLTSHIEREEARNAEDAQSKAVLTDWLRAKASFVLERLKEMDEKEFYACEIQLQKWYGDLRGNPFAVEAENRVVDISGFSIGSDGHSIQYRNLLAWKYLENGKREFYLLMNYGKKGRIRFTDGTDIKKSGKWQGLLYGGGKAKVIDLTFDPDDEQLIILPLAFGTRQGREFIWNDLLSLETGLIKLANGRVIEKTIYNKKIGRDEPALFVALTFERREVVDPSNIKPVNLIGVDRGENIPAVIALTDPEGCPLPEFKDSSGGPTDILRIGEGYKEKQRAIQAAKEVEQRRAGGYSRKFASKSRNLADDMVRNSARDLFYHAVTHDAVLVFENLSRGFGRQGKRTFMTERQYTKMEDWLTAKLAYEGLTSKTYLSKTLAQYTSKTCSNCGFTITTADYDGMLVRLKKTSDGWATTLNNKELKAEGQITYYNRYKRQTVEKELSAELDRLSEESGNNDISKWTKGRRDEALFLLKKRFSHRPVQEQFVCLDCGHEVHADEQAALNIARSWLFLNSNSTEFKSYKSGKQPFVGAWQAFYKRRLKEVWKPNA

SEQ ID NO: 2 - protein, 978 aa, unidentified
  source 1..978: note = Planctomycetes sp.
MQEIKRINKIRRRLVKDSNTKKAGKTGPMKTLLVRVMTPDLRERLENLRKKPENIPQPISNTSRANLNKLLTDYTEMKKAILHVYWEEFQKDPVGLMSRVAQPAPKNIDQRKLIPVKDGNERLTSSGFACSQCCQPLYVYKLEQVNDKGKPHTNYFGRCNVSEHERLILLSPHKPEANDELVTYSLGKFGQRALDFYSIHVTRESNHPVKPLEQIGGNSCASGPVGKALSDACMGAVASFLTKYQDIILEHQKVIKKNEKRLANLKDIASANGLAFPKITLPPQPHTKEGIEAYNNVVAQIVIWVNLNLWQKLKIGRDEAKPLQRLKGFPSFPLVERQANEVDWWDMVCNVKKLINEKKEDGKVFWQNLAGYKRQEALLPYLSSEEDRKKGKKFARYQFGDLLLHLEKKHGEDWGKVYDEAWERIDKKVEGLSKHIKLEEERRSEDAQSKAALTDWLRAKASFVIEGLKEADKDEFCRCELKLQKWYGDLRGKPFAIEAENSILDISGFSKQYNCAFIWQKDGVKKLNLYLIINYFKGGKLRFKKIKPEAFEANRFYTVINKKSGEIVPMEVNFNFDDPNLIILPLAFGKRQGREFIWNDLLSLETGSLKLANGRVIEKTLYNRRTRQDEPALFVALTFERREVLDSSNIKPMNLIGIDRGENIPAVIALTDPEGCPLSRFKDSLGNPTHILRIGESYKEKQRTIQAAKEVEQRRAGGYSRKYASKAKNLADDMVRNTARDLLYYAVTQDAMLIFENLSRGFGRQGKRTFMAERQYTRMEDWLTAKLAYEGLPSKTYLSKTLAQYTSKTCSNCGFTITSADYDRVLEKLKKTATGWMTTINGKELKVEGQITYYNRYKRQNVVKDLSVELDRLSEESVNNDISSWTKGRSGEALSLLKKRFSHRPVQEKFVCLNCGFETHADEQAALNIARSWLFLRSQEYKKYQTNKTTGNTDKRAFVETWQSFYRKKLKEVWKPAV

SEQ ID NO: 3 - protein, 855 aa, unidentified
  source 1..855: note = Candidatus Sungbacteria sp.
MDNANKPSTKSLVNTTRISDHFGVTPGQVTRVFSFGIIPTKRQYAIIERWFAAVEAARERLYGMLYAHFQENPPAYLKEKFSYETFFKGRPVLNGLRDIDPTIMTSAVFTALRHKAEGAMAAFHTNHRRLFEEARKKMREYAECLKANEALLRGAADIDWDKIVNALRTRLNTCLAPEYDAVIADFGALCAFRALIAETNALKGAYNHALNQMLPALVKVDEPEEAEESPRLRFFNGRINDLPKFPVAERETPPDTETIIRQLEDMARVIPDTAEILGYIHRIRHKAARRKPGSAVPLPQRVALYCAIRMERNPEEDPSTVAGHFLGEIDRVCEKRRQGLVRTPFDSQIRARYMDIISFRATLAHPDRWTEIQFLRSNAASRRVRAETISAPFEGFSWTSNRTNPAPQYGMALAKDANAPADAPELCICLSPSSAAFSVREKGGDLIYMRPTGGRRGKDNPGKEITWVPGSFDEYPASGVALKLRLYFGRSQARRMLTNKTWGLLSDNPRVFAANAELVGKKRNPQDRWKLFFHMVISGPPPVEYLDFSSDVRSRARTVIGINRGEVNPLAYAVVSVEDGQVLEEGLLGKKEYIDQLIETRRRISEYQSREQTPPRDLRQRVRHLQDTVLGSARAKIHSLIAFWKGILAIERLDDQFHGREQKIIPKKTYLANKTGFMNALSFSGAVRVDKKGNPWGGMIEIYPGGISRTCTQCGTVWLARRPKNPGHRDAMVVIPDIVDDAAATGFDNVDCDAGTVDYGELFTLSREWVRLTPRYSRVMRGTLGDLERAIRQGDDRKSRQMLELALEPQPQWGQFFCHRCGFNGQSDVLAATNLARRAISLIRRLPDTDTPPTP

SEQ ID NO: 4 - protein, 977 aa, synthetic construct
QEIKRINKIRRRLVKDSNTKKAGKTGPMKTLLVRVMTPDLRERLENLRKKPENIPQPISNTSRANLNKLLTDYTEMKKAILHVYWEEFQKDPVGLMSRVAQPASKKIDQNKLKPEMDEKGNLTTAGFACSQCGQPLFVYKLEQVSEKGKAYTNYFGRCNVAEHEKLILLAQLKPEKDSDEAVTYSLGKFGQRALDFYSIHVTKESTHPVKPLAQIAGNRYASGPVGKALSDACMGTIASFLSKYQDIIIEHQKVVKGNQKRLESLRELAGKENLEYPSVTLPPQPHTKEGVDAYNEVIARVRMWVNLNLWQKLKLSRDDAKPLLRLKGFPSFPLVERQANEVDWWDMVCNVKKLINEKKEDGKVFWQNLAGYKRQEALRPYLSSEEDRKKGKKFARYQLGDLLLHLEKKHGEDWGKVYDEAWERIDKKVEGLSKHIKLEEERRSEDAQSKAALTDWLRAKASFVIEGLKEADKDEFCRCELKLQKWYGDLRGKPFAIEAENSILDISGFSKQYNCAFIWQKDGVKKLNLYLIINYFKGGKLRFKKIKPEAFEANRFYTVINKKSGEIVPMEVNFNFDDPNLIILPLAFGKRQGREFIWNDLLSLETGSLKLANGRVIEKTLYNRRTRQDEPALFVALTFERREVLDSSNIKPMNLIGVARGENIPAVIALTDPEGCPLSRFKDSLGNPTHILRIGESYKEKQRTIQAKKEVEQRRAGGYSRKYASKAKNLADDMVRNTARDLLYYAVTQDAMLIFANLSRGFGRQGKRTFMAERQYTRMEDWLTAKLAYEGLSKTYLSKTLAQYTSKTCSNCGFTITSADYDRVLEKLKKTATGWMTTINGKELKVEGQITYYNRYKRQNVVKDLSVELDRLSEESVNNDISSWTKGRSGEALSLLKKRFSHRPVQEKFVCLNCGFETHAAEQAALNIARSWLFLRSQEYKKYQTNKTTGNTDKRAFVETWQSFYRKKLKEVWKPAV

SEQ ID NO: 5 - protein, 978 aa, synthetic construct
QEIKRINKIRRRLVKDSNTKKAGKTGPMKTLLVRVMTPDLRERLENLRKKPENIPQPISNTSRANLNKLLTDYTEMKKAILHVYWEEFQKDPVGLMSRVAQPASKKIDQNKLKPEMDEKGNLTTAGFACSQCGQPLFVYKLEQVSEKGKAYTNYFGRCNVAEHEKLILLAQLKPEKDSDEAVTYSLGKFGQRALDFYSIHVTKESTHPVKPLAQIAGNRYASGPVGKALSDACMGTIASFLSKYQDIIIEHQKVVKGNQKRLESLRELAGKENLEYPSVTLPPQPHTKEGVDAYNEVIARVRMWVNLNLWQKLKLSRDDAKPLLRLKGFPSFPLVERQANEVDWWDMVCNVKKLINEKKEDGKVFWQNLAGYKRQEALRPYLSSEEDRKKGKKFARYQLGDLLLHLEKKHGEDWGKVYDEAWERIDKKVEGLSKHIKLEEERRSEDAQSKAALTDWLRAKASFVIEGLKEADKDEFCRCELKLQKWYGDLRGKPFAIEAENSILDISGFSKQYNCAFIWQKDGVKKLNLYLIINYFKGGKLRFKKIKPEAFEANRFYTVINKKSGEIVPMEVNFNFDDPNLIILPLAFGKRQGREFIWNDLLSLETGSLKLANGRVIEKTLYNRRTRQDEPALFVALTFERREVLDSSNIKPMNLIGVARGENIPAVIALTDPEGCPLSRFKDSLGNPTHILRIGESYKEKQRTIQAKKEVEQRRAGGYSRKYASKAKNLADDMVRNTARDLLYYAVTQDAMLIFANLSRGFGRQGKRTFMAERQYTRMEDWLTAKLAYEGLSKTYLSKTLAQYTSKTCSNCGFTIHTSADYDRVLEKLKKTATGWMTTINGKELKVEGQITYYNRYKRQNVVKDLSVELDRLSEESVNNDISSWTKGRSGEALSLLKKRFSHRPVQEKFVCLNCGFETHAAEQAALNIARSWLFLRSQEYKKYQTNKTTGNTDKRAFVETWQSFYRKKLKEVWKPAV

SEQ ID NO: 6 - protein, 978 aa, synthetic construct
QEIKRINKIRRRLVKDSNTKKAGKTGPMKTLLVRVMTPDLRERLENLRKKPENIPQPISNTSRANLNKLLTDYTEMKKAILHVYWEEFQKDPVGLMSRVAQPASKKIDQNKLKPEMDEKGNLTTAGFACSQCGQPLFVYKLEQVSEKGKAYTNYFGRCNVAEHEKLILLAQLKPEKDSDEAVTYSLGKFGQRALDFYSIHVTKESTHPVKPLAQIAGNRYASGPVGKALSDACMGTIASFLSKYQDIIIEHQKVVKGNQKRLESLRELAGKENLEYPSVTLPPQPHTKEGVDAYNEVIARVRMWVNLNLWQKLKLSRDDAKPLLRLKGFPSFPLVERQANEVDWWDMVCNVKKLINEKKEDGKVFWQNLAGYKRQEALRPYLSSEEDRKKGKKFARYQLGDLLLHLEKKHGEDWGKVYDEAWERIDKKVEGLSKHIKLEEERRSEDAQSKAALTDWLRAKASFVIEGLKEADKDEFCRCELKLQKWYGDLRGKPFAIEAENSILDISGFSKQYNCAFIWQKDGVKKLNLYLIINYFKGGKLRFKKIKPEAFEANRFYTVINKKSGEIVPMEVNFNFDDPNLIILPLAFGKRQGREFIWNDLLSLETGSLKLANGRVIEKTLYNRRTRQDEPALFVALTFERREVLDSSNIKPMNLIGVARGENIPAVIALTDPEGCPLSRFKDSLGNPTHILRIGESYKEKQRTIQAKKEVEQRRAGGYSRKYASKAKNLADDMVRNTARDLLYYAVTQDAMLIFANLSRGFGRQGKRTFMAERQYTRMEDWLTAKLAYEGLPSKTYLSKTLAQYTSKTCSNCGFTITSADYDRVLEKLKKTATGWMTTINGKELKVEGQITYYNRYKRQNVVKDLSVELDRLSEESVNNDISSWTKGRSGEALSLLKKRFSHRPVQEKFVCLNCGFETHAAEQAALNIARSWLFLRSQEYKKYQTNKTTGNTDKRAFVETWQSFYRKKLKEVWKPAV

SEQ ID NO: 7 - protein, 977 aa, synthetic construct
QEIKRINKIRRRLVKDSNTKKAGKTGPMKTLLVRVMTPDLRERLENLRKKPENIPQPISNTSRANLNKLLTDYTEMKKAILHVYWEEFQKDPVGLMSRVAQPASKKIDQNKLKPEMDEKGNLTTAGFACSQCGQPLFVYKLEQVSEKGKAYTNYFGRCNVAEHEKLILLAQLKPEKDSDEAVTYSLGKFGQRALDFYSIHVTKESTHPVKPLAQIAGNRYASGPVGKALSDACMGTIASFLSKYQDIIIEHQKVVKGNQKRLESLRELAGKENLEYPSVTLPPQPHTKEGVDAYNEVIARVRMWVNHNLWQKLKLSRDDAKPLLRLKGFPSFPLVERQANEVDWWDMVCNVKKLINEKKEDGKVFWQNLAGYKRQEALRPYLSSEEDRKKGKKFARYQLGDLLLHLEKKHGEDWGKVYDEAWERIDKKVEGLSKHIKLEEERRSEDAQSKAALTDWLRAKASFVIEGLKEADKDEFCRCELKLQKWYGDLRGKPFAIEAENSILDISGFSKQYNCAFIWQKDGVKKLNLYLIINYFKGGKLRFKKIKPEAFEANRFYTVINKKSGEIVPMEVNFNFDDPNLIILPLAFGKRQGREFIWNDLLSLETGSLKLANGRVIEKTLYNRRTRQDEPALFVALTFERREVLDSSNIKPMNLIGVARGENIPAVIALTDPEGCPLSRFKDSLGNPTHILRIGESYKEKQRTIQAKKEVEQRRAGGYSRKYASKAKNLADDMVRNTARDLLYYAVTQDAMLIFANLSRGFGRQGKRTFMAERQYTRMEDWLTAKLAYEGLSKTYLSKTLAQYTSKTCSNCGFTITSADYDRVLEKLKKTATGWMTTINGKELKVEGQITYYNRYKRQNVVKDLSVELDRLSEESVNNDISSWTKGRSGEALSLLKKRFSHRPVQEKFVCLNCGFETHAAEQAALNIARSWLFLRSQEYKKYQTNKTTGNTDKRAFVETWQSFYRKKLKEVWKPAV

SEQ ID NO: 8 - protein, 978 aa, synthetic construct
QEIKRINKIRRRLVKDSNTKKAGKTGPMKTLLVRVMTPDLRERLENLRKKPENIPQPISNTSRANLNKLLTDYTEMKKAILHVYWEEFQKDPVGLMSRVAQPASKKIDQNKLKPEMDEKGNLTTAGFACSQCGQPLFVYKLEQVSEKGKAYTNYFGRCNVAEHEKLILLAQLKPEKDSDEAVTYSLGKFGQRALDFYSIHVTKESTHPVKPLAQIAGNRYASGAPVGKALSDACMGTIASFLSKYQDIIIEHQKVVKGNQKRLESLRELAGKENLEYPSVTLPPQPHTKEGVDAYNEVIARVRMWVNLNLWQKLKLSRDDAKPLLRLKGFPSFPLVERQANEVDWWDMVCNVKKLINEKKEDGKVFWQNLAGYKRQEALRPYLSSEEDRKKGKKFARYQLGDLLLHLEKKHGEDWGKVYDEAWERIDKKVEGLSKHIKLEEERRSEDAQSKAALTDWLRAKASFVIEGLKEADKDEFCRCELKLQKWYGDLRGKPFAIEAENSILDISGFSKQYNCAFIWQKDGVKKLNLYLIINYFKGGKLRFKKIKPEAFEANRFYTVINKKSGEIVPMEVNFNFDDPNLIILPLAFGKRQGREFIWNDLLSLETGSLKLANGRVIEKTLYNRRTRQDEPALFVALTFERREVLDSSNIKPMNLIGVARGENIPAVIALTDPEGCPLSRFKDSLGNPTHILRIGESYKEKQRTIQAKKEVEQRRAGGYSRKYASKAKNLADDMVRNTARDLLYYAVTQDAMLIFANLSRGFGRQGKRTFMAERQYTRMEDWLTAKLAYEGLSKTYLSKTLAQYTSKTCSNCGFTITSADYDRVLEKLKKTATGWMTTINGKELKVEGQITYYNRYKRQNVVKDLSVELDRLSEESVNNDISSWTKGRSGEALSLLKKRFSHRPVQEKFVCLNCGFETHAAEQAALNIARSWLFLRSQEYKKYQTNKTTGNTDKRAFVETWQSFYRKKLKEVWKPAV

SEQ ID NO: 9 - protein, 978 aa, synthetic construct
RQEIKRINKIRRRLVKDSNTKKAGKTGPMKTLLVRVMTPDLRERLENLRKKPENIPQPISNTSRANLNKLLTDYTEMKKAILHVYWEEFQKDPVGLMSRVAQPASKKIDQNKLKPEMDEKGNLTTAGFACSQCGQPLFVYKLEQVSEKGKAYTNYFGRCNVAEHEKLILLAQLKPEKDSDEAVTYSLGKFGQRALDFYSIHVTKESTHPVKPLAQIAGNRYASGPVGKALSDACMGTIASFLSKYQDIIIEHQKVVKGNQKRLESLRELAGKENLEYPSVTLPPQPHTKEGVDAYNEVIARVRMWVNLNLWQKLKLSRDDAKPLLRLKGFPSFPLVERQANEVDWWDMVCNVKKLINEKKEDGKVFWQNLAGYKRQEALRPYLSSEEDRKKGKKFARYQLGDLLLHLEKKHGEDWGKVYDEAWERIDKKVEGLSKHIKLEEERRSEDAQSKAALTDWLRAKASFVIEGLKEADKDEFCRCELKLQKWYGDLRGKPFAIEAENSILDISGFSKQYNCAFIWQKDGVKKLNLYLIINYFKGGKLRFKKIKPEAFEANRFYTVINKKSGEIVPMEVNFNFDDPNLIILPLAFGKRQGREFIWNDLLSLETGSLKLANGRVIEKTLYNRRTRQDEPALFVALTFERREVLDSSNIKPMNLIGVARGENIPAVIALTDPEGCPLSRFKDSLGNPTHILRIGESYKEKQRTIQAKKEVEQRRAGGYSRKYASKAKNLADDMVRNTARDLLYYAVTQDAMLIFANLSRGFGRQGKRTFMAERQYTRMEDWLTAKLAYEGLSKTYLSKTLAQYTSKTCSNCGFTITSADYDRVLEKLKKTATGWMTTINGKELKVEGQITYYNRYKRQNVVKDLSVELDRLSEESVNNDISSWTKGRSGEALSLLKKRFSHRPVQEKFVCLNCGFETHAAEQAALNIARSWLFLRSQEYKKYQTNKTTGNTDKRAFVETWQSFYRKKLKEVWKPAV

SEQ ID NO: 10 - protein, 978 aa, synthetic construct
QEIKRINKIRRRLVKDSNTKKAGKTGPMKTLLVRVMTPDLRERLENLRKKPENIPQPISNTSRANLNKLLTDYTEMKKAILHVYWEEFQKDPVGLMSRVAQPASKKIDQNKLKPEMDEKGNLTTAGFACSQCGQPLFVYKLEQVSEKGKAYTNYFGRCNVAEHEKLILLAQLKPEKDSDEAVTYSLGKFGQRALDFYSIHVTKESTHPVKPLAQIAGNRYASGPVGKALSDACMGTIASFLSKYQDIIIEHQKVVKGNQKRLESLRELAGKENLEYPSVTLPPQPHTKEGVDAYNEVIARVRMWVNLNLWQKLKLSRDDAKPLLRLKGFPSFPLVERQANEVDWWDMVCNVKKLINEKKEDGKVFWQNLAGYKRQEALRPYLSSEEDRKKGKKFARYQLGDLLLHLEKKHGEDWGKVYDEAWERIDKKVEGLSKHIKLEEERRSEDAQSKAALTDWLRAKASFVIEGLKEADKDEFCRCELKLQKWYGDLRGKPFAIEAENSILDISGFSKQYNCAFIWQKDGVKKLNLYLIINYFKGGKLRFKKIKPEAFEANRFYTVINKKSGEIVPMEVNFNFDDPNLIILPLAFGKRQGREFIWNDLLSLETGSLKLANGRVIEKTLYNRRTRQDEPALFVALTFERREVLDSSNIKPMNLIGVARGENIPAVIALTDPEGCPLSRFKDSLGNPTHIQLRIGESYKEKQRTIQAKKEVEQRRAGGYSRKYASKAKNLADDMVRNTARDLLYYAVTQDAMLIFANLSRGFGRQGKRTFMAERQYTRMEDWLTAKLAYEGLSKTYLSKTLAQYTSKTCSNCGFTITSADYDRVLEKLKKTATGWMTTINGKELKVEGQITYYNRYKRQNVVKDLSVELDRLSEESVNNDISSWTKGRSGEALSLLKKRFSHRPVQEKFVCLNCGFETHAAEQAALNIARSWLFLRSQEYKKYQTNKTTGNTDKRAFVETWQSFYRKKLKEVWKPAV

SEQ ID NO: 11 - protein, 977 aa, synthetic construct
QEIKRINKIRRRLVKDSNTKKAGKTGPMKTLLVRVMTPDLRERLENLRKKPENIPQPISNTSRANLNKLLTDYTEMKKAILHVYWEEFQKDPVGLMSRVAQPASKKIDQNKLKPEMDEKGNLTTAGFACSQCGQPLFVYKLEQVSEKGKAYTNYFGRCNVAEHEKLILLAQLKPEKDSDEAVTYSLGKFGQRALDFYSIHVTKESTHPVKPLAQIAGNRYASGPVGKALSDACMGTIASFLSKYQDIIIEHQKVVKGNQKRLESLRELAGKENLEYPSVTLPPQPHTKEGVDAYNEVIARVRMWVNLNLWQKLKLSRDDAKPLLRLKGFPSFPLVERQANEVDWWDMVCNVKKLINEKKEDGKVFWQNLAGYKRQEALRPYLSSEEDRKKGKKFARYQLGDLLLHLEKKHGEDWGKVYDEAWERIDKKVEGLSKHIKLEEERRSEDAQSKAALTDWLRAKASFVIEGLKEADKDEFCRCELKLQKWYGDLRGKPFAIEAENSILDISGFSKQYNCAFIWQKDGVKKLNLYLIINYFKGGKLRFKKIKPEAFEANRFYTVINKKSGEIVPMEVNFNFDDPNLIILPLAFGKRQGREFIWNDLLSLETGSLKLANGRVIEKTLYNRRTRQDEPALFVALTFERREVLDSSNIKPMNLIGVARGENIPAVIALTDPEGCPLSRFKDSLGNPTHILRIGESYKEKQRTTQAKKEVEQRRAGGYSRKYASKAKNLADDMVRNTARDLLYYAVTQDAMLIFANLSRGFGRQGKRTFMAERQYTRMEDWLTAKLAYEGLSKTYLSKTLAQYTSKTCSNCGFTITSADYDRVLEKLKKTATGWMTTINGKELKVEGQITYYNRYKRQNVVKDLSVELDRLSEESVNNDISSWTKGRSGEALSLLKKRFSHRPVQEKFVCLNCGFETHAAEQAALNIARSWLFLRSQEYKKYQTNKTTGNTDKRAFVETWQSFYRKKLKEVWKPAV

SEQ ID NO: 12 - protein, 977 aa, synthetic construct
QEIKRINKIRRRLVKDSNTKKAGKTGPMKTLLVRVMTPDLRERLENLRKKPENIPQPISNTSRANLNKLLTDYTEMKKAILHVYWEEFQKDPVGLMSRVAQPASKKIDQNKLKPEMDEKGNLTTAGFACSQCGQPLFVYKLEQVSEKGKAYTNYFGRCNVAEHEKLILLAQLKPEKDSDEAVTYSLGKFGQRALDFYSIHVTKESTHPVKPLAQIAGNRYASGPVGKALSDACMGTIASFLSKYQDIIIEHQKVVKGNQKRLESLRELAGKENLEYPSVTLPPQPHTKEGVDAYNEVIARVRMWVNLNLWQKLKLSRDDAKPLLRLKGFPSFPLVERQANEVDWWDMVCNVKKLINEKKEDGKVFWQNLAGYKRQEALRPYLSSEEDRKKGKKFARYQLGDLLLHLEKKHGEDWGKVYDEAWERIDKKVEGLSKHIKLEEERRSEDAQSKAALTDWLRAKASFVIEGLKEADKDEFCRCELKLQKWYGDLRGKPFAIEAENSILDISGFSKQYNCAFIWQKDGVKKLNLYLIINYFKGGKLRFKKIKPEAFEANRFYTVINKKSGEIVPMEVNFNFDDPNLIILPLAFGKRQGREFIWNDLLSLETGSLKLANGRVIEKTLYNRRTRQDEPALFVALTFERREVLDSSNIKPMNLIGVARGENIPAVIALTDPEGCPLSRFKRSLGNPTHILRIGESYKEKQRTIQAKKEVEQRRAGGYSRKYASKAKNLADDMVRNTARDLLYYAVTQDAMLIFANLSRGFGRQGKRTFMAERQYTRMEDWLTAKLAYEGLSKTYLSKTLAQYTSKTCSNCGFTITSADYDRVLEKLKKTATGWMTTINGKELKVEGQITYYNRYKRQNVVKDLSVELDRLSEESVNNDISSWTKGRSGEALSLLKKRFSHRPVQEKFVCLNCGFETHAAEQAALNIARSWLFLRSQEYKKYQTNKTTGNTDKRAFVETWQSFYRKKLKEVWKPAV

SEQ ID NO: 13 - protein, 977 aa, synthetic construct
QEIKRINKIRRRLVKDSNTKKAGKTYPMKTLLVRVMTPDLRERLENLRKKPENIPQPISNTSRANLNKLLTDYTEMKKAILHVYWEEFQKDPVGLMSRVAQPASKKIDQNKLKPEMDEKGNLTTAGFACSQCGQPLFVYKLEQVSEKGKAYTNYFGRCNVAEHEKLILLAQLKPEKDSDEAVTYSLGKFGQRALDFYSIHVTKESTHPVKPLAQIAGNRYASGPVGKALSDACMGTIASFLSKYQDIIIEHQKVVKGNQKRLESLRELAGKENLEYPSVTLPPQPHTKEGVDAYNEVIARVRMWVNLNLWQKLKLSRDDAKPLLRLKGFPSFPLVERQANEVDWWDMVCNVKKLINEKKEDGKVFWQNLAGYKRQEALRPYLSSEEDRKKGKKFARYQLGDLLLHLEKKHGEDWGKVYDEAWERIDKKVEGLSKHIKLEEERRSEDAQSKAALTDWLRAKASFVIEGLKEADKDEFCRCELKLQKWYGDLRGKPFAIEAENSILDISGFSKQYNCAFIWQKDGVKKLNLYLIINYFKGGKLRFKKIKPEAFEANRFYTVINKKSGEIVPMEVNFNFDDPNLIILPLAFGKRQGREFIWNDLLSLETGSLKLANGRVIEKTLYNRRTRQDEPALFVALTFERREVLDSSNIKPMNLIGVARGENIPAVIALTDPEGCPLSRFKDSLGNPTHILRIGESYKEKQRTIQAKKEVEQRRAGGYSRKYASKAKNLADDMVRNTARDLLYYAVTQDAMLIFANLSRGFGRQGKRTFMAERQYTRMEDWLTAKLAYEGLSKTYLSKTLAQYTSKTCSNCGFTITSADYDRVLEKLKKTATGWMTTINGKELKVEGQITYYNRYKRQNVVKDLSVELDRLSEESVNNDISSWTKGRSGEALSLLKKRFSHRPVQEKFVCLNCGFETHAAEQAALNIARSWLFLRSQEYKKYQTNKTTGNTDKRAFVETWQSFYRKKLKEVWKPAV

SEQ ID NO: 14 - protein, 977 aa, synthetic construct
QEIKRINKIRRRLVKDSNTKKAGKTGPMKTLLVRVMTPDLRERLENLRKKPENIPQPISNTSRANLNKLLTDYTEMKKAILHVYWEEFQKDPVGLMSRVAQPASKKIDQNKLKPEMDEKGNLTTAGFACSQCGQPLFVYKLEQVSEKGKAYTNYFGRCNVAEHEKLILLAQLKPEKDSDEAVTYSLGKFGQRALDFYSIHVTKESTHPVKPLAQIAGNRYASGPVGKALSDACMGTIASFLSKYQDIIIEHQKVVKGNQKRLESLRELAGKENLEYPSVTLPPQPHTKEGVDAYNEVIARVRMWVNLNLWQKLKLSRDDAKPLLRLKGFPSFPLVERQANEVDWWDMVCNVKKLINEKKEDGKVFWQNLAGYKRQEALRPYLSSEEDRKKGKKFARYQLGDLLLHLEKKHGEDWGKVYDEAWERIDKKVEGLSKHIKLEEERRSEDAQSKAALTDWLRAKASFVIEGLKEADKDEFCRCELKLQKWYGDLRGKPFAIEAENSILDISGFSKQYNCAFIWQKDGVKKLNLYLIINYFKGGKLRFKKIKPEAFEANRFYTVINKKSGEIVPMEVNFNFDDPNLIILPLAFGKRQGREFIWNDLLSLETGSLKLANGRVIEKTLYNRRTRQDEPALFVALTFERREVLDSSNIKPMNLIGVARGENIPAVIALTDPEGCPLSRFKDSLGNPTHILRIGESYKEKQRTIQAKKEVEQRRAGGYSRKYASKAKNLADDMVRNTARDLLYYAVTQDAMLIFANLSRGFGRQGKRTFMAERQYTRMEDWLTAKLAYEGLSKTYLSKTLAQYTSKTCSNCGFTIHSADYDRVLEKLKKTATGWMTTINGKELKVEGQITYYNRYKRQNVVKDLSVELDRLSEESVNNDISSWTKGRSGEALSLLKKRFSHRPVQEKFVCLNCGFETHAAEQAALNIARSWLFLRSQEYKKYQTNKTTGNTDKRAFVETWQSFYRKKLKEVWKPAV

SEQ ID NO: 15 - protein, 977 aa, synthetic construct
QEIKRINKIRRRLVKDSNTKKAGKTGPMKTLLVRVMTPDLRERLENLRKKPENIPQPISNTSRANLNKLLTDYTEMKKAILHVYWEEFQKDPVGLMSRVAQPASKKIDQNKLKPEMDEKGNLTTAGFACSQCGQPLFVYKLEQVSEKGKAYTNYFGRCNVAEHEKLILLAQLKPEKDSDEAVTYSLGKFGQRALDFYSIHVTKESTHPVKPLAQIAGNRYASGPVGKALSDACMGTIASFLSKYQDIIIEHQKVVKGNQKRLESLRELAGKENLEYPSVTLPPQPHTKEGVDAYNEVIARVRMWVNLNLWQKLKLSRDDAKPLLRLKGFPSFPLVERQANEVDWWDMVCNVKKLINEKKEDGKVFWQNLAGYKRQEALRPYLSSEEDRKKGKKFARYQLGDLLLHLEKKHGEDWGKVYDEAWERIDKKVEGLSKHIKLEEERRSEDAQSKAALTDWLRAKASFVIEGLKEADKDEFCRCELKLQKWYGDLRGKPFAIEAENSILDISGFSKQYNCAFIWQKDGVKKLNLYLIINYFKGGKLRFKKIKPEAFEANRFYTVINKKSGEIVPMEVNFNFDDPNLIILPLAFGKRQGREFIWNDLLSLETGSLKLANGRVIEKTLYNRRTRQDEPALFVALTFERREVLDSSNIKPMNLIGVARGENIPAVIALTDPEGCPLSRFKDSLGNPTHILRIGESYKEKQRTIQAKKEVEQRRAGGYSRKYASKAKNLADDMVRNTARDLLYYAATQDAMLIFANLSRGFGRQGKRTFMAERQYTRMEDWLTAKLAYEGLSKTYLSKTLAQYTSKTCSNCGFTITSADYDRVLEKLKKTATGWMTTINGKELKVEGQITYYNRYKRQNVVKDLSVELDRLSEESVNNDISSWTKGRSGEALSLLKKRFSHRPVQEKFVCLNCGFETHAAEQAALNIARSWLFLRSQEYKKYQTNKTTGNTDKRAFVETWQSFYRKKLKEVWKPAV

SEQ ID NO: 16 - protein, 977 aa, synthetic construct
QEIKRINKIRRRLVKDSNTKKAGKTGPMKTLLVRVMTPDLRERLENLRKKPENIPQPISNTSRANLNKLLTDYTEMKKAILHVYWEEFQKDPVGLMSRVAQPASKKIDQNKLKPEMDEKGNLTTAGFACSQCGQPLFVYKLEQVSEKGKAYTNYFGRCNVAEHEKLILLAQLKPEKDSDEAVTYSLGKFGQRALDFYSIHVTKESTHPVKPLAQIAGNRYASGPVGKALSDACMGTIASFLSKYQDIIIEHQKVVKGNQKRLESLRELAGKENLEYPSVTLPPQPHTKEGVDAYNEVIARVRMWVNLNLWQKLKLSRDDAKPLLRLKGFPSFPLVERQANEVDWWDMVCNVKKLINEKKEDGKVFWQNLAGYKRQEALRPYLSSEEDRKKGKKFARYQLGDLLLHLEKKHGEDWGKVYDEAWERIDKKVEGLSKHIKLEEERRSEDAQSKAALTDWLRAKASFVIEGLKEADKDEFCRCELKLQKWYGDLRGKPFAIEAENSILDISGFSKQYNCAFIWQKDGVKKLNLYLIINYFKGGKLRFKKIKPEAFEANRFYTVINKKSGEIVPMEVNFNFDDPNLIILPLAFGKRQGREFIWNDLLSLETGSLKLANGRVIEKTLYNRRTRQDEPALFVALTFERREVLDSSNIKPMNLIGVARGENIPAVIALTDPEGCPLSRFKDSLGNPTHILRIGESYKEKQRTIQAAKEVEQRRAGGYSRKYASKAKNLADDMVRNTARDLLYYAVTQDAMLIFANLSRGFGRQGKRTFMAERQYTRMEDWLTAKLAYEGLSKTYLSKTLAQYTSKTCSNCGFTITSADYDRVLEKLKKTATGWMTTINGKELKVEGQITYYNRYKRQNVVKDLSVELDRLSEESVNNDISSWTKGRSGEALSLLKKRFSHRPVQEKFVCLNCGFETHAAEQAALNIARSWLFLRSQEYKKYQTNKTTGNTDKRAFVETWQSFYRKKLKEVWKPAV

SEQ ID NO: 17 - protein, 978 aa, synthetic construct
QEIKRINKIRRRLVKDSNTKKAGKTRGPMKTLLVRVMTPDLRERLENLRKKPENIPQPISNTSRANLNKLLTDYTEMKKAILHVYWEEFQKDPVGLMSRVAQPASKKIDQNKLKPEMDEKGNLTTAGFACSQCGQPLFVYKLEQVSEKGKAYTNYFGRCNVAEHEKLILLAQLKPEKDSDEAVTYSLGKFGQRALDFYSIHVTKESTHPVKPLAQIAGNRYASGPVGKALSDACMGTIASFLSKYQDIIIEHQKVVKGNQKRLESLRELAGKENLEYPSVTLPPQPHTKEGVDAYNEVIARVRMWVNLNLWQKLKLSRDDAKPLLRLKGFPSFPLVERQANEVDWWDMVCNVKKLINEKKEDGKVFWQNLAGYKRQEALRPYLSSEEDRKKGKKFARYQLGDLLLHLEKKHGEDWGKVYDEAWERIDKKVEGLSKHIKLEEERRSEDAQSKAALTDWLRAKASFVIEGLKEADKDEFCRCELKLQKWYGDLRGKPFAIEAENSILDISGFSKQYNCAFIWQKDGVKKLNLYLIINYFKGGKLRFKKIKPEAFEANRFYTVINKKSGEIVPMEVNFNFDDPNLIILPLAFGKRQGREFIWNDLLSLETGSLKLANGRVIEKTLYNRRTRQDEPALFVALTFERREVLDSSNIKPMNLIGVARGENIPAVIALTDPEGCPLSRFKDSLGNPTHILRIGESYKEKQRTIQAKKEVEQRRAGGYSRKYASKAKNLADDMVRNTARDLLYYAVTQDAMLIFANLSRGFGRQGKRTFMAERQYTRMEDWLTAKLAYEGLSKTYLSKTLAQYTSKTCSNCGFTITSADYDRVLEKLKKTATGWMTTINGKELKVEGQITYYNRYKRQNVVKDLSVELDRLSEESVNNDISSWTKGRSGEALSLLKKRFSHRPVQEKFVCLNCGFETHAAEQAALNIARSWLFLRSQEYKKYQTNKTTGNTDKRAFVETWQSFYRKKLKEVWKPAV

SEQ ID NO: 18 - protein, 978 aa, synthetic construct
QEIKRINKIRRRLVKDSNTKKAGKTGPMKTLLVRVMTPDLRERLENLRKKPENIPQPISNTSRANLNKLLTDYTEMKKAILHVYWEEFQKDPVGLMSRVAQPASKKIDQNKLKPEMDEKGNLTTAGFACSQCGQPLFVYKLEQVSEKGKAYTNYFGRCNVAEHEKLILLAQLKPEKDSDEAVTYSLGKFGQRALDFYSIHVTKESTHPVKPLAQIAGNRYASYPVGKALSDACMGTIASFLSKYQDIIIEHQKVVKGNQKRLESLRELAGKENLEYPSVTLPPQPHTKEGVDAYNEVIARVRMWVNLNLWQKLKLSRDDAKPLLRLKGFPSFPLVERQANEVDWWDMVCNVKKLINEKKEDGKVFWQNLAGYKRQEALRPYLSSEEDRKKGKKFARYQLGDLLLHLEKKHGEDWGKVYDEAWERIDKKVEGLSKHIKLEEERRSEDAQSKAALTDWLRAKASFVIEGLKEADKDEFCRCELKLQKWYGDLRGKPFAIEAENSILDISGFSKQYNCAFIWQKDGVKKLNLYLIINYFKGGKLRFKKIKPEAFEANRFYTVINKKSGEIVPMEVNFNFDDPNLIILPLAFGKRQGREFIWNDLLSLETGSLKLANGRVIEKTLYNRRTRQDEPALFVALTFERREVLDSSNIKPMNLIGVARGENIPAVIALTDPEGCPLSRFKDSLGNPTHILRIGESYKEKQRTIQAKKEVEQRRAGGYSRKYASKAKNLADDMVRNTARDLLYYAVTQDAMLIFANLSRGFGRQGKRTFMAERQYTRMEDWLTAKLAYEGLPSKTYLSKTLAQYTSKTCSNCGFTITSADYDRVLEKLKKTATGWMTTINGKELKVEGQITYYNRYKRQNVVKDLSVELDRLSEESVNNDISSWTKGRSGEALSLLKKRFSHRPVQEKFVCLNCGFETHAAEQAALNIARSWLFLRSQEYKKYQTNKTTGNTDKRAFVETWQSFYRKKLKEVWKPAV

SEQ ID NO: 19 - protein, 978 aa, synthetic construct
QEIKRINKIRRRLVKDSNTKKAGKTGPMKTLLVRVMTPDLRERLENLRKKPENIPQPISNTSRANLNKLLTDYTEMKKAILHVYWEEFQKDPVGLMSRVAQPASKKIDQNKLKPEMDEKGNLTTAGFACSQCGQPLFVYKLEQVSEKGKAYTNYFGRCNVAEHEKLILLAQLKPEKDSDEAVTYSLGKFGQRALDFYSIHVTKESTHPVKPLAQIAGNRYASNPVGKALSDACMGTIASFLSKYQDIIIEHQKVVKGNQKRLESLRELAGKENLEYPSVTLPPQPHTKEGVDAYNEVIARVRMWVNLNLWQKLKLSRDDAKPLLRLKGFPSFPLVERQANEVDWWDMVCNVKKLINEKKEDGKVFWQNLAGYKRQEALRPYLSSEEDRKKGKKFARYQLGDLLLHLEKKHGEDWGKVYDEAWERIDKKVEGLSKHIKLEEERRSEDAQSKAALTDWLRAKASFVIEGLKEADKDEFCRCELKLQKWYGDLRGKPFAIEAENSILDISGFSKQYNCAFIWQKDGVKKLNLYLIINYFKGGKLRFKKIKPEAFEANRFYTVINKKSGEIVPMEVNFNFDDPNLIILPLAFGKRQGREFIWNDLLSLETGSLKLANGRVIEKTLYNRRTRQDEPALFVALTFERREVLDSSNIKPMNLIGVARGENIPAVIALTDPEGCPLSRFKDSLGNPTHILRIGESYKEKQRTIQAKKEVEQRRAGGYSRKYASKAKNLADDMVRNTARDLLYYAVTQDAMLIFANLSRGFGRQGKRTFMAERQYTRMEDWLTAKLAYEGLPSKTYLSKTLAQYTSKTCSNCGFTITSADYDRVLEKLKKTATGWMTTINGKELKVEGQITYYNRYKRQNVVKDLSVELDRLSEESVNNDISSWTKGRSGEALSLLKKRFSHRPVQEKFVCLNCGFETHAAEQAALNIARSWLFLRSQEYKKYQTNKTTGNTDKRAFVETWQSFYRKKLKEVWKPAV

SEQ ID NO: 20 - protein, 979 aa, synthetic construct
QEIKRINKIRRRLVKDSNTKKAGKTGPMKTLLVRVMTPDLRERLENLRKKPENIPQPISNTSRANLNKLLTDYTEMKKAILHVYWEEFQKDPVGLMSRVAQPASKKIDQNKLKPEMDEKGNLTTAGFACSQCGQPLFVYKLEQVSEKGKAYTNYFGRCNVAEHEKLILLAQLKPEKDSDEAVTYSLGKFGQRALDFYSIHVTKESTHPVKPLAQIAGNRYASGPVGKALSDACMGTIASFLSKYQDIIIEHQKVVKGNQKRLESLRELAGKENLEYPSVTLPPQPHTKEGVDAYNEVIARVRMWVNLNLWQKLKLSRDDAKPLLRLKGFPSFPLVERQANEVDWWDMVCNVKKLINEKKEDGKVFWQNLAGYKRQEALRPYLSSEEDRKKGKKFARYQLGDLLLHLEKKHGEDWGKVYDEAWERIDKKVEGLSKHIKLEEERRSEDAQSKAALTDWLRAKASFVIEGLKEADKDEFCRCELKLQKWYGDLRGKPFAIEAENSILDISGFSKQYNCAFIWQKDGVKKLNLYLIINYFKGWGKLRFKKIKPEAFEANRFYTVINKKSGEIVPMEVNFNFDDPNLIILPLAFGKRQGREFIWNDLLSLETGSLKLANGRVIEKTLYNRRTRQDEPALFVALTFERREVLDSSNIKPMNLIGVARGENIPAVIALTDPEGCPLSRFKDSLGNPTHILRIGESYKEKQRTIQAKKEVEQRRAGGYSRKYASKAKNLADDMVRNTARDLLYYAVTQDAMLIFANLSRGFGRQGKRTFMAERQYTRMEDWLTAKLAYEGLPSKTYLSKTLAQYTSKTCSNCGFTITSADYDRVLEKLKKTATGWMTTINGKELKVEGQITYYNRYKRQNVVKDLSVELDRLSEESVNNDISSWTKGRSGEALSLLKKRFSHRPVQEKFVCLNCGFETHAAEQAALNIARSWLFLRSQEYKKYQTNKTTGNTDKRAFVETWQSFYRKKLKEVWKPAV

SEQ ID NO: 21 - protein, 979 aa, synthetic construct
QEIKRINKIRRRLVKDSNTKKAGKTGPMKTLLVRVMTPDLRERLENLRKKPENIPQPISNTSRANLNKLLTDYTEMKKAILHVYWEEFQKDPVGLMSRVAQPASKKIDQNKLKPEMDEKGNLTTAGFACSQCGQPLFVYKLEQVSEKGKAYTNYFGRCNVAEHEKLILLAQLKPEKDSDEAVTYSLGKFGQRALDFYSIHVTKESTHPVKPLAQIAGNRYASGPVGKALSDACMGTIASFLSKYQDIIIEHQKVVKGNQKRLESLRELAGKENLEYPSVTLPPQPHTKEGVDAYNEVIARVRMWVNLNLWQKLKLSRDDAKPLLRLKGFPSFPLVERQANEVDWWDMVCNVKKLINEKKEDGKVFWQNLAGYKRQEALRPYLSSEEDRKKGKKFARYQLGDLLLHLEKKHGEDWGKVYDEAWERIDKKVEGLSKHIKLEEERRSEDAQSKAALTDWLRAKASFVIEGLKEADKDEFCRCELKLQKWYGDLRGKPFAIEAENSILDISGFSKQYNCAFIWQKDGVKKLNLYLIINYFKGYGKLRFKKIKPEAFEANRFYTVINKKSGEIVPMEVNFNFDDPNLIILPLAFGKRQGREFIWNDLLSLETGSLKLANGRVIEKTLYNRRTRQDEPALFVALTFERREVLDSSNIKPMNLIGVARGENIPAVIALTDPEGCPLSRFKDSLGNPTHILRIGESYKEKQRTIQAKKEVEQRRAGGYSRKYASKAKNLADDMVRNTARDLLYYAVTQDAMLIFANLSRGFGRQGKRTFMAERQYTRMEDWLTAKLAYEGLPSKTYLSKTLAQYTSKTCSNCGFTITSADYDRVLEKLKKTATGWMTTINGKELKVEGQITYYNRYKRQNVVKDLSVELDRLSEESVNNDISSWTKGRSGEALSLLKKRFSHRPVQEKFVCLNCGFETHAAEQAALNIARSWLFLRSQEYKKYQTNKTTGNTDKRAFVETWQSFYRKKLKEVWKPAV

SEQ ID NO: 22 - protein, 979 aa, synthetic construct
QEIKRINKIRRRLVKDSNTKKAGKTRGPMKTLLVRVMTPDLRERLENLRKKPENIPQPISNTSRANLNKLLTDYTEMKKAILHVYWEEFQKDPVGLMSRVAQPASKKIDQNKLKPEMDEKGNLTTAGFACSQCGQPLFVYKLEQVSEKGKAYTNYFGRCNVAEHEKLILLAQLKPEKDSDEAVTYSLGKFGQRALDFYSIHVTKESTHPVKPLAQIAGNRYASGPVGKALSDACMGTIASFLSKYQDIIIEHQKVVKGNQKRLESLRELAGKENLEYPSVTLPPQPHTKEGVDAYNEVIARVRMWVNLNLWQKLKLSRDDAKPLLRLKGFPSFPLVERQANEVDWWDMVCNVKKLINEKKEDGKVFWQNLAGYKRQEALRPYLSSEEDRKKGKKFARYQLGDLLLHLEKKHGEDWGKVYDEAWERIDKKVEGLSKHIKLEEERRSEDAQSKAALTDWLRAKASFVIEGLKEADKDEFCRCELKLQKWYGDLRGKPFAIEAENSILDISGFSKQYNCAFIWQKDGVKKLNLYLIINYFKGGKLRFKKIKPEAFEANRFYTVINKKSGEIVPMEVNFNFDDPNLIILPLAFGKRQGREFIWNDLLSLETGSLKLANGRVIEKTLYNRRTRQDEPALFVALTFERREVLDSSNIKPMNLIGVARGENIPAVIALTDPEGCPLSRFKDSLGNPTHILRIGESYKEKQRTIQAKKEVEQRRAGGYSRKYASKAKNLADDMVRNTARDLLYYAVTQDAMLIFANLSRGFGRQGKRTFMAERQYTRMEDWLTAKLAYEGLPSKTYLSKTLAQYTSKTCSNCGFTITSADYDRVLEKLKKTATGWMTTINGKELKVEGQITYYNRYKRQNVVKDLSVELDRLSEESVNNDISSWTKGRSGEALSLLKKRFSHRPVQEKFVCLNCGFETHAAEQAALNIARSWLFLRSQEYKKYQTNKTTGNTDKRAFVETWQSFYRKKLKEVWKPAV

SEQ ID NO: 23 - protein, 979 aa, synthetic construct
QEIKRINKIRRRLVKDSNTKKAGKTRGPMKTLLVRVMTPDLRERLENLRKKPENIPQPISNTSRANLNKLLTDYTEMKKAILHVYWEEFQKDPVGLMSRVAQPASKKIDQNKLKPEMDEKGNLTTAGFACSQCGQPLFVYKLEQVSEKGKAYTNYFGRCNVAEHEKLILLAQLKPEKDSDEAVTYSLGKFGQRALDFYSIHVTKESTHPVKPLAQIAGNRYASYPVGKALSDACMGTIASFLSKYQDIIIEHQKVVKGNQKRLESLRELAGKENLEYPSVTLPPQPHTKEGVDAYNEVIARVRMWVNLNLWQKLKLSRDDAKPLLRLKGFPSFPLVERQANEVDWWDMVCNVKKLINEKKEDGKVFWQNLAGYKRQEALRPYLSSEEDRKKGKKFARYQLGDLLLHLEKKHGEDWGKVYDEAWERIDKKVEGLSKHIKLEEERRSEDAQSKAALTDWLRAKASFVIEGLKEADKDEFCRCELKLQKWYGDLRGKPFAIEAENSILDISGFSKQYNCAFIWQKDGVKKLNLYLIINYFKGGKLRFKKIKPEAFEANRFYTVINKKSGEIVPMEVNFNFDDPNLIILPLAFGKRQGREFIWNDLLSLETGSLKLANGRVIEKTLYNRRTRQDEPALFVALTFERREVLDSSNIKPMNLIGVARGENIPAVIALTDPEGCPLSRFKDSLGNPTHILRIGESYKEKQRTIQAKKEVEQRRAGGYSRKYASKAKNLADDMVRNTARDLLYYAVTQDAMLIFANLSRGFGRQGKRTFMAERQYTRMEDWLTAKLAYEGLPSKTYLSKTLAQYTSKTCSNCGFTITSADYDRVLEKLKKTATGWMTTINGKELKVEGQITYYNRYKRQNVVKDLSVELDRLSEESVNNDISSWTKGRSGEALSLLKKRFSHRPVQEKFVCLNCGFETHAAEQAALNIARSWLFLRSQEYKKYQTNKTTGNTDKRAFVETWQSFYRKKLKEVWKPAV

SEQ ID NO: 24 - protein, 978 aa, synthetic construct
QEIKRINKIRRRLVKDSNTKKAGKTGPMKTLLVRVMTPDLRERLENLRKKPENIPQPISNTSRANLNKLLTDYTEMKKAILHVYWEEFQKDPVGLMSRVAQPASKKIDQNKLKPEMDEKGNLTTAGFACSQCGQPLFVYKLEQVSEKGKAYTNYFGRCNVAEHEKLILLAQLKPEKDSDEAVTYSLGKFGQRALDFYSIHVTKESTHPVKPLAQIAGNRYASSPVGKALSDACMGTIASFLSKYQDIIIEHQKVVKGNQKRLESLRELAGKENLEYPSVTLPPQPHTKEGVDAYNEVIARVRMWVNLNLWQKLKLSRDDAKPLLRLKGFPSFPLVERQANEVDWWDMVCNVKKLINEKKEDGKVFWQNLAGYKRQEALRPYLSSEEDRKKGKKFARYQLGDLLLHLEKKHGEDWGKVYDEAWERIDKKVEGLSKHIKLEEERRSEDAQSKAALTDWLRAKASFVIEGLKEADKDEFCRCELKLQKWYGDLRGKPFAIEAENSILDISGFSKQYNCAFIWQKDGVKKLNLYLIINYFKGGKLRFKKIKPEAFEANRFYTVINKKSGEIVPMEVNFNFDDPNLIILPLAFGKRQGREFIWNDLLSLETGSLKLANGRVIEKTLYNRRTRQDEPALFVALTFERREVLDSSNIKPMNLIGVARGENIPAVIALTDPEGCPLSRFKDSLGNPTHILRIGESYKEKQRTIQAKKEVEQRRAGGYSRKYASKAKNLADDMVRNTARDLLYYAVTQDAMLIFANLSRGFGRQGKRTFMAERQYTRMEDWLTAKLAYEGLPSKTYLSKTLAQYTSKTCSNCGFTITSADYDRVLEKLKKTATGWMTTINGKELKVEGQITYYNRYKRQNVVKDLSVELDRLSEESVNNDISSWTKGRSGEALSLLKKRFSHRPVQEKFVCLNCGFETHAAEQAALNIARSWLFLRSQEYKKYQTNKTTGNTDKRAFVETWQSFYRKKLKEVWKPAV

SEQ ID NO: 25 - protein, 978 aa, synthetic construct
QEIKRINKIRRRLVKDSNTKKAGKTGPMKTLLVRVMTPDLRERLENLRKKPENIPQPISNTSRANLNKLLTDYTEMKKAILHVYWEEFQKDPVGLMSRVAQPASKKIDQNKLKPEMDEKGNLTTAGFACSQCGQPLFVYKLEQVSEKGKAYTNYFGRCNVAEHEKLILLAQLKPEKDSDEAVTYSLGKFGQRALDFYSIHVTKESTHPVKPLAQIAGNRYASGPVGKALSDACMGTIASFLSKYQDIIIEHQKVVKGNQKRLESLRELAGKENLEYPSVTLPPQPHTKEGVDAYNEVIARVRWWVNLNLWQKLKLSRDDAKPLLRLKGFPSFPLVERQANEVDWWDMVCNVKKLINEKKEDGKVFWQNLAGYKRQEALRPYLSSEEDRKKGKKFARYQLGDLLLHLEKKHGEDWGKVYDEAWERIDKKVEGLSKHIKLEEERRSEDAQSKAALTDWLRAKASFVIEGLKEADKDEFCRCELKLQKWYGDLRGKPFAIEAENSILDISGFSKQYNCAFIWQKDGVKKLNLYLIINYFKGGKLRFKKIKPEAFEANRFYTVINKKSGEIVPMEVNFNFDDPNLIILPLAFGKRQGREFIWNDLLSLETGSLKLANGRVIEKTLYNRRTRQDEPALFVALTFERREVLDSSNIKPMNLIGVARGENIPAVIALTDPEGCPLSRFKDSLGNPTHILRIGESYKEKQRTIQAKKEVEQRRAGGYSRKYASKAKNLADDMVRNTARDLLYYAVTQDAMLIFANLSRGFGRQGKRTFMAERQYTRMEDWLTAKLAYEGLPSKTYLSKTLAQYTSKTCSNCGFTITSADYDRVLEKLKKTATGWMTTINGKELKVEGQITYYNRYKRQNVVKDLSVELDRLSEESVNNDISSWTKGRSGEALSLLKKRFSHRPVQEKFVCLNCGFETHAAEQAALNIARSWLFLRSQEYKKYQTNKTTGNTDKRAFVETWQSFYRKKLKEVWKPAV

SEQ ID NO: 26 - protein, 979 aa, synthetic construct
QEIKRINKIRRRLVKDSNTKKAGKTRGPMKTLLVRVMTPDLRERLENLRKKPENIPQPISNTSRANLNKLLTDYTEMKKAILHVYWEEFQKDPVGLMSRVAQPASKKIDQNKLKPEMDEKGNLTTAGFACSQCGQPLFVYKLEQVSEKGKAYTNYFGRCNVAEHEKLILLAQLKPEKDSDEAVTYSLGKFGQRALDFYSIHVTKESTHPVKPLAQIAGNRYASSPVGKALSDACMGTIASFLSKYQDIIIEHQKVVKGNQKRLESLRELAGKENLEYPSVTLPPQPHTKEGVDAYNEVIARVRMWVNLNLWQKLKLSRDDAKPLLRLKGFPSFPLVERQANEVDWWDMVCNVKKLINEKKEDGKVFWQNLAGYKRQEALRPYLSSEEDRKKGKKFARYQLGDLLLHLEKKHGEDWGKVYDEAWERIDKKVEGLSKHIKLEEERRSEDAQSKAALTDWLRAKASFVIEGLKEADKDEFCRCELKLQKWYGDLRGKPFAIEAENSILDISGFSKQYNCAFIWQKDGVKKLNLYLIINYFKGGKLRFKKIKPEAFEANRFYTVINKKSGEIVPMEVNFNFDDPNLIILPLAFGKRQGREFIWNDLLSLETGSLKLANGRVIEKTLYNRRTRQDEPALFVALTFERREVLDSSNIKPMNLIGVARGENIPAVIALTDPEGCPLSRFKDSLGNPTHILRIGESYKEKQRTIQAKKEVEQRRAGGYSRKYASKAKNLADDMVRNTARDLLYYAVTQDAMLIFANLSRGFGRQGKRTFMAERQYTRMEDWLTAKLAYEGLPSKTYLSKTLAQYTSKTCSNCGFTITSADYDRVLEKLKKTATGWMTTINGKELKVEGQITYYNRYKRQNVVKDLSVELDRLSEESVNNDISSWTKGRSGEALSLLKKRFSHRPVQEKFVCLNCGFETHAAEQAALNIARSWLFLRSQEYKKYQTNKTTGNTDKRAFVETWQSFYRKKLKEVWKPAV

SEQ ID NO: 27 - protein, 978 aa, synthetic construct
QEIKRINKIRRRLVKDSNTKKAGKTGPMKTLLVRVMTPDLRERLENLRKKPENIPQPISNTSRANLNKLLTDYTEMKKAILHVYWEEFQKDPVGLMSRVAQPASKKIDQNKLKPEMDEKGNLTTAGFACSQCGQPLFVYKLEQVSEKGKAYTNYFGRCNVAEHEKLIKLAQLKPEKDSDEAVTYSLGKFGQRALDFYSIHVTKESTHPVKPLAQIAGNRYASSPVGKALSDACMGTIASFLSKYQDIIIEHQKVVKGNQKRLESLRELAGKENLEYPSVTLPPQPHTKEGVDAYNEVIARVRMWVNLNLWQKLKLSRDDAKPLLRLKGFPSFPLVERQANEVDWWDMVCNVKKLINEKKEDGKVFWQNLAGYKRQEALRPYLSSEEDRKKGKKFARYQLGDLLLHLEKKHGEDWGKVYDEAWERIDKKVEGLSKHIKLEEERRSEDAQSKAALTDWLRAKASFVIEGLKEADKDEFCRCELKLQKWYGDLRGKPFAIEAENSILDISGFSKQYNCAFIWQKDGVKKLNLYLIINYFKGGKLRFKKIKPEAFEANRFYTVINKKSGEIVPMEVNFNFDDPNLIILPLAFGKRQGREFIWNDLLSLETGSLKLANGRVIEKTLYNRRTRQDEPALFVALTFERREVLDSSNIKPMNLIGVARGENIPAVIALTDPEGCPLSRFKDSLGNPTHILRIGESYKEKQRTIQAKKEVEQRRAGGYSRKYASKAKNLADDMVRNTARDLLYYAVTQDAMLIFANLSRGFGRQGKRTFMAERQYTRMEDWLTAKLAYEGLPSKTYLSKTLAQYTSKTCSNCGFTITSADYDRVLEKLKKTATGWMTTINGKELKVEGQITYYNRYKRQNVVKDLSVELDRLSEESVNNDISSWTKGRSGEALSLLKKRFSHRPVQEKFVCLNCGFETHAAEQAALNIARSWLFLRSQEYKKYQTNKTTGNTDKRAFVETWQSFYRKKLKEVWKPAV

SEQ ID NO: 28 - protein, 979 aa, synthetic construct
QEIKRINKIRRRLVKDSNTKKAGKTRGPMKTLLVRVMTPDLRERLENLRKKPENIPQPISNTSRANLNKLLTDYTEMKKAILHVYWEEFQKDPVGLMSRVAQPASKKIDQNKLKPEMDEKGNLTTAGFACSQCGQPLFVYKLEQVSEKGKAYTNYFGRCNVAEHEKLIKLAQLKPEKDSDEAVTYSLGKFGQRALDFYSIHVTKESTHPVKPLAQIAGNRYASSPVGKALSDACMGTIASFLSKYQDIIIEHQKVVKGNQKRLESLRELAGKENLEYPSVTLPPQPHTKEGVDAYNEVIARVRMWVNLNLWQKLKLSRDDAKPLLRLKGFPSFPLVERQANEVDWWDMVCNVKKLINEKKEDGKVFWQNLAGYKRQEALRPYLSSEEDRKKGKKFARYQLGDLLLHLEKKHGEDWGKVYDEAWERIDKKVEGLSKHIKLEEERRSEDAQSKAALTDWLRAKASFVIEGLKEADKDEFCRCELKLQKWYGDLRGKPFAIEAENSILDISGFSKQYNCAFIWQKDGVKKLNLYLIINYFKGGKLRFKKIKPEAFEANRFYTVINKKSGEIVPMEVNFNFDDPNLIILPLAFGKRQGREFIWNDLLSLETGSLKLANGRVIEKTLYNRRTRQDEPALFVALTFERREVLDSSNIKPMNLIGVARGENIPAVIALTDPEGCPLSRFKDSLGNPTHILRIGESYKEKQRTIQAKKEVEQRRAGGYSRKYASKAKNLADDMVRNTARDLLYYAVTQDAMLIFANLSRGFGRQGKRTFMAERQYTRMEDWLTAKLAYEGLPSKTYLSKTLAQYTSKTCSNCGFTITSADYDRVLEKLKKTATGWMTTINGKELKVEGQITYYNRYKRQNVVKDLSVELDRLSEESVNNDISSWTKGRSGEALSLLKKRFSHRPVQEKFVCLNCGFETHAAEQAALNIARSWLFLRSQEYKKYQTNKTTGNTDKRAFVETWQSFYRKKLKEVWKPAV

SEQ ID NO: 29 - protein, 978 aa, synthetic construct
QEIKRINKIRRRLVKDSNTKKAGKTGPMKTLLVRVMTPDLRERLENLRKKPENIPQPISNTSRANLNKLLTDYTEMKKAILHVYWEEFQKDPVGLMSRVAQPASKKIDQNKLKPEMDEKGNLTTAGFACSQCGQPLFVYKLEQVSEKGKAYTNYFGRCNVAEHEKLILLAQLKPEKDSDEAVTYSLGKFGQRALDFYSIHVTKESTHPVKPLAQIAGNRYASGPVGKALSDACMGTIASFLSKYQDIIIEHQKVVKGNQKRLESLRELAGKENLEYPSVTLPPQPHTKEGVDAYNEVIARVRMWVNLNLWQKLKLSRDDAKPLLRLKKFPSFPLVERQANEVDWWDMVCNVKKLINEKKEDGKVFWQNLAGYKRQEALRPYLSSEEDRKKGKKFARYQLGDLLLHLEKKHGEDWGKVYDEAWERIDKKVEGLSKHIKLEEERRSEDAQSKAALTDWLRAKASFVIEGLKEADKDEFCRCELKLQKWYGDLRGKPFAIEAENSILDISGFSKQYNCAFIWQKDGVKKLNLYLIINYFKGGKLRFKKIKPEAFEANRFYTVINKKSGEIVPMEVNFNFDDPNLIILPLAFGKRQGREFIWNDLLSLETGSLKLANGRVIEKTLYNRRTRQDEPALFVALTFERREVLDSSNIKPMNLIGVARGENIPAVIALTDPEGCPLSRFKDSLGNPTHILRIGESYKEKQRTIQAKKEVEQRRAGGYSRKYASKAKNLADDMVRNTARDLLYYAVTQDAMLIFANLSRGFGRQGKRTFMAERQYTRMEDWLTAKLAYEGLPSKTYLSKTLAQYTSKTCSNCGFTITSADYDRVLEKLKKTATGWMTTINGKELKVEGQITYYNRYKRQNVVKDLSVELDRLSEESVNNDISSWTKGRSGEALSLLKKRFSHRPVQEKFVCLNCGFETHAAEQAALNIARSWLFLRSQEYKKYQTNKTTGNTDKRAFVETWQSFYRKKLKEVWKPAV

SEQ ID NO: 30 - protein, 7 aa, synthetic construct
PKKKRKV

SEQ ID NO: 31 - protein, 16 aa, synthetic construct
KRPAATKKAGQAKKKK

SEQ ID NO: 32 - protein, 9 aa, synthetic construct
PAAKRVKLD

SEQ ID NO: 33 - protein, 11 aa, synthetic construct
RQRRNELKRSP

SEQ ID NO: 34 - protein, 9 aa, synthetic construct
PKKKRKVSR

SEQ ID NO: 35 - protein, 39 aa, synthetic construct
PKKKRKVGGSPKKKRKVGGSPKKKRKVGGSPKKKRKVSR

SEQ ID NO: 36 - protein, 59 aa, synthetic construct
PKKKRKVGGSPKKKRKVGGSPKKKRKVGGSPKKKRKVGGSPKKKRKVGGSPKKKRKVSR

SEQ ID NO: 37 - protein, 11 aa, synthetic construct
PAAKRVKLDSR

SEQ ID NO: 38 - protein, 23 aa, synthetic construct
PAAKRVKLDGGSPAAKRVKLDSR

SEQ ID NO: 39 - protein, 47 aa, synthetic construct
PAAKRVKLDGGSPAAKRVKLDGGSPAAKRVKLDGGSPAAKRVKLDSR

SEQ ID NO: 40 - protein, 71 aa, synthetic construct
PAAKRVKLDGGSPAAKRVKLDGGSPAAKRVKLDGGSPAAKRVKLDGGSPAAKRVKLDGGSPAAKRVKLDSR

SEQ ID NO: 41 - protein, 18 aa, synthetic construct
KRPAATKKAGQAKKKKSR

SEQ ID NO: 42 - protein, 37 aa, synthetic construct
KRPAATKKAGQAKKKKGGSKRPAATKKAGQAKKKKSR

SEQ ID NO: 43 - protein, 21 aa, synthetic construct
PAAKRVKLDGGSPKKKRKVSR

SEQ ID NO: 44 - protein, 21 aa, synthetic construct
PAAKKKKLDGGSPKKKRKVSR

SEQ ID NO: 45 - protein, 11 aa, synthetic construct
PAAKKKKLDSR

SEQ ID NO: 46 - protein, 35 aa, synthetic construct
PAAKKKKLDGGSPAAKKKKLDGGSPAAKKKKLDSR

SEQ ID NO: 47 - protein, 47 aa, synthetic construct
PAAKKKKLDGGSPAAKKKKLDGGSPAAKKKKLDGGSPAAKKKKLDSR

SEQ ID NO: 48 - protein, 13 aa, synthetic construct
PAKRARRGYKCSR

SEQ ID NO: 49 - protein, 26 aa, synthetic construct
PAKRARRGYKCGSPAKRARRGYKCSR

SEQ ID NO: 50 - protein, 9 aa, synthetic construct
PRRKREESR

SEQ ID NO: 51 - protein, 9 aa, synthetic construct
PYRGRKESR

SEQ ID NO: 52 - protein, 10 aa, synthetic construct
PLRKRPRRSR

SEQ ID NO: 53 - protein, 20 aa, synthetic construct
PLRKRPRRGSPLRKRPRRSR

SEQ ID NO: 54 - protein, 32 aa, synthetic construct
PAAKRVKLDGGKRTADGSEFESPKKKRKVGGS

SEQ ID NO: 55 - protein, 34 aa, synthetic construct
PAAKRVKLDGGKRTADGSEFESPKKKRKVPPPPG

SEQ ID NO: 56 - protein, 39 aa, synthetic construct
PAAKRVKLDGGKRTADGSEFESPKKKRKVGIHGVPAAPG

SEQ ID NO: 57 - protein, 39 aa, synthetic construct
PAAKRVKLDGGKRTADGSEFESPKKKRKVGGGSGGGSPG

SEQ ID NO: 58 - protein, 40 aa, synthetic construct
PAAKRVKLDGGKRTADGSEFESPKKKRKVPGGGSGGGSPG

SEQ ID NO: 59 - protein, 48 aa, synthetic construct
PAAKRVKLDGGKRTADGSEFESPKKKRKVAEAAAKEAAAKEAAAKAPG

SEQ ID NO: 60 - protein, 22 aa, synthetic construct
PAAKRVKLDGGSPKKKRKVGGS

SEQ ID NO: 61 - protein, 21 aa, synthetic construct
PAAKRVKLDPPPPKKKRKVPG

SEQ ID NO: 62 - protein, 11 aa, synthetic construct
PAAKRVKLDPG

SEQ ID NO: 63 - protein, 21 aa, synthetic construct
PAAKRVKLDGGGSGGGSGGGS

SEQ ID NO: 64 - protein, 12 aa, synthetic construct
PAAKRVKLDPPP

SEQ ID NO: 65 - protein, 24 aa, synthetic construct
PAAKRVKLDGGGSGGGSGGGSPPP

SEQ ID NO: 66 - protein, 10 aa, synthetic construct
PKKKRKVPPP

SEQ ID NO: 67 - protein, 10 aa, synthetic construct
PKKKRKVGGS

SEQ ID NO: 68 - protein, 39 aa, synthetic construct
GSPKKKRKVGGSPKKKRKVGGSPKKKRKVGGSPKKKRKV

SEQ ID NO: 69 - protein, 59 aa, synthetic construct
GSPKKKRKVGGSPKKKRKVGGSPKKKRKVGGSPKKKRKVGGSPKKKRKVGGSPKKKRKV

SEQ ID NO: 70 - protein, 23 aa, synthetic construct
GSPAAKRVKLDGGSPAAKRVKLD

SEQ ID NO: 71 - protein, 47 aa, synthetic construct
GSPAAKRVKLDGGSPAAKRVKLDGGSPAAKRVKLDGGSPAAKRVKLD

SEQ ID NO: 72 - protein, 18 aa, synthetic construct
GSKRPAATKKAGQAKKKK

SEQ ID NO: 73 - protein, 35 aa, synthetic construct
KRPAATKKAGQAKKKKGGSKRPAATKKAGQAKKKK

SEQ ID NO: 74 - protein, 15 aa, synthetic construct
GSKLGPRKATGRWGS

SEQ ID NO: 75 - protein, 19 aa, synthetic construct
GSKRKGSPERGERKRHWGS

SEQ ID NO: 76 - protein, 31 aa, synthetic construct
GSPKKKRKVGSGSKRPAATKKAGQAKKKKLE

SEQ ID NO: 77 - protein, 30 aa, synthetic construct
GPKRTADSQHSTPPKTKRKVEFEPKKKRKV

SEQ ID NO: 78 - protein, 36 aa, synthetic construct
GGGSGGGSKRTADSQHSTPPKTKRKVEFEPKKKRKV

SEQ ID NO: 79 - protein, 45 aa, synthetic construct
AEAAAKEAAAKEAAAKAKRTADSQHSTPPKTKRKVEFEPKKKRKV

SEQ ID NO: 80 - protein, 40 aa, synthetic construct
GPPKKKRKVGGSKRTADSQHSTPPKTKRKVEFEPKKKRKV

SEQ ID NO: 81 - protein, 28 aa, synthetic construct
GPAEAAAKEAAAKEAAAKAPAAKRVKLD

SEQ ID NO: 82 - protein, 23 aa, synthetic construct
GPGGGSGGGSGGGSPAAKRVKLD

SEQ ID NO: 83 - protein, 11 aa, synthetic construct
GPPAAKRVKLD

SEQ ID NO: 84 - protein, 19 aa, synthetic construct
VGSKRPAATKKAGQAKKKK

SEQ ID NO: 85 - protein, 44 aa, synthetic construct
TGGGPGGGAAAGSGSPKKKRKVGSGSKRPAATKKAGQAKKKKLE

SEQ ID NO: 86 - protein, 26 aa, synthetic construct
TGGGPGGGAAAGSGSPKKKRKVGSGS

SEQ ID NO: 87 - protein, 13 aa, synthetic construct
PPPPKKKRKVPPP

SEQ ID NO: 88 - protein, 13 aa, synthetic construct
GGSPKKKRKVPPP

SEQ ID NO: 89 - protein, 10 aa, synthetic construct
PPPPKKKRKV

SEQ ID NO: 90 - protein, 10 aa, synthetic construct
GGSPKKKRKV

SEQ ID NO: 91 - protein, 19 aa, synthetic construct
GGSPKKKRKVGGSGGSGGS

SEQ ID NO: 92 - protein, 20 aa, synthetic construct
GGSPKKKRKVGGSPKKKRKV

SEQ ID NO: 93 - protein, 26 aa, synthetic construct
GGSGGSGGSPKKKRKVGGSPKKKRKV

SEQ ID NO: 94 - protein, 22 aa, synthetic construct
VGGGSGGGSGGGSPAAKRVKLD

SEQ ID NO: 95 - protein, 13 aa, synthetic construct
VPPPPAAKRVKLD

SEQ ID NO: 96 - protein, 25 aa, synthetic construct
VPPPGGGSGGGSGGGSPAAKRVKLD

SEQ ID NO: 97 - protein, 12 aa, synthetic construct
VGSPAAKRVKLD

SEQ ID NO: 98 - protein, 5 aa, synthetic construct
  VARIANT 2..5: note = individual amino acid residues may be present or absent
GGGGG

SEQ ID NO: 99 - protein, 10 aa, synthetic construct
  VARIANT 3..4: note = grouped amino acid residues may be present or absent
  VARIANT 5..6: note = grouped amino acid residues may be present or absent
  VARIANT 7..8: note = grouped amino acid residues may be present or absent
  VARIANT 9..10: note = grouped amino acid residues may be present or absent
GSGSGSGSGS

SEQ ID NO: 100 - protein, 25 aa, synthetic construct
  VARIANT 6..10: note = grouped amino acid residues may be present or absent
  VARIANT 11..15: note = grouped amino acid residues may be present or absent
  VARIANT 16..20: note = grouped amino acid residues may be present or absent
  VARIANT 21..25: note = grouped amino acid residues may be present or absent
GSGGSGSGGSGSGGSGSGGSGSGGS

SEQ ID NO: 101 - protein, 30 aa, synthetic construct
  VARIANT 7..12: note = grouped amino acid residues may be present or absent
  VARIANT 13..18: note = grouped amino acid residues may be present or absent
  VARIANT 19..24: note = grouped amino acid residues may be present or absent
  VARIANT 25..30: note = grouped amino acid residues may be present or absent
GGSGGSGGSGGSGGSGGSGGSGGSGGSGGS

SEQ ID NO: 102 - protein, 20 aa, synthetic construct
  VARIANT 5..8: note = grouped amino acid residues may be present or absent
  VARIANT 9..12: note = grouped amino acid residues may be present or absent
  VARIANT 13..16: note = grouped amino acid residues may be present or absent
  VARIANT 17..20: note = grouped amino acid residues may be present or absent
GGGSGGGSGGGSGGGSGGGS

SEQ ID NO: 103 - protein, 4 aa, synthetic construct
GGSG

SEQ ID NO: 104 - protein, 5 aa, synthetic construct
GGSGG

SEQ ID NO: 105 - protein, 5 aa, synthetic construct
GSGSG

SEQ ID NO: 106 - protein, 5 aa, synthetic construct
GSGGG

SEQ ID NO: 107 - protein, 5 aa, synthetic construct
GGGSG

SEQ ID NO: 108 - protein, 5 aa, synthetic construct
GSSSG

SEQ ID NO: 109 - protein, 4 aa, synthetic construct
GPGP

SEQ ID NO: 110 - protein, 6 aa, synthetic construct
PPAPPA

SEQ ID NO: 111 - protein, 4 aa, synthetic construct
PPPG

SEQ ID NO: 112 - protein, 7 aa, synthetic construct
PPPGPPP

SEQ ID NO: 113 - protein, 23 aa, synthetic construct
  VARIANT 8..11: note = grouped amino acid residues may be present or absent
  VARIANT 12..15: note = grouped amino acid residues may be present or absent
  VARIANT 16..19: note = grouped amino acid residues may be present or absent
  VARIANT 20..23: note = grouped amino acid residues may be present or absent
PPPGGGSGGGSGGGSGGGSGGGS

SEQ ID NO: 114 - protein, 23 aa, synthetic construct
  VARIANT 1..4: note = grouped amino acid residues may be present or absent
  VARIANT 5..8: note = grouped amino acid residues may be present or absent
  VARIANT 9..12: note = grouped amino acid residues may be present or absent
  VARIANT 13..16: note = grouped amino acid residues may be present or absent
GGGSGGGSGGGSGGGSGGGSPPP

SEQ ID NO: 115 - protein, 17 aa, synthetic construct
AEAAAKEAAAKEAAAKA

SEQ ID NO: 116 - protein, 16 aa, synthetic construct
VPPPGGGSGGGSGGGS

SEQ ID NO: 117 - protein, 15 aa, synthetic construct
TGGGPGGGAAAGSGS

SEQ ID NO: 118 - protein, 15 aa, synthetic construct
GGGSGGGSGGGSPPP

SEQ ID NO: 119 - protein, 12 aa, synthetic construct
TPPKTKRKVEFE

SEQ ID NO: 120 - protein, 7 aa, synthetic construct
GGSGGGS

SEQ ID NO: 121 - protein, 7 aa, synthetic construct
GSGSGGG

SEQ ID NO: 122 - protein, 27 aa, synthetic construct
SSGNSNANSRGPSFSSGLVPLSLRGSH

SEQ ID NO: 123 - protein, 80 aa, synthetic construct
GGPSSGAPPPSGGSPAGSPTSTEEGTSESATPESGPGTSTEPSEGSAPGSPAGSPTSTEEGTSTEPSEGSAPGTSTEPSE

SEQ ID NO: 124 - protein, 6 aa, synthetic construct
GGSGGG

SEQ ID NO: 125 - protein, 135 aa, synthetic construct
ERLVYEVRQKCRNIEDICISCGSLNVTLEHPLFIGGMCQNCKNCFLECAYQYDDDGYQSYCTICCGGREVLMCGNNNCCRCFCVECVDLLVGPGAAQAAIKEDPWNCYMCGHKGTYGLLRRREDWPSRLQMFFAN

SEQ ID NO: 126 - protein, 301 aa, synthetic construct
NHDQEFDPPKVYPPVPAEKRKPIRVLSLFDGIATGLLVLKDLGIQVDRYIASEVCEDSITVGMVRHQGKIMYVGDVRSVTQKHIQEWGPFDLVIGGSPCNDLSIVNPARKGLYEGTGRLFFEFYRLLHDARPKEGDDRPFFWLFENVVAMGVSDKRDISRFLESNPVMIDAKEVSAAHRARYFWGNLPGMNRPLASTVNDKLELQECLEHGRIAKFSKVRTITTRSNSIKQGKDQHFPVFMNEKEDILWCTEMERVFGFPVHYTDVSNMSRLARQRLLGRSWSVPVIRHLFAPLKEYFACV

SEQ ID NO: 127 - protein, 215 aa, synthetic construct
MGPMEIYKTVSAWKRQPVRVLSLFRNIDKVLKSLGFLESGSGSGGGTLKYVEDVTNVVRRDVEKWGPFDLVYGSTQPLGSSCDRCPGWYMFQFHRILQYALPRQESQRPFFWIFMDNLLLTEDDQETTTRFLQTEAVTLQDVRGRDYQNAMRVWSNIPGLKSKHAPLTPKEEEYLQAQVRSRSKLDAPKVDLLVKNCLLPLREYFKYFSQNSLPL

SEQ ID NO: 128 - protein, 71 aa, synthetic construct
DAKSLTAWSRTLVTFKDVFVDFTREEWKLLDTAQQIVYRNVMLENYKNLVSLGYQLTKPDVILRLEKGEEP

SEQ ID NO: 129 - protein, 99 aa, synthetic construct
NNSQGRVTFEDVTVNFTQGEWQRLNPEQRNLYRDVMLENYSNLVSVGQGETTKPDVILRLEQGKEPWLEEEEVLGSGRAEKNGDIGGQIWKPKDVKESL

SEQ ID NO: 130 - protein, 81 aa, Columba livia
QDVVTFKDVAIYFSPEEWVRLSAGQRELYQEVMLDNYELVTSLDRESKLLYKMDPEEESCEGVPYSSADSGAPDSSSTSAC

SEQ ID NO: 131 - protein, 81 aa, Rattus norvegicus
ALVTFEDVAVRFTQEEWALLDPSQKILYRDVMRETYRNLTSVGINWECWDLEACFRSLGRNLRVQVVKRKCELTNSGPCAE

SEQ ID NO: 132 - protein, 81 aa, Cebus imitator
SKAPITFGDLAIYFSQEEWEWLSPIQKDLYEDVMLENYRNLVSLGLSFRRPNVITLLEKGKAPWMVEPARRRRGPDSGSKV

SEQ ID NO: 133 - protein, 81 aa, Pan troglodytes
EMGLLTFRDIAIEFSLEEWQCLDCAQRNLYRDVMLENYRNLVSLGIAVSKPDLITCLEQNKESQNIKRNKMVAKHPVMHSH

SEQ ID NO: 134 - protein, 81 aa, Chlorocebus sabaeus
SQESVAFEDVAVYFTTKEWAIMVPAERALYRDVMLENYEAVAFVAVPPTSKPALVSHLEQGKESCFIRPPGVLSRSDWRAG

SEQ ID NO: 135 - protein, 81 aa, Ophiophagus hannah
STPVTFEDVVVYFTAAEWVHLTNWQRDFYQAVMMETYELVASVAGDGVPMAEDEEGGVERPVWQYIPRGKRRRKTPQPRAD

SEQ ID NO: 136 - protein, 81 aa, Ailuropoda melanoleuca
LLTFEDVAVSFSEEEWELLDPPQKTLYNDVMQENYETVISLGLKLKNDTGNDQPISISALEMQASGSKVLRKARMKVAQKT

SEQ ID NO: 137 - protein, 84 aa, Peromyscus maniculatus
VTYNDVHVDITQEEWALMDPSQRNLYKDVMVETYMNLTAIGYNWENLEVEEPCQNPLKHGRHERPHTGEKPYEYNQCGKAFAQP

SEQ ID NO: 138 - protein, 90 aa, Phyllostomus discolor
VAFRDVIVDFTQEEWQQLKPAQKDLYRDVMMEIYWNLVSLDLETEGDMNEPDPEKDSWEDRTSIVVVEGLMRNGAQGYACEKAGIQGCRV

SEQ ID NO: 139 - protein, 81 aa, Pan paniscus
MAFEDVAVYFSQEEWGLLDTAQRALYRRVMLDNFALVASLGLSTSRPRVVIQLERGEEPWVPSGTDTTLSRTTYRRRNPGS

SEQ ID NO: 140 - protein, 81 aa, Colobus angolensis
SQGSVTFRDVAIDFSQEEWKWLQPAQRDLYRRVMLENYGHLVSLGLSISKPDVVSLLEQGKEPWLGKRNVKRDLFSASESS

SEQ ID NO: 141 - protein, 81 aa, Colobus angolensis
VQEPVTFKDVAVDFTQEEWGQLDLVQRTLYRDVMLETYGHLLSVGNQIAKPEVISLLEQGEEPWSVEQACPQHTCPEWMRN

SEQ ID NO: 142 - protein, 81 aa, Mandrillus leucophaeus
WPESVTFEDVAVYFTQNQWASLDPAQRALYGEVMLENYANVASLVAFPFPKPALISHLERGEAPWGPDPWDTEIPRGISQG

SEQ ID NO: 143 - protein, 81 aa, unidentified
  source 1..81: note = Bos indicus x Bos taurus
SQSPLTFGDVAVEFSGEEWAWLDSAQRSLHRSVMLENYRNLASLGLCLSKPEMISSLEQRKEPWAVKRKSTRGMHPDSQTL

SEQ ID NO: 144 - protein, 81 aa, Felis catus
FQEAVTFKDVAVVFTEEELGLLDPPQRKLYREVMLENFRNLVSVGHSSSKPDVISQLEREEKLCVKEIHTQRGRHSGGRNQ

SEQ ID NO: 145 - protein, 81 aa, Physeter macrocephalus
KEAFVAFGDVAVDFTQEEWRLLSPAQRTLHREVMLETYNHLVSLEIPFSKPKLISQLERGEEPWIEERQRPLGLCPASRPT

SEQ ID NO: 146 - protein, 81 aa, Callorhinus ursinus
QAEVTFEDVAVLFSREEWGRLGPAQRGLYRDVMLETYRNLVSLGAGPAGPKPGVITQLERGDEPWVLDAQGAKGKERLRVS

SEQ ID NO: 147 - protein, 81 aa, Pan paniscus
MMFQDSVAFEDVAVTFTQEEWALLDPSQKNLYRDVMQETFRNLASIGKKWKPQNIYVEYENLRRNLRIVGERLFESKEGHQ

SEQ ID NO: 148 - protein, 81 aa, Pan paniscus
QDPSAEGLSEEVPVVFEELPVVFEDVAVYFTREEWGMLDKRQKELYRDVMRMNYELLASLGPAAAKPDLISKLERRAAPWI

SEQ ID NO: 149 - protein, 81 aa, Pongo sp.
MIQAQESITLEDVAVDFTWEEWQLLGAAQKDLYRDVMLENYSNLVAVGYQASKPDALFKLEQGEQPWTTEDGIHSGACSDM

SEQ ID NO: 150 - protein, 81 aa, Hylobates sp.
MDSVAFEDVAVNFTQEEWALLDPSQKNLYREVMQETVRNLASIGKKWNNQYIEDEHQNPRKNLRRLIGERLSESKESHQHG

SEQ ID NO: 151 - protein, 81 aa, Callithrix sp.
MPGPPGSLEMDPLTFRDVAIEFSLEEWQCLDTAQQNLYRNVMLENYKNLAFLGIAVSKPDLITRLEKEKEPWKMKRHRMVD

SEQ ID NO: 152 - protein, 81 aa, Callithrix sp.
EAVTFKDVAVFFTEEELGLLDLAQRKLYRDVMLENFRNLLSVGHQPFHQDVFHFLREEKFWMMETATQREGNSGENASVHP

SEQ ID NO: 153 - protein, 81 aa, Callithrix sp.
RALTPVSMTAEAKCTGFTQGSVTFEDVAIYFSQEEWGLLDEAQRLLYRDVMLENFALLTSLVCWHGMEDEETPEQSVSVNG

SEQ ID NO: 154 - protein, 81 aa, Callithrix sp.
QDPSAERLMEEVPVVFEELPVVFEDVAVYFTREEWGMLDKRQKELYRDVMRMNYELLASLGPAAAKPDLISKLERRAAPWI

SEQ ID NO: 155 - protein, 81 aa, Aotus trivirgatus
LAPEDHGSSYEGSVSFRDVAIDFSREEWRHLDLSQRNLYRDVMLETYSHLLSVGYQVPEAEVVMLEQGNEPWSLQGERPHQ

SEQ ID NO: 156 - protein, 81 aa, Aotus trivirgatus
MAAAALRLPAQGTVTFEDVAVKFSQEEWSLLSEAQRCLYHDVMLENLALISSLGCWYGANDETPSKQTLSIQQQSPLRSHW

SEQ ID NO: 157 - protein, 81 aa, Saimiri boliviensis
SVTFEDVAVNFSLEEWNLLNEAQRCLYRDVMLETLTLISSLGAPPHTLFPARACGPEAPPSRHCPRPSLCLSLSPLHPTGV

SEQ ID NO: 158 - protein, 81 aa, Alligator sinensis
MELREAFEDVAVYFTRKEWELLEDEDKELYRDLMLRNYQALVSLGYQGPTPGLICRIKQREVELWVCDDEHHGESSVSENL

SEQ ID NO: 159 - protein, 81 aa, Pantherophis guttatus
QGSVSFEDVAVYFTEEEWALLDSSQRALHREVMLENSRNLAAVGYGQEHKNYQEPSLALFQSEERMLGIQRVLQKTRRSCL

SEQ ID NO: 160 - protein, 81 aa, Xenopus laevis
LVKFEEVAVVFSEDEWNLLSDQQRGLYMEVMKENYEHLIYLGYEVPVILSLLQDGGGISSDAGSQSKSQQVAVAEGSNVNS

SEQ ID NO: 161 - protein, 81 aa, Microcaecilia unicolor
TQVPVTFEDVAVYFCEGEWETLAEWQKELYRETMKENYETLTSLGFSSKKPSLISKIEREEDPCVRDKQDSRDRRRLRSCW

SEQ ID NO: 162 - protein, 81 aa, Mus caroli
SQCLLTFGDVSVDFSQEEWECLDSAQRALYIDVMLENYSNLVSVENYSTCDTVHQHVNTGKESCQRNNLGEMLRNPSHDAL

SEQ ID NO: 163 - protein, 81 aa, Marmota monax
NEMVTFKDVAVVFSGEELELLDSAQWKLYQDVMLENFRNLLSVGGRIQTELETFPEAGPHEELSWQQIWEQIASDSTFSQD

SEQ ID NO: 164 - protein, 81 aa, Mesocricetus auratus
ARVAVMFSDVSIAFSQEEWEYLDLAQRDLYKDVMMENYRNVASLAGCFISKPDVISLLEQGKEPWKVVRKRRRNPDLETKD

SEQ ID NO: 165 - protein, 81 aa, Peromyscus maniculatus
PQSLLSFGDVAVDFSQEEWEYLDYDQRTLYMDVMLENYSNLVFVENHRIYGKYEKDLDQGTKHIAHEDVIIQEKSYKCNEL

SEQ ID NO: 166 - protein, 81 aa, Peromyscus maniculatus
IQNTVTYDDVHIDFTWEEWTLLDPSQRNLYKDVMVETYTNLTAVGYSWEDHNMEEHCQSSQRQRRYKRSNTGEKPCEYTQC

SEQ ID NO: 167 - protein, 81 aa, Mus musculus
MNAVTYEDVHVNFTQEEWALLDPSQKKLYKDVMLETYRNLNAIGFNWDSKIFKNIVQVLEDTEGMKEVRVQRKRLNILNVI

SEQ ID NO: 168 - protein, 81 aa, Octodon degus
AVTMEDVTVTFTNEEWALLNPAQKRLYGDVMWETFRTISAIGRTWDSQQMEEEYKNYLRNLSNEEVAKCCRYTTFNQHENI

SEQ ID NO: 169 - protein, 81 aa, Dipodomys ordii
SNKLVSFDDVAVEFSWEEWQELDISQRTLYRDVMLETYSMLVSLGHTGPKPQLIVKLEQDEESYMREASDKNFSDVQKMKH

SEQ ID NO: 170 - protein, 81 aa, Colobus angolensis
KPGAVSFADVAVYFSPEEWGCLRPAQRALYRDVMRETYGHLGALGFPGPKPALISWMEQESEAWSPAAQDPEKGERLGGAR

SEQ ID NO: 171 - protein, 81 aa, Chlorocebus sabaeus
FQEPLKFRDVAVEFSLEEWQCLDTIQQNLYRNVMLENYRNLVFLGIAVSKPDLITCLEQEKEPWTRKRHRMVAKPVTCSHF

SEQ ID NO: 172 - protein, 81 aa, Capra hircus
SQGRLRFQDVAIDFTLEEWECLDLGQRELYRDVMLENYGNLASLGLIVCKPDLVTFLEKMRDPQDVRGIETTAIHPDLASF

SEQ ID NO: 173 - protein, 81 aa, Bos mutus
SQSPLTFGDVAVEFSGEEWAWLDSAQRSLHRSVMLENYRNLASLGLCLSKPEMISSLEQRKEPWAVKRKSTRGMRPDSQTL

SEQ ID NO: 174 - protein, 81 aa, Nomascus leucogenys
RAEEAVTFKDVAVVFTEEELQLLDLAQRKLYRDVMLENFRNLLSVGHQPFHGDTFHFLREEKFWVMETTSQREGNSGGKIQ

SEQ ID NO: 175 - protein, 81 aa, Sus scrofa
FQAPVTFGDLAIYFSQEEWECLSPIQKDLYEDVMLENYQNLVSLGLSFRRPNVITLLEKGKAPWMVEPVKRRRGLDLGSKC

SEQ ID NO: 176 - protein, 81 aa, Neophocaena asiaeorientalis
SQGPVSFEDVAVDFTQEEWQQLDPAQRTLYRDVMLENYSHLVSVGYPVSKPGVISKLEQGEEPWIMKRDISNWIYPDRETR

SEQ ID NO: 177 - protein, 81 aa, Macaca fascicularis
SQESVAFEDVAVYFTTKEWAIMVPAERALYRDVMLENYEAVAFVVPPTSKPALVSHLEQGKESCFIRPQGVLSRSDWRAGL

SEQ ID NO: 178 - protein, 81 aa, Macaca fascicularis
FQGSISFKDVTVGFTQEEWQHLDPSQRALYRDVMLENYSNLVSVGYCVHKPEVISRLEQGEEPWRLEEEFPSQSFPVWTAD

SEQ ID NO: 179 - protein, 81 aa, Phascolarctos cinereus
PQESVTFKDVAVDFTWEEWGYLDTSQKELYQEVMLENYRNLVSLGFVVAKPDVISQLEQGEAPWRPEGRFPRSRHPDSDTR

SEQ ID NO: 180 - protein, 81 aa, Gorilla sp.
CYQDSVTFDDVAVDFTQEEWTLLDSTQRSLYSDVMLENYKNLATVGGQIIKPSLISWLEQEESRTVQGGVLRGRKTQWRGT

SEQ ID NO: 181 - protein, 81 aa, Acinonyx jubatus
PQESVTFKDIAVDFTQEEWALLDASQRKLYRDVMLENIGHLVSVGYRVCKSDVISQLQQGVELWREGRGFPQGVIPDRKSS

SEQ ID NO: 182 - protein, 81 aa, Cebus imitator
MGQLTFNDVTIEFSLEEWQCLDKPQQNLYREVMLENYRNLVFLGIAVSKPDLITCLKQGKEPWNIRRHEMVTKPPAMCSHF

SEQ ID NO: 183 - protein, 81 aa, Callithrix jacchus
VWGPLSFMDVFVDFTWEEWQLLDPAQKCLYRSVMLENYSNLVSLGYQHTKPDIIFKLEQGEELCMVQAPIPNQCCPNKVWK

SEQ ID NO: 184 - protein, 81 aa, Acinonyx jubatus
FQASVVFEDVAVNFTPEEWALLNRGQRKLYRDVMLETCRNLSAVGKDGSIPSLVFSEKQKFHSSGDLTRMQEGLLRSPLVE

SEQ ID NO: 185 - protein, 81 aa, Lipotes vexillifer
SQEQVSFKDVCVDFTREEWYLLDPAQKILYRDVILENYSHLVSVGNCITKPEVIFKIEQGEEPWILEERFPKQCCSERNWK

SEQ ID NO: 186 - protein, 81 aa, Sapajus apella
MVSFEDVAVLLSQEEWDCLIPAQRGLYRDVMLETYGNLVSLGLQASKPDVISRLEQGDEPWTTHTLRMQGSWSWRHKREGC

SEQ ID NO: 187 - protein, 81 aa, Otolemur garnettii
SQASVSFKDVNVEFTQDEWQQMGPAQRNLYRDVMLENYSNLVSVGYCIFKPKVIFRLEQGEEPWSSEEEFSSQRRPKNYRD

SEQ ID NO: 188 - protein, 81 aa, Otolemur garnettii
LQELLTFKDVSVEFSVDEWACLDPAQQTLYRDVMLENYRHLVFLGLTPSKPHLITCLEQSKEPWKVKAYQTVVKHPAVSNH

SEQ ID NO: 189 - protein, 81 aa, Monodelphis domestica
AQVLVTFQDVAVDFTQEEWRLLDPGQKELYKEVMLENVQNVLSLGLPVPREDWISHFDQGRAPWMLEGEGPSNSCLGRERR

SEQ ID NO: 190 - protein, 81 aa, Physeter macrocephalus
RVVFEDVAVYFSQEEWGLLDEAQRHLYHAVMTENFALVTSLGCWHGAQYEEAPSEQSVSVGMSEVGTPKPDPSTKKAQPYE

SEQ ID NO: 191 - protein, 81 aa, Aotus trivirgatus
IQGQVNFEDVFVYFSQEEWVLLDEAQRLLYRDVMLENFALMASLGHTSFTSHTVASLVMGPDWVDVTPAVATGTLSGSGPG

SEQ ID NO: 192 - protein, 81 aa, Enhydra lutris
VFQGSLSFEDVTVDFSREEWRLLDLAQKSLYRDVMLENYFNLISVGCQVPKQEVLFSLEQEEPRMLDGEISSHNCLGGDIG

SEQ ID NO: 193 - protein, 81 aa, Monodelphis domestica
FQASVTFKDVAVDFTWEEWRLLDPPQKELFWEVMLENYRNLVCLGLADSNKDVMMSKLESGEPHWIPTGGVLRSCWPGWES

SEQ ID NO: 194 - protein, 81 aa, Aotus trivirgatus
KPGAVSFADVAVYFSPEEWGCLRPAQRALYRDVMRETYGHLGALGFPGPKPALISWMEQESEAWSSAAQDPEKGENLGGAR

SEQ ID NO: 195 - protein, 81 aa, Rhinopithecus roxellana
VQEPVTFKDVAVDFTQEEWGQLDLVQRTLYRDVMLETYGHLLSVGNQIAKPEVISLLEQGEEPWSMEQACPQRTCPEWMRN

SEQ ID NO: 196 - protein, 81 aa, Ursus maritimus
VQSHVVFEDVAIYFSQEEWGLLDEAQRFLYHAVMLENFALLSSLGCWHGAQDEQALSEQGVSVGGSQVRTPKPAPSIQKSQ

SEQ ID NO: 197 - protein, 81 aa, Ovis aries
TQLTVEDVDIKFTPEEWECLDPAQRALYWDVMEETYRNLLSVDVSHIHMTKKLQAKANSGKGEILQTVMFGRAETHEIKDF

SEQ ID NO: 198 - protein, 81 aa, Callorhinus ursinus
AEGHVTFEDVAVYFSWEEWGLLDEAQRLLYRDVMLENLALMASLGLASSRTHEITQLEWWREPFLPPCGVVTAAMPRGWRR

SEQ ID NO: 199 - protein, 81 aa, Neovison vison
LVSFEDVAMDFSREEWQQLDPAQRCLYQDVMLEIYSHLLSVEGALGLKTSQQKIFEKASFHNGKESEVTRGGMWCSISEDL

SEQ ID NO: 200 - protein, 81 aa, Pteropus vampyrus
EQESVSFKDVTIDFSREEWQQLDFAQKSLYRDVMLENYFNLISVGCQVPKPEVIFNLEQVENSCMLHRKISRQSCLDGDIG

SEQ ID NO: 201 - protein, 81 aa, Equus caballus
PKVPVTFDDVAVYFSESEWGRLDKWQKELYKHVMRGNYEMLVSLDYAISKPDILTRMERGEEPCPDGPWGPEEGKEREAAR

SEQ ID NO: 202 - protein, 81 aa, Lipotes vexillifer
SQGLVAFEDVAVYFSLEEWERLDADQRELYQEVMQENYGILVSLGYPIPKPDLIFRLEQGEEPWVPDSPRPEEGDIVTGVY

SEQ ID NO: 203 - protein, 81 aa, Equus caballus
MEGLVMFRDVAVDFSQEEWACLDPAQRGLYRDVMLENYHHLVSLGLSLSKPDVISLLEQGKEPWMVSRNMAGGWCPDRLKN

SEQ ID NO: 204 - protein, 81 aa, Zalophus californianus
VRMPVTFEDVAVTFTQEEWGQLDPAQRTLYQEVMLETCGLLVSLGCPLPKPELFYPLDHSPELQTLKRGLSPNSCPGDSTK

SEQ ID NO: 205 - protein, 81 aa, Pan paniscus
GPLTFRDVAIEFSQEEWKSLDPVQKALYWDVMLENYRNLVFLGILPKCMTKELPPIGNSNTGEKCQTVMLERHECYDVENF

SEQ ID NO: 206 - protein, 80 aa, Vicugna pacos
MAPSQGRLTFEDVAIEFSQEEWECLDPAQRALYGEVMLETYRNLVSLGLTSKDSCSLRKKPRRRRRGQKRTREWPLLRYH

SEQ ID NO: 207 - protein, 81 aa, Carlito syrichta
SQGLLTFKDVAIEFSPEEWEYLDPPQRMLYRTVMLENHRNLVFLGLAVSKPDLIMCLEQRREPWNVKSHSKLAKSPAVTSH

SEQ ID NO: 208 - protein, 81 aa, Saimiri boliviensis
MAFEDVAVYFSQEEWGLLDTAQRALYRRVMLDNFALVASLGLSTTRPRVVIQLERGEEPWVPSGTDMTMSRNAHRRRNPGS

SEQ ID NO: 209 - protein, 81 aa, Lynx pardinus
FQGSLSFEDVTVGFSQEEWQHLDPAQRTLYRDVMLENYSHLVAVGCCVPKPDVIFRLEQGQQPWLVEEESLDQIWPEVCRV

SEQ ID NO: 210 - protein, 81 aa, Myotis brandtii
SLALVTFKDVLVNFTREEWKLLDAAQQVMYRDVMLENYRNLVSLGHRLPKPDVILQLEKGEEPWLVERGTHQDAHPDWDTA

SEQ ID NO: 211 - protein, 80 aa, Ursus maritimus
LQRLLTFGDVAIEFSQEEWRCLSHTQRELYRDVMLENYRHLLFLGLIVSKPDLVSLLEQRKEPWDVKRKKTVVFDPGRWE

SEQ ID NO: 212 - protein, 81 aa, Sapajus apella
ALRSVMFSDISIDFSPEEWDCLDLEQKDLYRDVMLENYSNLVSLGCFISKPDVISLLEQGKEPWKVVRKRRGQCPDLQTKY

SEQ ID NO: 213 - protein, 81 aa, Desmodus rotundus
SVTFRDVIVDFTQEEWQQLKPAQKDLYRDVMMEVYWNLVSLDVETRPDAKESDPQEDDWEDRPSVVVIAEGPTRNGARSYT

SEQ ID NO: 214 - protein, 81 aa, Geotrypetes seraphini
DRVKFTFSDVAVYFSEEEWQLLEEQQKELYQNVMKENYTTLMSLGYTTVKPDVISKIEQGKQPLVSSPSGSKGRRAIGRPS

SEQ ID NO: 215 - protein, 81 aa, Geotrypetes seraphini
MQVKFEDVAVSFSQEEWEYLDEGQKELYREVMKENYETLLSLGLKCLQKIHESDRPFTYPACGKSFNHQSNLRKHKRNHTG

SEQ ID NO: 216 - protein, 81 aa, Meleagris gallopavo
CSKEPLCLQEPVSFADVAVYFSREEWALLDPAQRALYWDVMLETYECIASLGGEDPWIPDVHGLKDMAGDTCPGDGIADLK

SEQ ID NO: 217 - protein, 81 aa, Gopherus agassizii
VTFEEVAVYFSEEEWALLDPGQRALYRDVMQENYETVISLGKDFCPLSPEQVALCGMLCGRSEGHVSQSPEQRETCKRQHK

SEQ ID NO: 218 - protein, 81 aa, Octodon degus
LLTFEDVAVHFSEEEWQLLDPNQKTLYNEVMWDICEAASFVGLKFKNDTGNAEPSSVSALEIQAAERQGSKTRKNVARKRK

SEQ ID NO: 219 - protein, 81 aa, Bos mutus
QPQGTMTFKDVEVTFSQDEWGLLDASQRNLYRDVMLENYGNMASVVGPFTKPALISWLEAREPWGLNVQGVQFKGNPGAAP

SEQ ID NO: 220 - protein, 81 aa, Callithrix jacchus
TQGSLTFKDVAIEFSQEEWKCLDPVQKALYRDVMLENYRNLGFLGLCLPDLDIISMLEQGKEPWTVVSQVKITRNPNCGEC

SEQ ID NO: 221 - protein, 81 aa, Colinus virginianus
GEEPVNFEEVAVYFSREEWALLDPAQRALYRDVMLETYECVASLAPLPAPKPMVISLLEEGEEPWIPDVGSPEAVAGDVSP

SEQ ID NO: 222 - protein, 81 aa, Monodelphis domestica
SQESVTFQDVTVDFTQEEWCMLDCSQKKLYREVMLENVQNLLSVGLPVPRENLLSSCQQGDSPWLLEQKGTRIFRADAEIC

SEQ ID NO: 223 - protein, 87 aa, Physeter macrocephalus
VTFEDVAVNFTLEEWALLDPSQKKLYRDVMRETLRNLASVGEKWEDHDIEDQYKNQGRKLRSHVLERLCESKEGSQCGENFSLIPNL

SEQ ID NO: 224 - protein, 93 aa, Micrurus lemniscatus
FREVSVYFSEEEWSWLDPDQKALYWEVMLENHRNMASLGDDGQENKDSYELLQGITARDTMETSAIEMEVERYKEKQSDDWNQESSSCTDDSV

SEQ ID NO: 225 - protein, 81 aa, Vicugna pacos
SQHLVTFEDVAVNFTQEEWTLLDQTQRDLYRDVMLENYQNLMALGSESCKPHVNSPLEGAEELRTRARRILQSEFMAESDL

SEQ ID NO: 226 - protein, 81 aa, Odobenus rosmarus
FLLGLLTFRDVAIEFSQEEWGCLNHTQRELYRDVMLENYGHLLFLGLIVSKPDLVSFLEQKKEPWDVKRKKTVAIHRGRWE

SEQ ID NO: 227 - protein, 81 aa, Pan paniscus
FGNLLGVPWAQGNSALPEGLLSFKDISMEFTWDEWQLLDSTQKYLYRDVILENYHNLISVGYHGTKPDLIFKLEQGEDPWI

SEQ ID NO: 228 - protein, 81 aa, Pan paniscus
MSQGSVTFRDVAIDFSQEEWKWLQPAQRDLYRCVMLENYGHLVSLGLSISKPDVVSLLEQGKEPWLGKREVKRDLFSVSES

SEQ ID NO: 229 - protein, 81 aa, Pan paniscus
PAQGPGKARPSRKRGRRPRALKFVDVAVYFSPEEWGCLRPAQRALYRDVMRETYGHLGALGCAGPKPALISWLERNTDDWE

SEQ ID NO: 230 - protein, 81 aa, Pan paniscus
MAAMPLKAQYQEMVTFEDVAVHFTKTEWTGLSPAQRALYRSVMLENFGNLTALGYPVPKPALISLLEGGDMAWGLEAQDDP

SEQ ID NO: 231 - protein, 81 aa, Pan paniscus
MVTFEDVAVHFTKTEWTGLSPAQRALYRSVMLENFGNLTALGYPVPKPALISLLEGGDMAWGLEAQDDPPAERTKNVCKVI

SEQ ID NO: 232 - protein, 81 aa, Pan paniscus
CSHRSCREDPGTSESREMDPVAFDDVAVNFTQEEWALLDISQRKLYREVMLETFRNLTSIGKKWKDQNIEYEYQNPRRNFR

SEQ ID NO: 233 - protein, 81 aa, Pan paniscus
MDSVAFEDVAVNFTQEEWSLLDPSQKNLYREVMQETLRNLASIGEKWKDQYIEDQYKNPRNNLRSLLGERVDENTEENHCG

SEQ ID NO: 234 - protein, 81 aa, Pan paniscus
MDSVAFEDVAVSFTQEEWALLDPSQKNLYRDVMQETFKNLTSVGKTWKVQNIEDEYKNPRRNLRRSFTLVAQAGVRQDLGS

SEQ ID NO: 235 - protein, 81 aa, Pan paniscus
MDSVAFEDVAVNFTHEEWALLSPSQKNLYRDVMRETIRNLNCIGMKWENQNIDDQYQNLRRNPRCDVVERFGKSKDGSQCG

SEQ ID NO: 236 - protein, 81 aa, Pan paniscus
MGPLTFTDVAIEFSLEEWQCLDTAQQNLYRNVMLENYRNLVFLGIAVSKPDLITCLEKEKEPCKMKRHEMVDEPPDGVSLL

SEQ ID NO: 237 - protein, 81 aa, Pan paniscus
MGPLTIRDVTVEFSLEEWHCLDTAQQNLYRDVMLENYRNLVFLGIAVSKPDLITCLEQGKEPCNMKRHEMVAKPPVMCSHI

SEQ ID NO: 238 - protein, 81 aa, Pan paniscus
MSQVTFSDVAIDFSHEEWACLDSAQRDLYKDVMVQNYENLVSVGLSVTKPYVIMLLEDGKEPWMMEKKLSKDWESRWENKE

SEQ ID NO: 239 - protein, 81 aa, Pan paniscus
MALRSVMFSDVSIDFSPEEWEYLDLEQKDLYRDVMLENYSNLVSLAGCFISKPDVISSLEQGKEPWKVVRKGRRQYPDLET

SEQ ID NO: 240 - protein, 81 aa, Pan paniscus
MAHLMMFRDVAVDFSQEEWECLDLEQRGLYRDVMLENYSNMVSLGLCIYQPEAFSLLEKGKEPWKILRDETRGPCPDMQSR

SEQ ID NO: 241 - protein, 81 aa, Pan paniscus
MAEGLKFKDVVIYFSQKEWECLHSAQKDLYRDVMLENYGNLVLLGLSDTKPNVISLLEQKKEPWMVKRKETKEWCPDWEFG

SEQ ID NO: 242 - protein, 81 aa, Pan paniscus
TCMVHRQTMSCSGAGGITAFVAFRDVAVDFTQEEWRLLSPAQRTLHREVMLETYNHLVSLEIPSSKPKLIAQLERGEEPWR

SEQ ID NO: 243 - protein, 81 aa, Pan paniscus
MIEYQIPVSFKDVVVGFTQEEWHQLSPAQRALYRDVMLETYSNLVSVGYEGTKPDVILRLEQEEAPWIGEAACPGCHCWED

SEQ ID NO: 244 - protein, 81 aa, Pan paniscus
MIEYQIPVSFKDVVVGFTQEEWHQLSPAQRALYRDVMLETYSNLVSVGYEGTKPDVILRLEQEEAPWIGEAACPGCHCWGI

SEQ ID NO: 245 - protein, 81 aa, Pan paniscus
MIEYQIPVSFKDVVVGFTQEEWHQLSPAQRALYRDVMLETYSNLVSVGYEGTKPDVILRLEQEEAPWIGEAACPGCHCWGK

SEQ ID NO: 246 - protein, 81 aa, Pan paniscus
MVHGSVTFRDVAIDFSQEEWECLQPDQRTLYRDVMLENYSHLISLGSSISKPDVITLLEQEKEPWMVVRKETSRRYPDLES

SEQ ID NO: 247 - protein, 81 aa, Pan paniscus
MTKFQEAVTFKDVAVAFTEEELGLLDSAQRKLYRDVMLENFRNLVSVGHQSFKPDMISQLEREEKLWMKELQTQRGKHSGF

SEQ ID NO: 248 - protein, 81 aa, Pan paniscus
MIKFQMVTFKDVAVVFTEEELGLLDSVQRKLYRDVMLENFRNLLLVAHQPFKPDLISQLEREEKLLMVETETPGDGCSGRK

SEQ ID NO: 249 - protein, 81 aa, Pan paniscus
MAQCLVTFADVAIDFSQEEWACLNSAQRDLYWDVMLENYSNLVSLDLESAYENKSLPTEKNIHEIRASKRNSDRRSKSLGR

SEQ ID NO: 250 - protein, 81 aa, Pan paniscus
MSLGSELFRDVAIVFSQEEWQWLAPAQRDLYRDVMLETYSNLVSLGLAVSKPDVISFLEQGKEPWMVERVVSGGLCPGAKG

SEQ ID NO: 251 - protein, 81 aa, Pan paniscus
MSLGSELFRDVAIVFSQEEWQWLAPAQRDLYRDVMLETYSNLVSLGLAVSKPDVISFLEQGKEPWMVERVVSGGLCPVLES

SEQ ID NO: 252 - protein, 81 aa, Pan paniscus
MNVEVVKVMPQDLVTFKDVAIDFSQEEWQWMNPAQKRLYRSMMLENYQSLVSLGLCISKPYVISLLEQGREPWEMTSEMTR

SEQ ID NO: 253 - protein, 81 aa, Pan paniscus
DPAQVPVAADLLTDHEEQGYVTFEDVAVYFSQEEWRLLDDAQRLLYRNVMLENFTLLASLGLASSKTHEITQLESWEEPFM

SEQ ID NO: 254 - protein, 81 aa, Pan paniscus
GSLEEGRRATGLPAAQVQEPVTFKDVAVDFTQEEWGQLDLVQRTLYRDVMLETYGHLLSVGNQIAKPEVISLLEQGEEPWS

SEQ ID NO: 255 - protein, 81 aa, Pan paniscus
MAGEAEAQLDPSLQGLVMFEDVTVYFSREEWGLLNVTQKGLYRDVMLENFALVSSLGLAPSRSPVFTQLEDDEQSWVPSWV

SEQ ID NO: 256 - protein, 81 aa, Pan paniscus
MGPQGARRQAFLAFGDVTVDFTQKEWRLLSPAQRALYREVTLENYSHLVSLGILHSKPELIRRLEQGEAPWGEERRRRPGP

SEQ ID NO: 257 - protein, 81 aa, Pan paniscus
MFQTAWRQEPVTFEDVAVYFTQNEWASLDSVQRALYREVMLENYANVASLAFPFTTPVLVSQLEQGELPWGLDPWEPMGRE

SEQ ID NO: 258 - protein, 81 aa, Pan paniscus
MMTAVSLTTRPQESVAFEDVAVYFTTKEWAIMVPAERALYRDVMLENYEAVAFVVPPTSKPALVSHLEQGKESCFTQPQGV

SEQ ID NO: 259 - protein, 81 aa, Pan paniscus
MELLTFKDVAIEFSPEEWKCLDTSQQNLYRDVMLENYRNLVSLGVTISNPDLVTCLEQRKEPYNLKIHETAARPPGHYRKR

SEQ ID NO: 260 - protein, 81 aa, Pan paniscus
AETSSSGLLEEQKMMKSQGLVSFKDVAVDFTQEEWQQLDPSQRTLYRDVMLENYSHLVSMGYPVSKPDVISKLEQGEEPWI

SEQ ID NO: 261 - protein, 81 aa, Pan paniscus
MAAGQREARPQVSLTFEDVAVLFTRDEWRKLAPSQRNLYRDVMLENYRNLVSLGLPFTKPKVISLLQQGEDPWEVEKDGSG

SEQ ID NO: 262 - protein, 81 aa, Pan paniscus
GSQGNLPQAEITLMNQAQESVTFEDVAVNFTNREWQCLTYAQRHLYKDVMLENYGNMVSLGFPFPKPPLISHLEREVDPCV

SEQ ID NO: 263 - protein, 81 aa, Pan paniscus
AEITLMNQAQDSRSILFQESVTFEDVAVNFTNREWQCLTYAQRHLYKDVMLENYGNMVSLGFPFPKPPLISHLEREVDPCV

SEQ ID NO: 264 - protein, 81 aa, Pan paniscus
MDMAQEPVTFRDVAIYFSREEWACLEPSQRTLYRDVMLDNFSSVAALGFCSPRPDLVSRLEQWEEPWVEDRERPELQAVRR

SEQ ID NO: 265 - protein, 81 aa, Pan paniscus
MAALFLSAPPQAEVTFEDVAVYLSREEWGRLGPAQRGLYRDVMLETYGNLVSLGVGPAGPKPGVISQLERGDEPWVLDVQG

SEQ ID NO: 266 - protein, 81 aa, Pan paniscus
MPANEDAPQPGEHGSACEVSVSFEDVTVDFSREEWQQLDSTQRRLYQDVMLENYSHLLSVGFEVPKPEVIFKLEQGEGPWT

SEQ ID NO: 267 - protein, 81 aa, Pan troglodytes
MTLLTFRDVAIEFSLEEWKCLDLAQQNLYRDVMLENYRNLFSVGLTVSKPGLITCLEQRKEPWNVKRQEAADGHPGWSAVV

SEQ ID NO: 268 - protein, 81 aa, Pan troglodytes
MSQGSVTFRDVAIDFSQEEWKWLQPAQRDLYRCVMLENYGHLVSLGLSISKPDVVSLLEQGKEPWLGKREVKRDLFSGWSA

SEQ ID NO: 269 - protein, 81 aa, Pan troglodytes
MPLKAQYQEMVTFEDVAVHFTKTEWTGLSPAQRALYRSVMLENFGNLTALGYPVPKPALISLLEGGDMAWGLEAQDDPPAE

SEQ ID NO: 270 - protein, 81 aa, Pan troglodytes
MDTVVFEDVVVDFTPEEWALLNPAQRKLYRDVMLETFKHLASVDNEAQLKASGSISQQDTSGEKLSLKQKIEKFTRKNIWA

SEQ ID NO: 271 - protein, 81 aa, Pan troglodytes
CSHRSCREDPGTSESREMDPVAFKDVAVNFTQEEWALLDISQRKLYREVMLETFRNLTSIGKKWKDQNIEFEYQNPRRNFR

SEQ ID NO: 272 - protein, 81 aa, Pan troglodytes
DSVAFEDVAVNFTQEEWALLDPSQKNLYREVMQETLRNLTSIGKKWNNQYIEDEHQNPKRNLRRLIGERLSESKESHQHGE

SEQ ID NO: 273 - protein, 81 aa, Pan troglodytes
TCMVHRQTMSCSGAGGITAFVAFRDVAVDFTQEEWRLLSPAQRTLHREVMLETYNHLVSLEIPSSKPKLIAQLEQGEEPWR

SEQ ID NO: 274 - protein, 81 aa, Pan troglodytes
MMQAQESLTLEDVAVDFTWEEWQLLSPAQKDLYRDVMLENYSNLVSVGYQASKPDAFSKLERGEETCTTEDEIYSRICSEI

SEQ ID NO: 275 - protein, 81 aa, Pan troglodytes
MALTQGQLSFSDVAIEFSQEEWKCLDPGQKALYRDVMLENYRNLISLGICLPDLSVTSIFFTSGLGRARLQGGSLARVSRV

SEQ ID NO: 276 - protein, 81 aa, Pan troglodytes
MNNSQGRVTFEDVTVNFTQGEWQRLNPEQRNLYRDVMLENYSNLVSVGQRETTKPDVILRLEQGKEPWSEEEEVLGSGRAE

SEQ ID NO: 277 - protein, 81 aa, Pan troglodytes
MLPIVQLYPQGLVSFKDVAVDFTQEEWQQLDPSQRTLYRDVMLENYSHLVSMGYPVSKPDVISKLEQGEEPWIIKGDISNW

SEQ ID NO: 278 - protein, 81 aa, Pan troglodytes
ADITLMSQAQDSRSILFQESVTFEDVAVNFTNREWQCLTYAQRHLYKDVMLENYGNMVSLGFPFPKPPLISHLEREVDPCV

SEQ ID NO: 279 - protein, 81 aa, Pan troglodytes
MRVLTFRDVAVEFSPEEWECLDSAQQHLYRDVMLENYGNLFSLGLAIFKPDLITYLEQRKEPWNARRQKTVAKHPAGSLHF

SEQ ID NO: 280 - protein, 81 aa, Gorilla sp.
MHLTAWPQKSVTFEDVAVYFTQAEWDGLSPAQRALYRDVMLENYGNVASLGFPLLKPAVISQLEGGGELGGPSPLAAGTGL

SEQ ID NO: 281 - protein, 81 aa, Gorilla sp.
MAAMPLKARYQEMVTFEDVAVHFTKTEWTGLSPAQRALYRSVMLENFGNLTALGYPVPKPALISLLEGGDMAWGLEAQDDP

SEQ ID NO: 282 - protein, 81 aa, Gorilla sp.
MPLKARYQEMVTFEDVAVHFTKTEWTGLSPAQRALYRSVMLENFGNLTALGYPVPKPALISLLEGGDMAWGLEAQDDPPAE

SEQ ID NO: 283 - protein, 81 aa, Gorilla sp.
MGPLQFKDVAIEFSLEEWHCLDTAQRNLYRDVMLENYRNLVFLGIVVSKPDLIARLEQGKKPLTMKRHEMVANPSGPGVVV

SEQ ID NO: 284 - protein, 81 aa, Gorilla sp.
EELVGQNHGMEGEACTGGDVTFSDVAIDFSHEEWACLDTAQRDLYKDVMVQNYENLVSVGLSVTKPYVIMLLEDGKEPWMM

SEQ ID NO: 285 - protein, 81 aa, Gorilla sp.
MIEYQIPVSFKDVVVGFTQEEWHRLSPAQRALYRDVMLETYSNLVSVGYEGTKPDVILRLEQEEAPWIGEAACPGCHCWGK

SEQ ID NO: 286 - protein, 81 aa, Gorilla sp.
MNMEGLVMFQDLSIDFSQEEWECLDAAQKDLYRDVMMENYSSLVSLGLSIPKPDVISLLEQGKEPWMVSRDVLGGWCRGLE

SEQ ID NO: 287 - protein, 81 aa, Gorilla sp.
LAPEDHGSSYEGSVSFRDVAIDFSREEWRHLDPSQRNLYRDVMLETYSHLLSVGYQVPEAEVVMLEQGKEPWALQGERPRQ

SEQ ID NO: 288 - protein, 81 aa, Gorilla sp.
MVHGSVTFRDVAIDFSQEEWECLQPDQRTLYRDVMLENYSHLISLAGSSISKPGVITLLEQEKEPWMVVRKETSRWYPDLE

SEQ ID NO: 289 - protein, 81 aa, Gorilla sp.
MTKFQEAVTFKDVAVAFTEEELGLLDSAQRKLYRDVMLENFRNLVSVGHQSFKPDVISQLEREEKLWMKELQTQRGKHSET

SEQ ID NO: 290 - protein, 81 aa, Gorilla sp.
MLQTVWFQEPVTFEDVAVYFTQNEWASLHPTQRALYREVMLENYANVTSLSAFPFPKPDLIFQLEQGEAAWGPDPWTLAGG

SEQ ID NO: 291 - protein, 81 aa, Gorilla sp.
MELLTFRDVAIEFSPEEWKCLDPDQQNLYRDVMLENYRNLVSLGVAISNPDLVTCLEQRKEPYNVKIHKIVARPPAVCSHS

SEQ ID NO: 292 - protein, 81 aa, Gorilla sp.
MAAGQREARPQVSLTFEDVAVLFTRDEWRKLAPSQRNLYRDVMLENYRNLLSLGLPFTKPQVISLLQQGEDPWEVEKEGSG

SEQ ID NO: 293 - protein, 81 aa, Gorilla sp.
MAVDLLSAQERVTFRDVAVFFSQDEWLHLDSAQRALYREVMLENYSILVSLGIPFSMPKLIHQLQQGEDPCMVEREVPSDT

SEQ ID NO: 294 - protein, 81 aa, Gorilla sp.
MDMAQEPVTFRDVAIYFSREEWACLEPSQRALYRDVMLDNFSSVAALGFCSPRPDLVSRLEQWEEPWVEDWERPELQAVQR

SEQ ID NO: 295 - protein, 81 aa, Gorilla sp.
MAALFLSAPHQAKVTFEDVAVYLSREEWGRLGPAQRGLYRDVMLETYGNLVSLGVGPAGPKPGVISQLERGDEPWVLDVQG

SEQ ID NO: 296 - protein, 81 aa, Gorilla sp.
MAMSQESLTFKDVFVDFTLEEWQQLDSAQKNLYRDVMLENYSHLVSVGYLVEKPDVIFRLGPGEESWMADGGTPVRTCAGE

SEQ ID NO: 297 - protein, 81 aa, Pongo sp.
GESLESRVTLGSLTAESQELLTFKDVSVDFTQEEWGQLAPAHRNLYREVMLENYGNLVSVGYQLSKPGVISQLEKGEEPWL

SEQ ID NO: 298 - protein, 81 aa, Pongo sp.
MANATGSGVEQKFQGSVSFKDVTVGFTQEEWQHLDPSQRALYRDVMLENYSNLVSVGYCVHKPEVIFRLEQGEEPWKLEEE

SEQ ID NO: 299 - protein, 81 aa, Pongo sp.
MTLLTFRDVAIEFSLEEWKCLDLAQQNLYRDVMLENYRNLFSIGLTVSKPGLITCLEQRKEPWNVKRQEAVDGHPGWCSGV

SEQ ID NO: 300 - protein, 81 aa, Pongo sp.
MSQGLVTFRDVAIDFSQEEWKWLQPAQRDLYRCVMLENYGHLVSLGLSISKPDVVSLLEQGKEPWLGKREVKRDLFSVSES

SEQ ID NO: 301 - protein, 81 aa, Pongo sp.
APLLAPRPGETRPGCRKPGAVSFADVAVYFSPEEWGCLRPAQRALYRDVMRETYGHLGALGFPGPKPALISWMEQESEAWS

SEQ ID NO: 302 - protein, 81 aa, Pongo sp.
MHLTAWPQKSVTFEDVAVYFTQAEWDGLSPAQRTLYRDVMLENYGNVASLGFPLLKPAVISQLEGGGELGGPSPLAAGRGL

SEQ ID NO: 303 - protein, 81 aa, Pongo sp.
MGPLQFRDVAIEFSLEEWHCLDTTQRNLYRDVMLENYRNLVFLGIVVSKPDLITCLEQGKKPLTMKRHEMIAKPPGQAQWL

SEQ ID NO: 304 - protein, 81 aa, Pongo sp.
MSQVTFSDVAIDFSHEEWACLDSAQRDLYKDVMVQNYENLVSVGLSITKPYVIMLLEDGKEPWMMEKKLSKVYPFPLSHSV

SEQ ID NO: 305 - protein, 81 aa, Pongo sp.
MAQGLVTFRDVAIEFSLEEWKCLEPAQRDLYREVTLENFGHLASLGLSISKPDVVSLLEQGKEPWMIANDVTGPWYPDLES

SEQ ID NO: 306 - protein, 81 aa, Pongo sp.
MAQESVMFSDVSVDFSQEEWECLNDDQRDLYRDVMLENYSNLVSMAGHSVSKPNVISYLEQGKEPWLVDRELTRGQWPVLE

SEQ ID NO: 307 - protein, 81 aa, Pongo sp.
MAHLMMFRDVAVDFSQEEWECLDLEQRDLYRDVMLENYSNMVSLGLCIYQPEAFSLLEKGKDPWKILRDETRRPCPDMQSR

SEQ ID NO: 308 - protein, 81 aa, Pongo sp.
LAPDDHGSSYEGSVSFRDVAIDFSREEWRHLDPSQRNLYRDVMLETYSHLLSVGYQVPEAEVVMLEQGKEPWALQGERPRH

SEQ ID NO: 309 - protein, 81 aa, Pongo sp.
HRVGLIRSYNSKTMTCFQELVTFRDVAIDFSRQEWEYLDPNQRDLYRDVMLENYRNLVSLGGHSISKPVVVDLLERGKEPW

SEQ ID NO: 310 - protein, 81 aa, Pongo sp.
EETQGELTSSCGSKTMANVSLAFRDVSIDLSQEEWECLDPVQRDLYKDVMLENYSNLVSLGYTIPKPDVITLLEQEKEPWI

SEQ ID NO: 311 - protein, 81 aa, Pongo sp.
MTKAQESLTLKDVAVDFTWEEWQLLGPAQKRLYRDVMLENYSNLVSVGYQASKPDALTKLEQGEPLWTLEDEIHSPAHPEI

SEQ ID NO: 312 - protein, 81 aa, Pongo sp.
MINAQELLTLEDVTVEFTWEEWQLLDPFQKDLYRDVTLEIYSNLVSMGYQVSKPDALSKLEQGEEPWTMEDERHSRICPGT

SEQ ID NO: 313 - protein, 81 aa, Pongo sp.
EGEAQKRKAEESGMPLTQGHLTFRDVAIEFSQEEWKCLDPVQKALYRDVMLENYRNLVSLGICLPDLSIFSMMKQRTESWT

SEQ ID NO: 314 - protein, 81 aa, Pongo sp.
MNVEVVKVMPQDLVTFKDVAIDFSQEEWQWMNPAQKCLYRSMMLENYQSLVSLGLCISKPYVISLLEQGREPWEMTSEMTR

SEQ ID NO: 315 - protein, 81 aa, Pongo sp.
MNSEVIVDPIQGQVNFEDVFVYFSQEEWVLLDEAQRLLYRDVMLENFALMASLGHTSFMSHIGASLVMGSEPWVPDWVDMI

SEQ ID NO: 316 - protein, 81 aa, Pongo sp.
MGPQGARRQAFLAFGDVTVDFTQKEWRLLSPTQRALYREVTLENYSHLVSLGILHSKPELIRRLEQGEAPWGEERRRRPGP

SEQ ID NO: 317 - protein, 81 aa, Pongo sp.
MAAVSPTTRCQESVTFEDVAVVFTDEEWSHLVPTQRDLYKEVMLENYNSIVSLGLPVPQPDVIFQLKRGDKPWMVDLHGSE

SEQ ID NO: 318 - protein, 81 aa, Pongo sp.
MMTAVSLTTRPQESVAFEDVAVYFTTKEWAIMVPAERALYRDVMLENYEAVAFVVSPTSKPALVSHLEQGKESCFTRPQGV

SEQ ID NO: 319 - protein, 81 aa, Pongo sp.
MFPPARGKELLSFEDVAMYFTREEWGHLSWGQKDLYRDVMLENYRNMVLLGFQFPKPEVICQLENWDEQWILDLPRAGNRK

SEQ ID NO: 320 - protein, 81 aa, Pongo sp.
QDPSAEGLSEEVPVVFEELPVVFEDVAVYFTREEWGMLDKWQKELYRDVMRMNYELLASLGPAAAKPDLISKLERRAAPWI

SEQ ID NO: 321 - protein, 81 aa, Hylobates sp.
MAAGQREARPQVSLTFEDVAVLFTRDEWRKLAPSQRNLYRDVMLENYRNLVSLGLPFTKPKVISLLQQGEDPWKVEKDSSG

SEQ ID NO: 322 - protein, 81 aa, Hylobates sp.
MAGEAEAQLDPSLQGLVMFEDVTVYFSREEWGLLNVTQKGLYRDVMLENFALVSSLGLAPSRSPVFTQLEDDEQSWVPNWV

SEQ ID NO: 323 - protein, 81 aa, Hylobates sp.
MAAAAALRAHAQSSVTFEDVAVNFSMEEWSLLNEAQRCLYRDVMLETLTLISSLGCWHGGEDEAAPSKQSTCIYIYKEQGG

SEQ ID NO: 324 - protein, 81 aa, Hylobates sp.
MAAAALVNTPQGHVTFEDIAVYFSQEEWGLLDEAQRCLYHDVMLENFSLMASVGCLHGIEAEEAPSEQTVSAQGASQARTP

SEQ ID NO: 325 - protein, 81 aa, Hylobates sp.
MAAAALRDPAQQGYVTFEDVAVYFSQEEWRLLDEAQKLLYRNVMLENFSLLASLGLASSKTHEITQLESWEEPFMPAWEVV

SEQ ID NO: 326 - protein, 81 aa, Hylobates sp.
MAAAALRDPAQQGYVTFEDVAVYFSQEEWRLLDEAQKLLYRNVMLENFSLLASLGLASSKTHEITQLESWEEPFMPAWEAV

SEQ ID NO: 327 - protein, 81 aa, Hylobates sp.
MSLGSELFRDVAIVFSQEEWQWLAPAQRDLYRDVMLETYSNLVSLGLAISKPDVISFLEQGKEPWMVERVVSRGLCPVLES

SEQ ID NO: 328 - protein, 81 aa, Hylobates sp.
MALRSVMFSDVSIDFSPEEWEYLDLEQKDLYRDVMLENYSNLVSLGCFISKPDVISLLEQGKEPWKVVRKGRRQYPDLETR

SEQ ID NO: 329 - protein, 81 aa, Hylobates sp.
MGLLTFRDVAIEFSLEEWQCLDTAQKNLYRNVMLENYRNLAFLGIAVSKPDLIICLEKEKEPWNMKRHEMVDEPPGLAVSN

SEQ ID NO: 330 - protein, 81 aa, Hylobates sp.
MEPLKFRDVAIEFSLEEWQCLDSIQQNLYRNVMLENYRNLVFLGIAASKPDLIICLEQEKEPWSRKRRRMVAELPVICSHF

SEQ ID NO: 331 - protein, 81 aa, Hylobates sp.
MGLLTFRDVAIEFSLEEWQCLDTAQQNLYRNVMLENYRNLAFLGIAVSKPDLITCLEQGKEPWNMKRHEMVDEPPGVCPHF

SEQ ID NO: 332 - protein, 81 aa, Hylobates sp.
MSGPPGSLEMEPLQFRDVAVEFSLEEWHCLDTAQQNLYRDVMLENYRHLVFLGIVVSKPDLITCLEQGKKPLTMKRHEMIA

SEQ ID NO: 333 - protein, 81 aa, Hylobates sp.
MGPLQFRDVAIEFSLEEWHCLDTAQRNLYRNVMLENYSNLVFLGIVVSKPDLITRLEQGKKPLTMKRHEMVANPSGPGVFV

SEQ ID NO: 334 - protein, 81 aa, Hylobates sp.
MMFQDSVAFEDVAVTFTQEEWALLDPSQKNLYRDVMQETFKNLASIGKKWKAQNIYVEYKNLRRNLRIVGERLFESKEGHQ

SEQ ID NO: 335 - protein, 81 aa, Hylobates sp.
MDSVAFEDVAINFTCEEWALLGPSQKSLYRDVMQETIRNLDCIGMTWQTHDIEEDQYKDLRRNLRCHMVERSCEIKDNSQC

SEQ ID NO: 336 - protein, 81 aa, Hylobates sp.
MIKSQESLTLEDVAVEFTWEEWQLLGPAQKDLYRDVMLENYSNLVSVGYQASKPDALFKLEQGEPWTVENDSHICPEIKKV

SEQ ID NO: 337 - protein, 81 aa, Hylobates sp.
MMQAQESLTLEDVAVDFTWEEWQFLSPAQKDLYRDVMLENYSNLVAVGYQARKPDALSKLERGEEPCTTEDEIYARICSDS

SEQ ID NO: 338 - protein, 81 aa, Hylobates sp.
MESLTLEDVAVDFTWEEWQFLSPAQKDLYRDVMLENYSNLVAVGYQARKPDALSKLERGEEPCTTEDEIYARICSDSGGAS

SEQ ID NO: 339 - protein, 81 aa, Hylobates sp.
MINAQELLTLEDVTVEFTWEEWQLLDPFQKDLYRDVMLEIYSNLVSIGYQVSKPDALSKLERGEEPWTVEDERHSQICPEN

SEQ ID NO: 340 - protein, 81 aa, Hylobates sp.
MSQGSVTFRDVAIDFSQEEWKWLQPAQRDLYRCVMLENYGHLVSLGLSISKPDVVSLLEQGKEPWLGKRDVKRDLFSVLKE

SEQ ID NO: 341 - protein, 81 aa, Hylobates sp.
MAHALVTFRDVAIDFSQKEWECLDTTQRKLYRDVMLENYNNLVSLGYSGSKPDVITLLEQGKEPCMAARDVTGRQYPGLLS

SEQ ID NO: 342 - protein, 81 aa, Hylobates sp.
MIEYQIPVSFKDVVVGFTQEEWHQLSPAQRALYRDVMLETYSNLVSVGYEGTKPDVILRLEQEEAPWIGEAACLGCHCWED

SEQ ID NO: 343 - protein, 81 aa, Hylobates sp.
MIEYQIPVSFKDVVVGFTQEEWHQLSPAQRALYRDVMLETYSNLVSVGYEGTKPDVILRLEQEEAPWIGEAACLGCHCWGI

SEQ ID NO: 344 - protein, 81 aa, Hylobates sp.
MIEYQIPVSFKDVVVGFTQEEWHQLSPAQRALYRDVMLETYSNLVSVGYEGTKPDVILRLEQEEAPWIGEAACLGCHCWGK

SEQ ID NO: 345 - protein, 81 aa, Hylobates sp.
LAPEDHGSSYEGSVSFRDVAIDFSREEWRHLDLSQRNLYRDVMLETYSHLLSVGYQVPEAEVVMLEQGKEPWALQGERPRH

SEQ ID NO: 346 - protein, 81 aa, Hylobates sp.
MNMEGLVMFQDLSIDFSQEEWECLDAAQKDLYRDVMMENYSSLVSLGLSIPKPDVISLLEQGKEPWMVSRDMLGGWCPDSE

SEQ ID NO: 347 - protein, 81 aa, Hylobates sp.
TQPDEDLHLQVEETQLVKESVTFKDVAIDFTLEEWRLMDPTQRNLHKDVMLENYRNLVSLGLAVSKPDMISHLENGKGPWV

SEQ ID NO: 348 - protein, 81 aa, Hylobates sp.
MGLVSFKDVAVDFTQEEWQQLDPSQRTLYRDVMLENYSHLVSMGYPVSKPDVISKLEQGEEPWIIKGDISNWIYPDEYQAD

SEQ ID NO: 349 - protein, 81 aa, Hylobates sp.
IHLTAWPQKSVTFEDVAVYFTQAEWDGLSPAQRTLYRDVMLENYGNVASLGFPLLKPAVISQLEGGGDLGGPSPLAAGTGL

SEQ ID NO: 350 - protein, 81 aa, Hylobates sp.
MAAMPLKARYQEMVTFEDVAVHFTKTEWTGLSPAQRALYRSVMLENFGNLTALGYPVPKPALISLLEGGDMDWGLEAQDDP

SEQ ID NO: 351 - protein, 81 aa, Hylobates sp.
MVTFEDVAVHFTKTEWTGLSPAQRALYRSVMLENFGNLTALGYPVPKPALISLLEGGDMDWGLEAQDDPPAERTKNVCKVI

SEQ ID NO: 352 - protein, 81 aa, Hylobates sp.
MPLKARYQEMVTFEDVAVHFTKTEWTGLSPAQRALYRSVMLENFGNLTALGYPVPKPALISLLEGGDMDWGLEAQDDPPAE

SEQ ID NO: 353 - protein, 81 aa, Hylobates sp.
PAQGPGEARPSRKRGRRPRALKFVDVAVYFSPEEWGCLRPAQRALYRDVMRETYGHLGALGCAGPKPALISWLERNTDDWE

SEQ ID NO: 354 - protein, 81 aa, Hylobates sp.
ADITLMSQAQDSRSILFQESVTFEDVAVNFTNREWQCLTYAQRHLYKDVMLENYRNMASLGFPFPKPPLISHLEREVDPCV

SEQ ID NO: 355 - protein, 81 aa, Hylobates sp.
MPGPPGSLEMGVLTFRDVAIEFSLEEWQCLDITQQNLYRNVMLENYRNLVFVGIAASKPDLITCLEQGKEPWNVKRHEMVA

SEQ ID NO: 356 - protein, 81 aa, Hylobates sp.
MMTAVSLTTRPQESVAFEDVAVYFTAKEWDIMVPAERALYRDVMLENYEAVAFVVPPTSKPALVSHLEQGKESCFTRPQGV

SEQ ID NO: 357 - protein, 81 aa, Macaca mulatta
MAHMAFRDVAVDFTQDEWRLLSPAQRTLYREVMLENYSNLVSLGISFSKPELITQLEQGKETWREEKNCSPATCPADPEPE

SEQ ID NO: 358 - protein, 81 aa, Macaca mulatta
MSQGSVTFRDVAIDFSQEEWKWLQPAQRDLYRCVMLENYGHLVSLGLSISKPDVVSLLEQGKEPWLGKRNVNRDLFSVSES

SEQ ID NO: 359 - protein, 81 aa, Macaca mulatta
MAAVSPTTRCQESVTFEDVAVVFTDEEWSHLVPIQRDLYKEVMLENYNSIVSLGLPVPQPDVIFQLKRGDKPWVVDLHGSE

SEQ ID NO: 360 - protein, 81 aa, Macaca mulatta
TLLTFRDVAIEFSLEEWKCLDPAQQNLYRDVMLENYRNLFSIGLTVSKPGLITCLEQRKEPWNVKRQEAVDGHPAMSSHVT

SEQ ID NO: 361 - protein, 81 aa, Macaca mulatta
MAPGLLTTREEALMAFRDVAVAFTQKEWKLLSSAQRTLYREVMLENYSHLVSLGIAFSKPKLIEQLEQGNEPWREENEHLL

SEQ ID NO: 362 - protein, 81 aa, Macaca mulatta
MDSVAFEDVAVTFTQEEWALLDPSQKTLYRDVMQETFRNLASVGKKWKAQNMYVEYENLKRNLRTFVGERLFESKEGHQHG

SEQ ID NO: 363 - protein, 81 aa, Macaca mulatta
MDSVAFEDVAVNFTQEEWALLSPSQKNLYRDVMLEAFRNLASVGIQWKDQDTENLYQNLGIKLRHMRAHAGHTRSECGGEW

SEQ ID NO: 364 - protein, 81 aa, Macaca mulatta
MGLLTFRDVAIEFSLEEWQCLDTAQKNLYRNVMLENYRNLAFLGVAVSKPDLIICLEKDKEPWNMKRHEMVDEPPGLTVSN

SEQ ID NO: 365 - protein, 81 aa, Macaca mulatta
MEPLKFRDVAVEFSLEEWQCLDTIQQNLYRNVMLENYRNLVFLGIAVSKPDLITCLEQEKEPWTRKRHRMVAKPVTCSHFA

SEQ ID NO: 366 - protein, 81 aa, Macaca mulatta
MAHFQGSVTFEDVAIAFSQQEWESLDSSQRGLYRDVMLENYRNLVSMGHSLSKPHVIALLERWKEPKVTERKDGRRWCTDL

SEQ ID NO: 367 - protein, 81 aa, Macaca mulatta
MAHFQGSVTFEDVAIAFSQQEWESLDSSQRGLYRDVMLENYRNLVSMAGHSLSKPHVIALLERWKEPKVTERKDGRRWCTD

SEQ ID NO: 368 - protein, 81 aa, Macaca mulatta
MNMEGLVMFQDLFIHFSQEEWECLDAAQKDLYRDVMMENYSSLVSLGLCIPKPDVISLLEQGKEPWMVSRDVLGGWCPDSE

SEQ ID NO: 369 - protein, 81 aa, Macaca mulatta
TMSCSRAGGITGCIKYSTASVAFRDVAVDFTQEEWRLLSPAQRTLHREVMLETYNHLVSLEIPSSKPKLIAQLERGEEPWR

SEQ ID NO: 370 - protein, 81 aa, Macaca mulatta
MSLGSELFRDVAIVFSQEEWQCLAPAQRDLYRDVMLETYNNLVSLGLAISKPDVISFLEQGKEPWMVERVVSGGLCPVLES

SEQ ID NO: 371 - protein, 81 aa, Macaca mulatta
MNVEVVKVMPQDLVTFKDVAIDFSQEEWQWMNPAQKHLYRSMMLENYQSLVSLGLCISKPCVISLLEQGREPWEMTSEMTR

SEQ ID NO: 372 - protein, 81 aa, Macaca mulatta
MATALTDPAQVSVTFDDVAVTFTQEEWGQLDLAQRTLYQEVMLENCGLLVSLGCPVPRPELIYHLEHGQEPWTRKEDLSQD

SEQ ID NO: 373 - protein, 81 aa, Macaca mulatta
MAFEDVAVYFSQEEWGLLDTAQRALYRHVMLENFTLVTSLGLSTSRPHVVIQLERGEEPWVPSGKDMTLARNTYRRLNAGS

SEQ ID NO: 374 - protein, 81 aa, Macaca mulatta
MAFEDVAVYFSQEEWGLLDTAQRALYRRVMLDNFALVASLGLSTSRPRVVIQLERGEEPWVPSGTDTILSRNTYRRRNPGS

SEQ ID NO: 375 - protein, 81 aa, Macaca mulatta
MLQTAWRQEPVTFEDVAVYFTQNEWASLDSVQRALYREVMLENYANVASLAFPFTTPVLVSQLEQGELPWGLDPWEPMGRE

SEQ ID NO: 376 - protein, 81 aa, Macaca mulatta
MMTAVSLTTRSQESVAFEDVAVYFTTKEWAIMVPAERALYRDVMLENYEAVAFVVPPTSKPALVSHLEQGKESCFIRPQGV

SEQ ID NO: 377 - protein, 81 aa, Macaca mulatta
MVTFEDVAVHFTKTEWTGLSPAQRALYRSVMLENFGNLTALGYPVPKPALISLLEGGDMAWGLEAQDDAPAERTKNICKGR

SEQ ID NO: 378 - protein, 81 aa, Macaca mulatta
MVTFEDVAVHFTKTEWTGLSPAQRALYRSVMLENFGNLTALGYPVPKPALISLLEGGDMAWGLEAQDDAPAERTKNICKVI

SEQ ID NO: 379 - protein, 81 aa, Macaca mulatta
MELLSFEDVAMYFTREEWGHLDWGQKDLYRDVMLENYRNMVLLGFQFPKPEVICQLENWDEQWILDLPRAGSRKASGSACP

SEQ ID NO: 380 - protein, 81 aa, Macaca mulatta
QDPSAEGLSEEVPVVFEELPVVFEDVAVYFTRKEWGMLDKRQKELYRDVMRMNYELLASLGPAAAKPDLISKLERRAAPWI

SEQ ID NO: 381 - protein, 81 aa, Callithrix sp.
PVRGPGEARPSRKRGRRPRALKFVDVAVYFSSEEWGCLRPAQRALYRDVMRETYGHLGALGCAGPKPALISWLERNTDDWE

SEQ ID NO: 382 - protein, 81 aa, Callithrix sp.
TMTTVSSTARPQESVAFDDVAVYFTKKEWAIMVPDQRALYRDVMLENYEAVAFVVPPTSKPALISHLEQGKEPCFTQPQGV

SEQ ID NO: 383 - protein, 81 aa, Callithrix sp.
MLQTAWRQEPVTFEDVAVYFTQNEWTSLDPVQRALYREVMLENYANVASLAFPFTTPVLVSQLEQGERPWGLDPWEPVGRE

SEQ ID NO: 384 - protein, 81 aa, Callithrix sp.
MLQTAWPQRLSRNLWFQESVAFEDVAVYFTQNQWASLDPAQRALYREVMLENYANVTSLVAFPFPKPALISHLEKGEAPWG

SEQ ID NO: 385 - protein, 81 aa, Callithrix sp.
MAAGQPEARPQVSLTFEDVAVLFTRDEWRKLAPSQRNLYRDVMLENYRNLVSLGLPFTKPKVISLLQQGEDPWKVEKDCFG

SEQ ID NO: 386 - protein, 81 aa, Callithrix sp.
MAAIPLKAQCQETVTFEDVAVHFTKTEWTGLSPAQRALYRSVMLENYGNLTAMGYLVPKPALISLLEGGDMAWGLEAQDDP

SEQ ID NO: 387 - protein, 81 aa, Callithrix sp.
CFSGEERMAAGHPPRWPQELVTFEDVSVDFSQEEWELLDPAQKELYREVTLENYRNLVSLEALKNPCADAGMEEGPFSTAH

SEQ ID NO: 388 - protein, 81 aa, Callithrix sp.
MFQDSVAFEDVAVTFTQEEWALLDPSQKTLYRDVMQENFRNLASVGKKWKAQNIYVEYKNLRRNLRNLMGKRLFESKEDHQ

SEQ ID NO: 389 - protein, 81 aa, Callithrix sp.
DSVAFEDVAVNFTQEEWALLDRSQKKLYREVMQETLRNLTSIGKTWSNQNAEERHQNPRRNLRRLIGERLFQSKESHQHAE

SEQ ID NO: 390 - protein, 81 aa, Callithrix sp.
MDTVALEDVAVNFTQEEWALLGPSQKKLYRDVMQETIRNLDCIKMISEDQNIEDQYKNPKKNLRCRMAERLSESKDNSQCG

SEQ ID NO: 391 - protein, 81 aa, Callithrix sp.
MTPGPPGSLEMEPLTFKDVAIEFCLEEWQCLDTAQQDLYRNVMLENYRNLVFLGIAVSKPDLITCLEQGKVPWNRKRHEMV

SEQ ID NO: 392 - protein, 81 aa, Callithrix sp.
MNMEGLVMFQDLSIDFSQEEWECLNPAQKDLYRDVMMENYSSLLSLGLSIPKPDVISLLEQGKEPWMVSRDILGGWCPDRL

SEQ ID NO: 393 - protein, 81 aa, Callithrix sp.
MALRSVIFSDISIDFSPEEWEYLDLEQKDLYRDVMLENYSNLVSLGCFISKPDVISLLEQGKEPWKVVRKRRRQYPDLETK

SEQ ID NO: 394 - protein, 81 aa, Callithrix sp.
MINYQTPVSFRDVVVGFTQEEWHRLNPTQRALYRDVMLETYSNLVSVGYEGTKPDVILRLEQEEAPWIGEAACLGCHCWED

SEQ ID NO: 395 - protein, 81 aa, Callithrix sp.
MINYQTPVSFRDVVVGFTQEEWHRLNPTQRALYRDVMLETYSNLVSVGYEGTKPDVILRLEQEEAPWIGEAACLGCHCWGI

SEQ ID NO: 396 - protein, 81 aa, Callithrix sp.
MINYQTPVSFRDVVVGFTQEEWHRLNPTQRALYRDVMLETYSNLVSVGYEGTKPDVILRLEQEEAPWIGEAACLGCHCWGK

SEQ ID NO: 397 - protein, 81 aa, Callithrix sp.
HGSSYEGSVSFRDVAINFSREEWRHLDLSQRNLYWDVMLETYSHLLSVGYQFPKPEVVMLEQGNEPWALQGERPRHSCPGE

SEQ ID NO: 398 - protein, 81 aa, Callithrix sp.
MTTLKETVTFKDVAVVFTEEELQLLDPAQKKLYQDVMLENFRNLLSVGHQPFHGDTFHFPREEKFWMVETATQKEGNLDGV

SEQ ID NO: 399 - protein, 81 aa, Callithrix sp.
MALTQGQVTFRDVAIEFSQEEWTCLDPAQRSLYRDVMLENYRNLASLGISCFDLSIISMLEQGKGPFALESQVQRAGNPDG

SEQ ID NO: 400 - protein, 81 aa, Callithrix sp.
MPLGSELFRDVAIVFSQEEWQWLAPAQRDLYRDVMLETYSNLVSLGLAISKPDVISFLEQGKEPWMVERVVAGGLCPEAEL

SEQ ID NO: 401 - protein, 81 aa, Callithrix sp.
MPLGSELFRDVAIVFSQEEWQWLAPAQRDLYRDVMLETYSNLVSLGLAISKPDVISFLEQGKEPWMVERVVAGGLCPVLES

SEQ ID NO: 402 - protein, 81 aa, Callithrix sp.
MAAAALRLPAQGTVTFEDVAVKFSQEEWSILTEAQRCLYHDVMLENLALISSLGCWYGAKDETPSKQTLSIQQQSPLRSHW

SEQ ID NO: 403 - protein, 81 aa, Callithrix sp.
MAFEDVAVYFSEEEWGLLDTAQRALYRHVMLENFTLVTSLGLSTSRPLVVIQLERGEDPWVPSVKDMTLARNAYGRRTTGS

SEQ ID NO: 404 - protein, 81 aa, Callithrix sp.
MAFEDVAVYFSQEEWGLLDTAQRALYRRVMLDNFALVASLGLSTSRPRVVIQLERGEEPWVPSETDMTMSRNTHRRRNPGS

SEQ ID NO: 405 - protein, 81 aa, Callithrix sp.
MAFRDVAVDFTQDEWRLLSPAQRTLYREVMLENYSNLVSLGISFSKPEIITQLEQGKETWREEKKCPPATCPADPEPELCL

SEQ ID NO: 406 - protein, 81 aa, Callithrix sp.
MAHMAFRDVAVDFTQDEWRLLSPAQRTLYREVMLENYSNLVSLGISFSKPEIITQLEQGKETWREEKKCPPATCPDPEPEL

SEQ ID NO: 407 - protein, 81 aa, Callithrix sp.
GENLESRVTLGSPAAESQELLTFKDVSVDFTQEEWGQLAPAHRNLYREVMLENYGNLVSVGYQLSKPGLISQLEKGEEPWL

SEQ ID NO: 408 - protein, 81 aa, Callithrix sp.
MTMLQDSFSFDDLSVDFTQKEWQLLDPSQKNLYKDVMLENYSSLVSLGYEAMKPDVIFKLEQGEEPWIGDEEIPSSWSPDI

SEQ ID NO: 409 - protein, 81 aa, Callithrix sp.
MSQGSVTFRDVAIDFSQEEWKWLQPAQRDLYRCVMLENYGHLVSLGLSISKPDVVSLLEQGKEPWLGKRDVKRDLFPVSES

SEQ ID NO: 410 - protein, 81 aa, Callithrix sp.
MSQGSVTFRDVAIDFSQEEWKWLQPAQRDLYRCVMLENYGHLVSLGLSISKPDVVSLLEQGKEPWLGKRDVKRDLFPVLKE

SEQ ID NO: 411 - protein, 81 aa, Callithrix sp.
IREFGGMGAGIANIWSFQGSVTFRDVAIDFSQEEWKWLQPAQRDLYRCVMLENYGHLVSLGLSISKPDVVSLLEQGKEPWL

SEQ ID NO: 412 - protein, 81 aa, Callithrix sp.
MPANEDTPQPGGHGSACEVSVSFEDVTVDFSREEWQQLDSTQRRLYQDVMLENYSHLLSVGFEVPKPEVIFKLEQGEGPWT

SEQ ID NO: 413 - protein, 81 aa, Aotus trivirgatus
MITAQGPVSFRDVTVGFTQEEWQHLDPAQRTLYRDVMIENYSHLVSVGYCIPKPEVILKLEKGEEPWISEEKFPSQSHLEL

SEQ ID NO: 414 - protein, 81 aa, Aotus trivirgatus
MHLTAWPQKSVTFEDVAVYFTQAEWDGLSPAQRTLYRDVMLENYGNVASLGFPLLKPAVISQLEGGGELGGPSPLAAGTGL

SEQ ID NO: 415 - protein, 81 aa, Aotus trivirgatus
MAHMAFRDVAVDFTQDEWRLLSPAQRTLYREVMLENYSNLVSLGISFSKPEIITQLEQGKETWREEKKCPPATCPADPEPE

SEQ ID NO: 416 - protein, 81 aa, Aotus trivirgatus
MNMEGLVMFQDLSIDFSQEEWECLNPTQKDLYRDVMMENYSSLLSLGLSIPKPDVISLLEQGKEPWMVSRDVLGGWCPDRL

SEQ ID NO: 417 - protein, 81 aa, Aotus trivirgatus
MAQESVMFSDVSIDFSQEEWECLNDDQRDLYRDVMLENYSNLVSMAGHSISKPNVISYLEQGKEPWLVDRELTRGQWPALE

SEQ ID NO: 418 - protein, 81 aa, Aotus trivirgatus
MAHRSVMFSDISIDFSPEEWEYLDLEQKDLYRDVMLENYSNLVSLGCFISKPDVISLLEQGKEPWKVVRKRRRQYPDLETK

SEQ ID NO: 419 - protein, 81 aa, Aotus trivirgatus
MAHDLVMFRDVAVDFSQEEWECLNSYQRNLYKDVILENYSNLVSLGCSISKPDVITLLEQGKEPWLVVRDEKRRWSLAPTF

SEQ ID NO: 420 - protein, 81 aa, Aotus trivirgatus
MINYQTPVSFKDVVVGFTQEEWHRLNPTQRALYRDVMLETYSNLVSVGYEGTKPDVILRLEQEEAPWIGEAACLGCHCWED

SEQ ID NO: 421 - protein, 81 aa, Aotus trivirgatus
GRSPRKTDQFCNSKNMVPGSVTFRDVAIDFSQEEWECLQPAQRTLYRDVMLENYSHLISLGSSISKPDVITLLEQEKEPWM

SEQ ID NO: 422 - protein, 81 aa, Aotus trivirgatus
CGMFQVSVAFEDVAVTFTQEEWALLDPSQKTLYRDVMQENFRNLASVGKKWKAQNIYVEYKNLRRNLRNLRGKRLFESKED

SEQ ID NO: 423 - protein, 81 aa, Aotus trivirgatus
TMTTVSSTARPQESVAFDDVAVYFTKKEWAIMVPDQRALYRDVMLENYEAVAFVVPPTSKPALVSHLEQGKEPCFTQPQGV

SEQ ID NO: 424 - protein, 81 aa, Aotus trivirgatus
MAVDLLPAQESMTFRDVAVFFSQDEWLHLDSAQRALYREVMLENYSTLVSLGIPFSMPKVIHQLQQGQDPCMVEGEVPSDI

SEQ ID NO: 425 - protein, 81 aa, Aotus trivirgatus
REPAQVLVAAESLIDNEEGYVTFEDVAVYFSQEEWRLLDEAQRLLYRNVMLENFSLMASLGLASSKTHEITQLESWEEPFV

SEQ ID NO: 426 - protein, 81 aa, Aotus trivirgatus
MAAAALREPAQGYVTFEDVAVYFSQEEWRLLDEAQRLLYRNVMLENFSLMASLGLASSKTHEITQLESWEEPFVPAWDVMT

SEQ ID NO: 427 - protein, 81 aa, Aotus trivirgatus
MATALTDPAQVSVTFDDVAVTFTQEEWGQLDLAQRTLYQEVMLENCGLLVSLGCPVPRPELIYHLEHGQEPWTRKEDLSQG

SEQ ID NO: 428 - protein, 81 aa, Aotus trivirgatus
MNVEVLKVISQDLVTFKDVAIDFSQEEWQWMNPAQKRLYRSMMLENYQSLVSLGLCVSKPYVISLLEQGREPWEMTSEMTR

SEQ ID NO: 429 - protein, 81 aa, Aotus trivirgatus
QDPSAEQLSEEVPVVFEELPVVFEDVAVYFTREEWGMLDKRQKELYRDVMRMNYELLASLGPAAAKPDLISKLERRAAPWI

SEQ ID NO: 430 - protein, 81 aa, Aotus trivirgatus
MDVAQEQVTFQDVAIYFSWEEWECLEPSQRALYRDVMLDNFSNVAALGFCSPRPDLVSRLEQWEEPWVEDRDRPELQAVQR

SEQ ID NO: 431 - protein, 81 aa, Homo sapiens
CQELVTFEDVAVYFSLEEWERLEADQRGLYQEVMQENYGILVSLGYPIPKPDLIFRLEQGEEPWVPDSPRPEEGDIVTGVY

SEQ ID NO: 432 - protein, 81 aa, Rattus norvegicus
SKAPVTFGDLAIYFSQEEWEWLSPNQKDLYEDVMLENYHNLVSVGLACRRPNIIALLEKGKAPWMVEPSRKRRGPELGSKD

SEQ ID NO: 433 - protein, 81 aa, Homo sapiens
YQEMVTFEDVAVHFTKTEWTGLSPAQRALYRSVMLENFGNLTALGYPVPKPALISLLERGDMAWGLEAQDDPPAERTKNVC

SEQ ID NO: 434 - protein, 81 aa, Homo sapiens
YQIPVSFKDVVVGFTQEEWHRLSPAQRALYRDVMLETYSNLVSVGYEGTKPDVILRLEQEEAPWIGEAACPGCHCWEDIWR

SEQ ID NO: 435 - protein, 81 aa, Homo sapiens
EPGAVSFADVAVYFCREEWGCLRPAQRALYRDVMRETYGHLSALGIGGNKPALISWVEEEAELWGPAAQDPEVAKCQTQTD

SEQ ID NO: 436 - protein, 81 aa, Homo sapiens
EMGLLTFRDIAIEFSLEEWQCLDCAQRNLYRDVMLENYRNLVSLGIAVSKPDLITCLEQNKESQNIKRNEMVAKHPVTRSH

SEQ ID NO: 437 - protein, 81 aa, Homo sapiens
SQGSVTFRDVAIDFSQEEWKWLQPAQRDLYRCVMLENYGHLVSLGLSISKPDVVSLLEQGKEPWLGKREVKRDLFSVSESS

SEQ ID NO: 438 - protein, 81 aa, Homo sapiens
AQESVTFEDVAVNFTNREWQCLTYAQRHLYKDVMLENYGNMVSLGFPFPKPPLISHLEREVDPCVQDPQDRESLSCSYPVS

SEQ ID NO: 439 - protein, 81 aa, Homo sapiens
VQEPVTFKDVAVDFTQEEWGQLDLVQRTLYRDVMLETYGHLLSVGNQIAKPEVISLLEQGEEPWSVEQACPQRTCPEWVRN

SEQ ID NO: 440 - protein, 81 aa, Homo sapiens
SQASVSFKDVTIEFTQEEWQQMAPVQKNLYRDVMLENYSNLVSVGYCCFKPEVIFKLEQGEEPWFSEEEFSNQSHPKDYRG

SEQ ID NO: 441 - protein, 81 aa, Homo sapiens
SQELLTFKDVSVDFTQEEWGQLAPAHRNLYREVMLENYGNLVSVGCQLSKPGVISQLEKGEEPWLMERDISGVPSSDLKSK

SEQ ID NO: 442 - protein, 81 aa, Bos taurus
HQEVVTFEDVAVYFTRTEWAGLSPAQRALYRSVMLEIYRSLTSLGYPVPKPALISLLERGDLPVGLETQDNPPAQGTRDIY

SEQ ID NO: 443 - protein, 81 aa, Homo sapiens
SKAPITFGDLAIYFSQEEWEWLSPIQKDLYEDVMLENYRNLVSLGLSFRRPNVITLLEKGKAPWMVEPVRRRRAPDSGSKC

SEQ ID NO: 444 - protein, 81 aa, Homo sapiens
ALRSVMFSDVSIDFSPEEWEYLDLEQKDLYRDVMLENYSNLVSLGCFISKPDVISSLEQGKEPWKVVRKGRRQYPDLETKY

SEQ ID NO: 445 - protein, 81 aa, Homo sapiens
SWGPLSFMDVFVDFTWEEWQLLDPAQKCLYRSVMLENYSNLVSLGYQHTKPDIIFKLEQGEELCMVQAQVPNQTCPNTVWK

SEQ ID NO: 446 - protein, 81 aa, Mus musculus
SLGPLSFKDVAVAFSQEEWQQLDPEERTTYRDVMLETYSNLVSVGYDIIKPDVIIKLEQGEEPWIVEGAFSPQSYPDEIRH

SEQ ID NO: 447 - protein, 81 aa, Homo sapiens
RQAFLAFGDVTVDFTQKEWRLLSPAQRALYREVTLENYSHLVSLGILHSKPELIRRLEQGEVPWGEERRRRPGPCAGIYAE

SEQ ID NO: 448 - protein, 81 aa, Bos taurus
QAEVTFEDVAVFLSQEEWGLLGPAQKGLYREVMLETYRNLVSLGAGLAGPKPEVIAQLEQGDELWVLDMHGAEQPSVDGSA

SEQ ID NO: 449 - protein, 81 aa, Homo sapiens
SQGRVTFEDVTVNFTQGEWQRLNPEQRNLYRDVMLENYSNLVSVGQGETTKPDVILRLEQGKEPWLEEEEVLGSGRAEKNG

SEQ ID NO: 450 - protein, 81 aa, Mus musculus
SKAPVTFGDLAIYFSQEEWEWLSPMQKDLYEDVMLENYHNLVSVGLACRRPNIIALLEKGKAPWVIEPSRRRWGPESGSKY

SEQ ID NO: 451 - protein, 81 aa, Pongo sp.
RQEPVTFEDVAVYFTQNEWASLDSVQRALYREVMLENYANVASLAFPFTTPVLVSQLEQGELPWGLDPWEPMGREALRGIC

SEQ ID NO: 452 - protein, 81 aa, Homo sapiens
SLGSELFRDVAIVFSQEEWQWLAPAQRDLYRDVMLETYSNLVSLGLAVSKPDVISFLEQGKEPWMVERVVSGGLCPVLESR

SEQ ID NO: 453 - protein, 81 aa, Pongo sp.
MVTFEDVAVHFTKTEWTGLSPAQRALYRSVMLENFGNLTALGYPVPKPALISLLEGGDMAWGLEAQDDPPAETTKNVRKDV

SEQ ID NO: 454 - protein, 81 aa, Homo sapiens
KPGTVSFADVAVYFSPEEWGCLRPAQRALYRDVMQETYGHLGALGFPGPKPALISWMEQESEAWSPAAQDPEKGERLGGAR

SEQ ID NO: 455 - protein, 81 aa, Homo sapiens
QAEVTFEDVAVYLSREEWGRLGPAQRGLYRDVMLETYGNLVSLGVGPAGPKPGVISQLERGDEPWVLDVQGTSGKEHLRVN

SEQ ID NO: 456 - protein, 81 aa, Homo sapiens
ARGKSKSKAPITFGDLAIYFSQEEWEWLSPIQKDLYEDVMLENYRNLVSLGLSFRRPNVITLLEKGKAPWMVEPVRRRRAP

SEQ ID NO: 457 - protein, 81 aa, Homo sapiens
SQGLVTFGDVAVDFSQEEWEWLNPIQRNLYRKVMLENYRNLAWLGLCVSKPDVISSLEQGKEPWTVKRKMTRAWCPDLKAV

SEQ ID NO: 458 - protein, 81 aa, Homo sapiens
SKAPITFGDLAIYFSQEEWEWLSPIQKDLYEDVMLENYRNLVSLGLSFRRPNVITLLEKGKAPWMVEPVRRRRAPELVTVA

SEQ ID NO: 459 - protein, 81 aa, Saimiri boliviensis
VQEPVTFKDVAVDFTQEEWGQLDLVQRTLYRDVMLETYGHLLSVGNQIAKPEVISLLEQGEEPWSLEQTCPQRACPEWMRN

SEQ ID NO: 460 - protein, 81 aa, Rattus norvegicus
KPELVSFADVAVYFSPQEWGCLRPAQRALYREVMRETYGLLGALGFPGPKPALISWMEQESEAWSPAAQDPEEGESLGGAP

SEQ ID NO: 461 - protein, 81 aa, Terrapene carolina
PSGLVTFEEVAVYFTREEGALLDPTQRALYRDVMQENYETVVLLGFPVSKPDVISQLERGEEPWVPDLQGSEKEVLPRAAC

SEQ ID NO: 462 - protein, 81 aa, Terrapene carolina
MSVTFEDVAMYFSPAEWVLLGEEQKQLYRHVMWENYQTLVSLGIQISKPVVISSIERGEELWAQSPTEDEDEDILSGTSPG

SEQ ID NO: 463 - protein, 81 aa, Gopherus agassizii
LVPVTFEDVAVYFSREEWGLLDDMQRTFYRDVMKENYQTVVSLPGSSIPKPDVISQMERGEEPWVPDLQKLGPHQTPENPL

SEQ ID NO: 464 - protein, 81 aa, Gopherus agassizii
MPVTFEEVAVYFTEGQGALLDPAQRALYRDVMQEIYEMVISLGFLLPKPDVIIQLERGEEPWVPDLQGSAEREMSRGTCAG

SEQ ID NO: 465 - protein, 81 aa, Podarcis muralis
GLVSFDEVSVHFTNEEWALLDPGQRALYEEVMEEIREMMTSVGDVSEFLTEGEQSEPSREGAEEQKEQRKQRVQVGTYRKE

SEQ ID NO: 466 - protein, 81 aa, Podarcis muralis
GSVSFDEVSVRFSNEEWALLDPGQRALYEEVMEEIREMMTSVGDVSEFLTEGEQSELSREGAEEQKEQRKQRVQVGTYRNE

SEQ ID NO: 467 - protein, 81 aa, Gopherus agassizii
FQIPVTFEEVAVYFTQGQGALLDPAQRALYRDVMQENYETVTSLGFPIPKPDLIARLERGEEPWVLDLQASDESVSLRGTC

SEQ ID NO: 468 - protein, 81 aa, Alligator sinensis
VVLLEAFEDVAVYFTQKEWALLDDGDKALYRDQMLRNYQALISLGYRGPTPALINRIQRGEMELWVCDKDYGEKSSLEGLF

SEQ ID NO: 469 - protein, 81 aa, Paroedura picta
FSLEDVSVSFSPAEWALLDPAQRALWREVMRENAENVAFLARSIGETLVEANNDPVSEGRLERSSGGAEEQISFPNGLAKR

SEQ ID NO: 470 - protein, 81 aa, Paroedura picta
AQVAFEDVAVYFTEEQWALLDHSQRALYRDVMQENYETVASLGLPIPGPDSISRLQQREESRIEAQPVLEGNDVSSDDDLG

SEQ ID NO: 471 - protein, 81 aa, Paroedura picta
AQRPVTFEDVAVYFSEAQGTLLDPDQKALYREVMMENYENVASLGSLTPKPELIIRLERGEEPWVSDPGDAPVSGDFRKSH

SEQ ID NO: 472 - protein, 81 aa, Paroedura picta
AQAGVSFEEVAVHFSPGEWSLLQPAQRALYKEVMLENFGHVASLGPPGATPDLIAWLQEGLFLLGGDEEAGSAGDAWRSAT

SEQ ID NO: 473 - protein, 81 aa, Terrapene carolina
FQGLVTFEEVAVYFTREEGALLDPTQRALYRDVMQENYETVVLLGKESFSKPDVISQLERGEEPWVPDLQGSEKERPEENF

SEQ ID NO: 474 - protein, 81 aa, Terrapene carolina
AQGPVTFEEVAVYFTREEGALLDPTQRALYRDVMQENYETVVLLGFPVSKPDVISQLEQGEEPWIPDLQGSEKEVLPRAAC

SEQ ID NO: 475 - protein, 81 aa, Terrapene carolina
FQMPVTFEEVAVYFTQGQGALLDPAQRALYRDVMQDNYEMVTSLGFPIPKPELIARLERGEEPWVPDLQACEERRLPRCTR

SEQ ID NO: 476 - protein, 81 aa, Podarcis muralis
GSVSFDEVSVRFSNEEWALLDPGQRALYEEVMEEIREMMTSVGDVSEFLTEGEQSEPSREGAEEQKEQRKQRVQVGTYRKE

SEQ ID NO: 477 - protein, 81 aa, Microcaecilia unicolor
QMLVTFEDIAVSFSKEEWEYLDEGQKELYREVMKENYQTLISLGTGFPTVIPEIISHIEQGDEPGSEERENGKSSCSGESG

SEQ ID NO: 478 - protein, 81 aa, Microcaecilia unicolor
FQTLLAFEDVAVFFSEEEWELLDELQKEVYKNTMRENYETLLSLGLTNMKPEIIAKIDAGEAPSVQNASYLEKRGKKSAAG

SEQ ID NO: 479 - protein, 81 aa, Microcaecilia unicolor
QVPVTFEDITIYFSQEEWEGLQEWQKELYKDVMKENYEILISLGASSPILTPDVISHIERGEEPYIRDEPRSEERESGKSS

SEQ ID NO: 480 - protein, 81 aa, Alligator mississippiensis
AQGPVTFEDVAVYFSAEEWQELAGWQRELYRDVMMDTYELVASLGPAGLKPEVVSKLERGEEPHQPARSRESPRAPLPVLL

SEQ ID NO: 481 - protein, 81 aa, Callipepla squamata
EPVSFEEVAVYFSREEWALLDPAQRALYWDVMLETYECVASLAPLPGPKPMVISLLEEGEEPWIPDVGSPEAVAGDVSPGE

SEQ ID NO: 482 - protein, 81 aa, Alligator mississippiensis
SKLPEAFEDVAVYFTRKEWELLEAGDKGLYQDQMLRNYQALVSLGLQGPAPDLICRMQLGEMELWVCDDEEAGESSLSEDF

SEQ ID NO: 483 - protein, 81 aa, Alligator mississippiensis
DQLQEAFEDVALYFTQNEWELLGDGDKVLYRDQMLRNYQALVSLGYQGPAPDLISRIQRQEVELWVCEEENPGESVWTEGL

SEQ ID NO: 484 - protein, 81 aa, Phasianus colchicus
CQEPVSFAQVAVYFSREEWALLDPAQRALYRDVMLETYQCVASLAPLPAHKPMVISLLEGGEDPWIPDVRSPEAVPGDLSP

SEQ ID NO: 485 - protein, 81 aa, Phasianus colchicus
CQEPVSFAQVAVYFSREEWALLDPAQRALYRDVMLETYQCVASLAPLPAPKPMLISLLEGGEDPWVPDVCSPEAVPGDLSP

SEQ ID NO: 486 - protein, 81 aa, Microcaecilia unicolor
QVPVIFEDVAVYFWEEEWEMLEEWQKELYKETMKENYKTLVSLGMELPTEKPDLIVRIEREENPCVKAQWDSRDKTRWRNS

SEQ ID NO: 487 - protein, 81 aa, Microcaecilia unicolor
MRVTFEDIAVSFSQEEWEYLDEEQKELYREVMKENYQTLISLGAGSLTFTPEIISHIERGEEPYSRDEPGSGEREPGKSRC

SEQ ID NO: 488 - protein, 81 aa, Microcaecilia unicolor
DRVKFTFSDVAVYFSEEEWQLLEEQQKELYRNVMKENYTTLTSLGYTTVKPDVISKIEQGKQPSVSSPSGSKGRRAVGRPT

SEQ ID NO: 489 - protein, 81 aa, Microcaecilia unicolor
QVPVTFEDIAIYFCQEEWEVLEEWQKDLYKDVMKENYQALISLGTGSLIVSPDIISRIERGEDPYIRDERGSKKRETENSS

SEQ ID NO: 490 - protein, 81 aa, Microcaecilia unicolor
VQVPVTFEDVAVYFSEDEWGMLAGWQKELYKETMKENYETLTLLGCLSEKPSLISKIEREEDPCVRDQQDPRDRRKLRSSW

SEQ ID NO: 491 - protein, 81 aa, Microcaecilia unicolor
TQMQVKFDDIAVSFSQEEWKYLDEEQKELYREVMKENYQILISLGTGSSTTPKIISHIERGEEPYIRDEPVLVERKTGKSS

SEQ ID NO: 492 - protein, 81 aa, Terrapene carolina
MPVTFEEVAVYFTQGQGALLDPAQRALYRDVMQENYETVTSLGFPIPKPELIARLERGEEPWVPDLQACKERRLPRCTRTG

SEQ ID NO: 493 - protein, 81 aa, Microcaecilia unicolor
AQMQVTFEDIAVFFCHEEWKYLDDGQKELYKEVMKENYETLISLGFLCEKPSLISKIEREEDPCVRDQQDFRERRRRLKSF

SEQ ID NO: 494 - protein, 81 aa, Microcaecilia unicolor
QVPVTFEDIAVSFSQEEWKYLDEGQKNLYWEVMKENYETLISLADSEVEQEDKRAKNREECPMLWGLIPRQSRKNSEKVSW

SEQ ID NO: 495 - protein, 81 aa, Gopherus agassizii
MPVTFEDVAVYFTQGQGALLDPTQRALYRDVMQENYETVTSLGKSVKGFPLAKPDLITRLERGEEPWVSDLQATGDERMSE

SEQ ID NO: 496 - protein, 81 aa, Gopherus agassizii
LEGLVTFEEVAVYFTESEWSLLDPAQRALYRDVMEENYENVTSLGFPVSKPDVISWLERGEDPWVPDLQDPEKRETLREAC

SEQ ID NO: 497 - protein, 81 aa, Gopherus agassizii
KHGPVTFEEVAVYFTREEWALLDPTQRALYRDVMQENYEMVVLLGFLNSKPDVISQLEQGEEPCIVDLQGSEKEVLPRAAC

SEQ ID NO: 498 - protein, 81 aa, Gopherus agassizii
FQMPVTFEEVAVYFTQGQGALLDPAQRALYRDVMQENYKMVTSLGFPLPKPELISRLEQGEEPWVPDLQACEERESLSGNH

SEQ ID NO: 499 - protein, 81 aa, Alligator sinensis
SKLSEAFEDVAVYFTWKEWALLEAADKMLYRDQMLKNYQALFSLGYRGPTPDLICRIQRGEMELWVSDLEEAGESSLSEDS

SEQ ID NO: 500 - protein, 81 aa, Alligator sinensis
MEPRDAFEDVAVYFTREEWALLDDGDKGLYRDQMLRNYQALVSLGYRGPTPDLICCIQRGKVELWVRDGEDHGEISGSEDL

SEQ ID NO: 501 - protein, 81 aa, Gallus gallus
LQEPVSFAEVAVYFSREEWALLDPAQRALYRDVMLETYQCVAWLAPLPAPKPGLISLLEGGEDPWIPDVRSPEAVPGDLSP

SEQ ID NO: 502 - protein, 81 aa, Gallus gallus
AREPVSFVEVAVYFSREEWALLDPAQRALYRDVMLETYESVASLGPFPAPKPVVISLLEGGDDPWIPDVHSPEAVSGDFSP

SEQ ID NO: 503 - protein, 81 aa, Chelonia mydas
VPVTFEDVAVRFSAEEWEILEGWQKELHKEVMEENYQLLISLGQPVPTLALLALTAEREAAGGQIRSVSGERELASKGGSS

SEQ ID NO: 504 - protein, 81 aa, Columba livia
GKMSVTFEDVALYFSPEEWAKLSGCQRQLYQEVMLENYQMVASLGWANVKPEIICKMEREETPCVPDVPGKQQRHQSPVPV

SEQ ID NO: 505 - protein, 81 aa, Pogona vitticeps
VAFEDVAVYFTAEEWDLLGPNQKSLYSEVMMENYENVSYLADNWKKTIAFAHSQKDFIHKLHQRTHKEDEHHTRAEPCEST

SEQ ID NO: 506 - protein, 81 aa, Meleagris gallopavo
LQEPVSFAEVAVCFSREEWALLDPAQRVLYRDVMLETYQCVASLASLLTPKPVLISLLEGGEEPWIPDVRSPEATPGDLSP

SEQ ID NO: 507 - protein, 81 aa, Columba livia
GKMSVTFEDVALYFSPEEWAKLSGCQRQLYREVMLENYQMVASLGWATVKPEIICKMEREETPCVLDPPGEQQMHQSPVPA

SEQ ID NO: 508 - protein, 81 aa, Pogona vitticeps
PQDSVTFEEVAVSFSREEWALLTDWQKNLYKDVMRDNYEMLNSLDLAAHKPDIILRIERGQEPCVGRLQRSKARERPNHVF

SEQ ID NO: 509 - protein, 81 aa, Chelonia mydas
KTAPVTFDDVAVYFSAEEWEELAEWQKELYKDVMRDNYEALISLGHAAAKPDIIQLLEHGEEPCVKGHKDSGNGKAFNFIS

SEQ ID NO: 510 - protein, 81 aa, Columba livia
WQEPVTFEDVAVYLSHAEWDAMAPEQRELYCSVMLDNYQLLASLGYPGPKPDIVYRLERGEEPWGCAPQSPLSWDGPRSPS

SEQ ID NO: 511 - protein, 81 aa, Columba livia
GKMSVTFEDVALYFSPEEWAKLSGCQRQLYREVMLENYQMVASLGWANIKPEIICKMEREETLCVPAPPREWQRDQSPVPA

SEQ ID NO: 512 - protein, 81 aa, Terrapene carolina
FQMPVTFEEVAVYFTQGQGALLDPAQRALYRDVMQENYEMVTSLGFPIPKPELIARLERGEEPWVPDLQACKERRLPRCTR

SEQ ID NO: 513 - protein, 81 aa, Patagioenas fasciata
QDAVTFKDVAIYFSPEEWVRLSAGQRELYQEVMLDNYELVTSLDRECKLLYKMDPEEEPCEGVPCRGVDSGALDNSSTSAC

SEQ ID NO: 514 - protein, 81 aa, Gallus gallus
CQEPVSFAEVAVYFSREEWALLDPAQRALYRDVMLETYQCVAWLASLPAPKPGLISLLEGGEDPWIPGVRSPEAMPGDLSP

SEQ ID NO: 515 - protein, 81 aa, Callipepla squamata
PSVPVTFRDVFVQFSRDEWALLDDEQKELHQSVMQSNYEVLMSLYCDLAKPEVLLQMERGEPCLPAEPDLQGAAVSLNPAA

SEQ ID NO: 516 - protein, 81 aa, Callipepla squamata
LQEPVSFEEVAVYFSREEWALLDPAQRALYRDVMLETYECVASLAPLPAPKPMVISLLEEGEEPWVPDVGSPEAVAGDVSP

SEQ ID NO: 517 - protein, 81 aa, Callipepla squamata
EPVSFEEVAVYFSREEWALLDPAQRALYRHVMLETYECVASLAPLPAPKPMVISLLEEGEEPWIPDEGSRQAVAGDVSPGE

SEQ ID NO: 518 - protein, 81 aa, Alligator mississippiensis
AQRWEAFEDVALYFTQKEWELLRDGDKVLYQEQMLRNYQALVSLGYQGPTPDLICRIQRGDMELWVCDDEDPKESMWSEGL

SEQ ID NO: 519 - protein, 81 aa, Dipodomys ordii
APGSVTFRDVAIDFSQEEWKWLQPAQRDLYRCVMLENYGHLVSLGLCISKPDVVSLLEQGKEPWLGKGGVNRDLFSVSDGK

SEQ ID NO: 520 - protein, 81 aa, Cavia porcellus
RPRALKFADVAVYFSLEEWGCLRPAQRTLYRNVMRETYGHLGALGCAGPKPALISWLERNTDDWEPAALDPQEYPRGVTVQ

SEQ ID NO: 521 - protein, 81 aa, Cricetulus griseus
KPELVSFEDVAVYFSPHEWGCLRPAQRALYREVMRETYGLLGALGFPGPKPALISWMEQESEAWSPAAQDPAEGESLGGAL

SEQ ID NO: 522 - protein, 81 aa, Cricetulus griseus
EQGLVSFEDVAVDFTWQEWQELDAAQRTLYRDVMLENYSSLVSLGHCVTKPELIFRLEHGFGPWSIGETSLWNLPGVLEVP

SEQ ID NO: 523 - protein, 81 aa, Cricetulus griseus
KVKQFSFQSLLTFKDLAINFSKEEWEYLNTSQKDLYKDVMLENYSNLVSVGLSESKPELVTCLEQNKEPWMVHIVEAEGLE

SEQ ID NO: 524 - protein, 81 aa, Mus musculus
MESVSFEDVAVKFTQEEWAVLDPSQKKLYKDVMQETLKNLASIGNKSGKQKVINEYGKLWRKLSSHLAGKFSDYNENHQCA

SEQ ID NO: 525 - protein, 81 aa, Mesocricetus auratus
SQVSVTFEDVAVLFTRDEWKKLDHSQRSLYREVMLENYSNLASLGFPFAKPEMISVLQQGEEPWKVEKRSLGFSLGCNSSL

SEQ ID NO: 526 - protein, 81 aa, Mus caroli
QASVTFEDVAVRFTQEEWALLDPSQKILYGDVMQETYRNLTSVGINWECWDLEAYFRSLERNLRVQLVKRDCELKNNDPCG

SEQ ID NO: 527 - protein, 81 aa, Cricetulus griseus
MLSFWDVAIEFSPEERECLDPAQWSLYRDVMLENYSNLLFLGLAVPKPHLVTFLEQRQESSGVKRQAAATVHPGRIPNDYN

SEQ ID NO: 528 - protein, 81 aa, Rattus norvegicus
ARGLMAFEDVAVYFSQEEWMFLNAAQRALYRHVMLENFALVDSIGPSVSRPRVIIQLQRGEEPWVPNRTIAGPGRGTHRRS

SEQ ID NO: 529 - protein, 81 aa, Mus caroli
SQVSVTFEDVAVLFTRDEWKKLVPSQRSLYREVMLENYSNLASLAGFPFTKPKVISLLQQGEDPWKVEEEGPGGFSLGLKC

SEQ ID NO: 530 - protein, 81 aa, Peromyscus maniculatus
FQNSLTYDDVHINFTCEEWALLDASQKRLYKDVMLETYSNLTAIGYKWEDHNIEEHCQRFRRRGRHKRSRTEERPYECKQC

SEQ ID NO: 531 - protein, 81 aa, Peromyscus maniculatus
DAVTYEDVHVNFTHEEWALLDPSQKSLYKDVMLETYWNLTSIGYKWEDHNFEENCQSSRRHGRHINCPSGYKPCEHEEYGK

SEQ ID NO: 532 - protein, 81 aa, Mesocricetus auratus
MNTVTYDDVHVNFTWEEWTLLDPSQKNLYKDVMLETYRNLTAVGYSWEDHNVEEHCQSYRRHSRLERSHTGEKSSVHTQCV

SEQ ID NO: 533 - protein, 81 aa, Ictidomys tridecemlineatus
SQEAVTFEDVAVYFTQNQWASLEPAQKALYQEVMLENYANITSLAALPFPKPDLIFQLELGEAPWVPDSWRPVGEEALGGR

SEQ ID NO: 534 - protein, 81 aa, Ictidomys tridecemlineatus
SQGPVLFEDVSVDFTQKEWQLLDPAQRRLYRDVMLENYRHLESLGHCVTKPELIRRLEQGEEPWILKREVPSHSHAEVQRA

SEQ ID NO: 535 - protein, 81 aa, Marmota monax
SKAPVTFGDLAIYFSQEEWEWLSPIQKDLYEDVMLENYTNLVSLGLSSRRPNVIALLEKGKAPWMVEPPRRRQGPDSRSKC

SEQ ID NO: 536 - protein, 81 aa, Mus caroli
CQALVTFEDVAVTFTDDEWKRLVPVQRALYKAVMLENYESIISLGLPVPRPDLILQFKRRGEPWMRGFHGSEEKAWPESVS

SEQ ID NO: 537 - protein, 81 aa, Peromyscus maniculatus
EQDAVTYEDVHVNFTHEEWALLDPSQKSLYKDVMMETYWNLTCIGYKWEDHNIEEHCQSCRRNGSRCVICHSGHNPCEHKG

SEQ ID NO: 538 - protein, 81 aa, Peromyscus maniculatus
SKAPVTFGDLAIYFSQEEWEWLSPIQKDLYEDVMLENYQNLVLLGLACRRPNIITLLEKGKAPWVVEPSRRRRGPESGSKC

SEQ ID NO: 539 - protein, 81 aa, Cavia porcellus
QEIPVSFKDVVVGFTQEEWHWLNPVQRALYRDVMLETYSNLVSVGYEGTKPDVILRLEQEEAPWVCEAPCPGCCCWEDIWQ

SEQ ID NO: 540 - protein, 81 aa, Mus musculus
QCLLTFKDVFLDFSSEEWECLNFAQRTLYMDVMLENYNNLLFVENHCICGNYEKEKVLEQDTQHIVNEHGHNRKKSSKCNE

SEQ ID NO: 541 - protein, 81 aa, Cricetulus griseus
SKASVTFGDLAIYFSREEWEWLSPIQKDLYEDVMLENYQTLVSLGLVCRRPNIITLLEKGKAPWMVEPSRRRRGPESGSKR

SEQ ID NO: 542 - protein, 81 aa, Peromyscus maniculatus
MDAVTYEDVQVSFTREEWTLLDPSQKSLYKDVMVETYRNLTAIGYKWEDQNIKKHHQCSRRHGRHERSNSAEKDYECEQCG

SEQ ID NO: 543 - protein, 81 aa, Peromyscus maniculatus
HKKSMVFSDVSLDFSQEEWECLGPAQKDLYRDVMLENYSHLLSVAGLHIPKPQVISLLEQGKEPWMIGKELTRGLCSALES

SEQ ID NO: 544 - protein, 81 aa, Peromyscus maniculatus
MNAVTYDDVHVDFTWDEWALLDPSQKNLYKNVMLETYRNLTAIGYKWEEHNINEKFQRSRRNRRHERSHTGEKSYECNQCG

SEQ ID NO: 545 - protein, 81 aa, Mesocricetus auratus
DAVTYQDLHITFTQEEWALLDSSQRNLYKDVMLETYMNLNAIGYKWEDNDIEQHCRSPQRHGRHERSPTREKPSAYMQCDK

SEQ ID NO: 546 - protein, 81 aa, Mus caroli
AHSMVMFRDVTVDFSQEEWECLSSYERDLYRDVMLENYSHLVSLAGCSISKPDVITLLEQGKEPWMIVRAEKRRWSRDLES

SEQ ID NO: 547 - protein, 81 aa, Mus musculus
RERLVSFEDVTVDFSQEEWRRLDSVQRHLYQDVMLEIYSHLLAVGYPVPSPGAIFRIKKRKEARTGEAKLPHPCWCQEVES

SEQ ID NO: 548 - protein, 81 aa, Cricetulus griseus
CNSWISPSDVAINFSKEEWECLHPSQKDLYRDVMLENYSNLVSVGLSESKPELVTCLEENKEPWMVNIDEAEGLGQGVFCY

SEQ ID NO: 549 - protein, 81 aa, Rattus norvegicus
APLPLTFEDVAIYFSEQEWQHLETWQKELYKQVMRTNYETLISLDNGLPKPELISWMELGRENFGSWGEGQKVDRGIRCSV

SEQ ID NO: 550 - protein, 81 aa, Mus musculus
KPGTVSFADVAVYFSPEEWRYLRPAQRALYREVMRETYGLLTYLDVGCAKPALISWVEEESEVWGPGAQDPEVAMCRTEVH

SEQ ID NO: 551 - protein, 81 aa, Mus caroli
DKALMAFHDVAVAFSQMEWELLSPAQRILYREVMLENYSHLVSLGIAFSKPKLITQLEQGAEPWRDGSGCFLDLCPAEPRT

SEQ ID NO: 552 - protein, 81 aa, Mus caroli
VCGSVTFKDVAVDFSQEEWACLDATQKVLYRDMMLETYSNLVAVVGRCISKPDLIVLLEQEKEPWMAVKEETDRPSPDLES

SEQ ID NO: 553 - protein, 81 aa, Cricetulus griseus
MAFEDVAVYFSQEEWVFLDAAQRALYRHVMLENFALVDSIGLSISRPRVIIQLQRGEEPWVPNRTNTGPGRGTRRRPSLGS

SEQ ID NO: 554 - protein, 81 aa, Mesocricetus auratus
MESVSFEDVAVNFTPEEWALLNSSQKRLHRDVMQENFRNLAAIAKNQEDPTLEDDYEYLRKILPFAVQTGYRLCENQDYAE

SEQ ID NO: 555 - protein, 81 aa, Mus musculus
MDAVTYEDVHVNFSQEEWALLDPSQKSLYKDVMLETYWNLTCIGYKWEDHNIEDQHQSSGRHGRCINCPSAYGKKQCTNLF

SEQ ID NO: 556 - protein, 81 aa, Mus musculus
LLHGCCSLETHSIRDKNAVTYGDVHVNFTQEEWALLDPSQKKLYKDVMLETYRNLNAIGFNWDDKNTEEHCPSTRRWRRYP

SEQ ID NO: 557 - protein, 81 aa, Mesocricetus auratus
PADRDAVTYDDVHIGFTQEEWVLLNPSQKSLYKDVMLDTYRNLTAIGYRWQDHNIEEHCENSRRHRRKFSCTTKPYESLQN

SEQ ID NO: 558 - protein, 81 aa, Peromyscus maniculatus
MGSVSFEDISLDFTWDEWQDLDSAQRTLYRDVMLENYSSLMFLGHCTTKPELIFKLEHGFGPWSLAEASIQSLPGVHKMTV

SEQ ID NO: 559 - protein, 81 aa, Mesocricetus auratus
SQGLVTFGDVAVVFSQEEWEWLSSEQRSLYWRVMLDNYRNLASLGLCASKPDMIALLEQGKDPCVLKRKTARGLRPDLEAV

SEQ ID NO: 560 - protein, 81 aa, Marmota monax
FQELVSFNDVTVGFTQEEWQHLDPSQRSLYREVMLENYSHLVSVGYCVTKPEVIFRLEQGEEPWISEAEFPSQSFPELWKA

SEQ ID NO: 561 - protein, 81 aa, Mus caroli
VCGSVTFKDVAVDFSQEEWACLDATQKVLYRDMMLETYSNLVAVVGHCISKPDLIVLLEQEKEPWMTVKEETDRPSPDLEA

SEQ ID NO: 562 - protein, 81 aa, Peromyscus maniculatus
SGSQDAVTYEDVHVNFTPEEWALLDSSQKSLYKEVMLETYRNLTSIGYKWEDLNIEEHCQSSRRLKRYIIGHSRYKPCDRE

SEQ ID NO: 563 - protein, 81 aa, Cavia porcellus
LRDLVTFEDVAVDFTQEEWALLDASQRSLYREVMLENCRNLASLGCHVDKPSLISQLEQEDQAMTEERGNLPGTCPDLETV

SEQ ID NO: 564 - protein, 81 aa, Peromyscus maniculatus
RPRALKFADVAVYFSPEEWGCLRPAQRLLYREVMRETYGLLGALGCAGPTPALISWLERNTDDWEPAALDPQEYRRWATFQ

SEQ ID NO: 565 - protein, 81 aa, Peromyscus maniculatus
ARVSVMFSDVSIAFSREEWEYLDLSQRDLYKDVMMENYRNVASLGYFISKPDVISLLEQGKEPWKVVRRRRRNPDLETKDE

SEQ ID NO: 566 - protein, 81 aa, Peromyscus maniculatus
FKELVVFRDVAVEFCREEWECLDPRQRSLYRDVMLETYGNFVSLGLAISKPSVISLLEQGKEPWMVEQAGWYPDLLSVNET

SEQ ID NO: 567 - protein, 81 aa, Marmota monax
TLGLLSFNDVSLEFSWEEWQLLDSAQRYLYREVILENYSNLLSVGYHGTKPDLIFRLEQGEEPWILNAKMSTQNCPEVWED

SEQ ID NO: 568 - protein, 81 aa, Cricetulus griseus
MAFEDVAVYFSQEEWVFLDAAQRALYRHVMLENFALVDSIGLSISRPRVIIQLQRGEEPWVSNRTNTGPGRGTRRRPSLGS

SEQ ID NO: 569 - protein, 81 aa, Cricetulus griseus
LINAVTYNDVHINFTQEEWALLDPSQKSLYKDVMLETYRNLTAIGYSCEDHNIEEHCQSSTRHRRYERRHSREKPSEYSQC

SEQ ID NO: 570 - protein, 81 aa, Mesocricetus auratus
SETGNAVTYDDVHISFTSKEWALLDPSQKSLYKDVMLEIYSHLTAIGYKWEAHDSEDHGQRFRRQRRHKRSHTEVKTYKCS

SEQ ID NO: 571 - protein, 81 aa, Cricetulus griseus
DSVTFEDVAISFTVEEWALLDPSQKKLHRDVMEETFRNLAAIGRTQDDQHIDNDHRYSRRNQRNEVVERLLERNKSSECKE

SEQ ID NO: 572 - protein, 81 aa, Cricetulus griseus
GNQFSFQSLLTFKDVAINFSKEEWECLHTSQRNLYRDVMLENYSNLVSVGLSESKPELVTCLEQNKEPWMVNIDEAEGLGQ

SEQ ID NO: 573 - protein, 81 aa, Mus caroli
MNGMTYDDVHVNFTGEEWALLSPSQKRLYKDVMLETYRNLTAIGYSWEDRNIEEHFQRSRRHGRHERSHTGENPSVYTQCN

SEQ ID NO: 574 - protein, 81 aa, Mesocricetus auratus
MGAVTYDDVHINFTQEEWALLNPSQKRLYKDVMHDTYSNLTATGYSLEDHYIEEHCQSSRRCRRHLQRHKKVHIGEKPYES

SEQ ID NO: 575 - protein, 81 aa, Marmota monax
PKVPVSFEDVAMYFTKTEWKLLDLKQRILYKQVMLENYGHLVSLGFAFSKPRLVSQLERGEGPWVADSLRGQAEAESHAGE

SEQ ID NO: 576 - protein, 80 aa, Mus musculus
MVLVSFEDVAVDFTWEEWQALDAAQRTLYRDVMLETYSSLVSLGHCMAKPELIFNLEQGLGPRSTAGASVWNLSGRTEDS

SEQ ID NO: 577 - protein, 81 aa, Mus caroli
DLVTYDDVHVNFTQEEWALLDPSQKNLYKDVMLETYRNLSAIGYIWEVHTSEDHFQTSRSHGRHERSCTAVQPSEFIQCGK

SEQ ID NO: 578 - protein, 81 aa, Cricetulus griseus
FQELVVFRDVAVEFCKDEWECLGPDQRSLYRDVMLETYSNFVSLGLAVSKPSVISLLEQGKEPWMVEQAGWYPDLLSVNET

SEQ ID NO: 579 - protein, 81 aa, Mesocricetus auratus
FQNSLTFDDVAVDFTQEEWVLMDQTQRDLYREVMLENYQNLFSAGCEITKPSLISWLEEDLQIGQREDFQEWEMQDTLREQ

SEQ ID NO: 580 - protein, 81 aa, Mus caroli
LNSAVTYDDVNVNFTREEWALLDSSQKSLYKDVMLETYRNLTAIGYNWEGHNIEEHCQSSRRHARTHKRTHTGEKSYECDQ

SEQ ID NO: 581 - protein, 81 aa, Dipodomys ordii
AVTQLTFEDVAVDFTPEEWRCLTPAQRALYRDVMLDTYRNLVSVGVSPPSMSVILPLEFQEEPWVAQSHVTTLGGLNGWEG

SEQ ID NO: 582 - protein, 81 aa, Peromyscus maniculatus
MVTFKDVAVAFSEEELRLLDPAQRKLYQEVMVENFQNLLSVGINNQSELRAVQDGGSHEALSCWQIWQRVIDNLTRCQDSM

SEQ ID NO: 583 - protein, 81 aa, Peromyscus maniculatus
KENAVTYDDIHIDFTREEWTLLDPSQKNLYKDVMLETYRHLTTIGYSWEDHNIEKYCESSRRHKSTVQRHKRTNTNENPYE

SEQ ID NO: 584 - protein, 81 aa, Heterocephalus glaber
EPWAITFADVAVYFSPEEWGCLQPTQRALYRDVMRDTYVLLSALGGGGAKPALISWVEREAELWDPDAQDPEVPKWPTEAD

SEQ ID NO: 585 - protein, 81 aa, Mus caroli
SQGLVTFGDVAVVFSQEEWEWLSSEQRSLYWKVMLDNYRNLASLGLCASKPDMITSLEQGRDPWMMKRKMRKGQRLDLKAM

SEQ ID NO: 586 - protein, 81 aa, Mesocricetus auratus
MAFEDVAVYFSQEEWMFLDAAQRALYRHVMLENFALVDSIGLSVSRPRVIIQLQRGEEPWVPNRTNPGPGRSTCRRPSLGS

SEQ ID NO: 587 - protein, 81 aa, Mus musculus
DMGLVSFEDVAVDFTWQEWQELDAAQRTLYRDVMLENYRSLVWLGHCLAKPELISKLEEGFEPWGVAEATEQCLPCAEDQT

SEQ ID NO: 588 - protein, 81 aa, Marmota monax
QQRPVSFKDVVVGFTQEEWRRLNPAQRALYRDVMLETYSNLVSVGYEGTKPDVILRLEQEEAPWICEAVCPGCHCQEDFLS

SEQ ID NO: 589 - protein, 81 aa, Mus musculus
VEEPVTFKDVAVAFTQEEWGQLDLVQRTLYRDVMLETYGHLLSVGNQIAKPEVISLLEQGEEPWSVEQGYPKSSCPEWMRN

SEQ ID NO: 590 - protein, 81 aa, Peromyscus maniculatus
MNTVTYDDVHIGFTWEEWTLLDPSQKNLYKDVMLETYRNLAIIGYSWEDHNIEEHYQNSRRHERHERSQTGMKTSVHTQCS

SEQ ID NO: 591 - protein, 81 aa, Marmota monax
FKGPVTFKDVTVEFTKEEWKLLTPAQRTLYKDVMLENYNHLVSVGYRVSKPNLVFKLKQGKEPWVLEVEFPRRRCPEELWN

SEQ ID NO: 592 - protein, 81 aa, Mus musculus
KPWAVNFADVAVYFSPEEWRYLRPAQRALYREVMRETYGLLAYLDVGCAKPALICWVEEESEVWGPCAQDPEVAMCRTEVH

SEQ ID NO: 593 - protein, 81 aa, Peromyscus maniculatus
MEEMLSFRDVAIDFSAEEWECLDLAQWNLYRDVMLENYSNLVFLGLASCKPYLVTFLEQRQGPSDVKRQAAAPVHPGGTPY

SEQ ID NO: 594 - protein, 81 aa, Peromyscus maniculatus
NAVTYNDVHVDFTQEEWALMDPSQRNLYKDVMVETYMNLTAIGYNWEDLEVEEHCQNSLKHGRHKRPHTTEKSCEYMGCGK

SEQ ID NO: 595 - protein, 81 aa, Peromyscus maniculatus
TENAVTYDDVHVGFTWEEWALLDPSQKNLYKDVMLDTYRNLTTIGYSWEGHNIEEHFQSSRRHERHKRSDTGENSSVYTQC

SEQ ID NO: 596 - protein, 81 aa, Ictidomys tridecemlineatus
EPGAVSFADVAVYFSPEEWGCLRPAQRVLYRDVMRETYGHLGALGFPGPKPALISWMEQESEAWSSAAQDPEEGESLGGAL

SEQ ID NO: 597 - protein, 81 aa, Marmota monax
FQESVTFRDVAIAFSQQEWQSLDSSQRDLYRDVMLENYRNLVSLGHSLSKPHVITLLEQWKDPWETGRKDKRRRCADLQLE

SEQ ID NO: 598 - protein, 81 aa, Dipodomys ordii
KPGAVSFADVAVYFSPEEWGCLRPAQRALYRDVMRETYGHLGALGLPGPKPALISWMEGESEAWNPAAQDPEEGENLGGAL

SEQ ID NO: 599 - protein, 81 aa, Fukomys damarensis
EPWAITFADVAVYFSPEEWGCLQPTQRALYRDVMRDTYVLLSALGGGGGAKPALISWVERESELWDSDAQDPEVPKWPTEA

SEQ ID NO: 600 - protein, 81 aa, Marmota monax
AQESVMFSDVSIDFSQEEWECLTDDQRHLYRDVMLENYSNLVSMGHSISKPNVISYLEQGKEPWLVDRGRTRGQWPVLEST

SEQ ID NO: 601 - protein, 81 aa, Dipodomys ordii
LASISFEDLAVTFTEEEWEHLDLGQRNLYQEVMLETYQLLVSLGDQVRLAPPTPGTPLPALPAQPRLLGLPSQPLDRRGTP

SEQ ID NO: 602 - protein, 81 aa, Ictidomys tridecemlineatus
VPEPVTFEDVAVDFTQEEWGQLDLVQRTLYRDVMLETYGHLLSVGNQIAKPEVISLLEQGEEPWLVEQTCPESSCPEWMRD

SEQ ID NO: 603 - protein, 81 aa, Mesocricetus auratus
MEELLSFPDVAIDFSAEECECLDLAQWNLYKEVMLENYSNLVFLGLSFSKPYLVTFLEQSSEPWSVKRKSAAASHPGSKPH

SEQ ID NO: 604 - protein, 81 aa, Mesocricetus auratus
DMGLVSFEDVAVDFTWQEWQELDAAQRTLYRDVMLENYSSLVSLGNCLDKPELISKLEQGLVPWSGAEATEQYQPDVHKWS

SEQ ID NO: 605 - protein, 81 aa, Dipodomys ordii
SQGLVTFEDVAVYFSLEEWERLNVEQRALYQEVMQGNYGILVSLGYPIPKPDLIFRLEQGEEPWVPDSPHPEEGDIVTGVY

SEQ ID NO: 606 - protein, 81 aa, Octodon degus
VTFEDVAVNFSREEWALLDPPQRKLYRDVMWETLRHLAAVDDQQSEDEFRNFQKRVRSEEVEKASQYTLWYQHGEMDSRTP

SEQ ID NO: 607 - protein, 81 aa, Octodon degus
QGSVTFEDVAVHFSWDEWHLLDKAQRCLYRDVMAENLALITSLGLWPGVGDAEASSEQSASLKGMSQVRTFREGLSPQRAQ

SEQ ID NO: 608 - protein, 81 aa, Mus caroli
MGLVSFEDIAVYFNLEEWQDLDTAQRTLYRDVMLETYSSLVFLDPCIAKPKLIFNLERGFGPWSLAEASSRSLPGVHNVST

SEQ ID NO: 609 - protein, 81 aa, Mus musculus
GCCSLETHSIRDKNAVTYGDVHVNFTQEEWALLDPSQKKLYKDVMLETYRNLNAIGFNWDDKNTEEHCPSTRRWRRFYRMQ

SEQ ID NO: 610 - protein, 81 aa, Octodon degus
SQGSVSFKDVTVGFTQEEWQHLDPSQKSLYRDVMLENYSHLVSVGYCVTKPELIFRLEQGEEPWVLEEEFPRPGFLEFWKT

SEQ ID NO: 611 - protein, 81 aa, Mesocricetus auratus
LQDSVTFKDVAVDFSQEEWERLNPAQRSLYRTVVLENYWNLVSVGACVSKSHLISLLEHGKAPWDMRGEVTESTSQDGESV

SEQ ID NO: 612 - protein, 81 aa, Dipodomys ordii
AVTQLTFEDVAVDFTQEEWRCLTQAQRTLYRDVMLDTYGNLVSVGVSPPSMSVILPLEFQEDPWVAKSHVTTPGELNGWEG

SEQ ID NO: 613 - protein, 81 aa, Octodon degus
VHGSVTFRDVAIDFCQEEWECLGPIQRDLYRDVMLENYSNLIAVGSTISKPDVIALLEQGTEPWMGVRKDRSRWYPGLNSG

SEQ ID NO: 614 - protein, 81 aa, Dipodomys ordii
AVTQLTFEDVAVYFTREEWRCLTPAQRTLYRDVMLDTYRNLVSVGVSPPSMSVILPLEFQEEPWVAQSHVTTLGGLNGWEG

SEQ ID NO: 615 - protein, 81 aa, Octodon degus
SPVLVSFDDVFVSFTREEWQVLDNAQRALYGDVMLETYRSLVLLGQCITKPEVIFKLEQGVEPWTGGEPHNQSPPDVQEVD

SEQ ID NO: 616 - protein, 81 aa, Cricetulus griseus
KPGAVSFADVAVYFSPEEWGCLRPAQRALYREVMRETYGLLGALGVGGAKPALISWVEEEAELWGPGAQDPEVAMCQTQAD

SEQ ID NO: 617 - protein, 81 aa, Mus caroli
PKVTVSFEDVSVYFTKTEWKLLDLKQRNLYKQVMLENYSHLVSVGFAFSKPNLVSQLERGEKPWIRDDRMESAARSRAGNR

SEQ ID NO: 618 - protein, 81 aa, Mus caroli
MEDLLSFTDVAIDFSADECECLDSAQWNLYKEVMLENYSNLVFLGLAFSKPHLVTFLEQSSDPWSVKRKASAAISLGSKPH

SEQ ID NO: 619 - protein, 81 aa, Mus caroli
LQEAVTFNDVAIDFSQEEWEWLNSAQRSLYRTVVLENYRNLVSVGACISKPSLISLLEHGKEPWEVKGQVTGSRVQGGESV

SEQ ID NO: 620 - protein, 81 aa, Marmota monax
AHGSVTFRDVAMDFSQQEWECLNPFQKTLYRDVMMENYGNLVSLGHSISKPDVITLLEQGKEPWMIVKKETRKWRKDLESR

SEQ ID NO: 621 - protein, 81 aa, Mus caroli
FKELVVFRDVAVEFCKEEWECLGPEQRSLYRDVMLENYSNFVSLGLAISKPTIISLLEQGKEPWIVEQAGWYPDLLSENEA

SEQ ID NO: 622 - protein, 81 aa, Mus musculus
FQVPVTFRDVAVYFCREEWECLSPSQRTLYRNVMLENFRNLNELGCCSRRPGLITRLEQWDEPWVDDWDRSEFPDGQKSFC

SEQ ID NO: 623 - protein, 81 aa, Ictidomys tridecemlineatus
EPGAVSFADVAVYFSLEEWGCLRPSQRALYRDVMRETYLHLSALGGGGTKPALISWVEEEAELWHPDAQDPEVAKCPTEAD

SEQ ID NO: 624 - protein, 81 aa, Heterocephalus glaber
QGSVMFSDVSIIFSQEEWEYLDREQRNLYRNVMMENYSNLVSLAGCFISKPDVITLLEQGKDPWKVVRKGRKRYSDLETSH

SEQ ID NO: 625 - protein, 81 aa, Mus caroli
MDAVTFMDVHVNFSQEEWALLNPSQKSLYKDVMLETYWNLTCIGYEWEDHNSEECCQSSRRHGRYFNSSQYSTCKAKGYGK

SEQ ID NO: 626 - protein, 81 aa, Mus musculus
MDAVTYEDVHVNFSREEWVLLDPSQKSLYKDVMLETYWNLTCIGYKWKDHDNEEYCQNSGRHGRCINCPSAYGKKQCTNLF

SEQ ID NO: 627 - protein, 81 aa, Cricetulus griseus
EKQFSFQSLLTFEDVAINFSKKEWECLDTSQRDLYRFVMLENYSNLVSVGLSVSKPELVTCLEQNKEPWMVNIEESEVLEP

SEQ ID NO: 628 - protein, 81 aa, Mesocricetus auratus
SKAPVTFGDLVIYFSQEEWEWLSPIQKDLYEEVMLENYHTLVSLGLVSRRPNIITLLEKGKAPWMVEPSRRRRGPESGSKR

SEQ ID NO: 629 - protein, 81 aa, Mesocricetus auratus
MDAVTYDDVHINFTLEEWALLNPSQKSLYKDVMLDTYRNLTAIGYSWDDHNIEEICQSSRSHRRHLQRHAKINTGEKPYGS

SEQ ID NO: 630 - protein, 81 aa, Marmota monax
TEGPLTFRDVAIEFSQEEWKFLVPAQRALYRDVMLETYRNLVFLGTCPSDLSVLSWLEQGRELWTVNGPEEISRPANEWAC

SEQ ID NO: 631 - protein, 81 aa, Mus caroli
TQRSISFKDLAVDFTREEWQRLGPAQRLLYRDVMLENYSNLIAVGLHVSKPDVILKLEQGKEPWVVENSSRQNHAEDDEPL

SEQ ID NO: 632 - protein, 81 aa, Mus caroli
MEDPLSFTDVAIDFSADECECLDSAQWNLYKEVMLENYSNLVFLGLAFSKPHLVTFLEQSSDPWSVKRKASATIPLGSKPH

SEQ ID NO: 633 - protein, 81 aa, Rattus norvegicus
FQDLLSFTDVAIDFSADECECLEPAQWNLYKEVMLENYSNLVFLGLAFSKPYLVTFLEQSSDPWSMKRKASAAIHLGLKPH

SEQ ID NO: 634 - protein, 81 aa, Rattus norvegicus
DVVTYEDVHVNFTQEEWALLDPSQKRLYKVVMLETYKNLSAIGYIWEDHTIEQHFQSSRSHGRHKRHRTGEQPSELIQHGK

SEQ ID NO: 635 - protein, 81 aa, Octodon degus
LLPAAGCGKDSGTPATEAVTFEDVAVNFSREEWALLDPPQRKLYRDVMWETLRHLAAVGMNSDDRQIEDVYKICRKNLSGA

SEQ ID NO: 636 - protein, 81 aa, Mus caroli
PITFDDVAIIFSPEEWECLDSAQRDLYRDVMVENCRNLLSVEASRHGTKGFSSKKDMKRSFQEELSRRLSKCGADIFHPRK

SEQ ID NO: 637 - protein, 81 aa, Mus musculus
MNAVTYRDVHVNFTQEEWALLDPSQKKLYKDVMLETYRNLNAIGFNWEAQNIEEHCQSSRRHRRCERSQSAEKPSEYTQRD

SEQ ID NO: 638 - protein, 81 aa, Octodon degus
RPRALKFADVAVYFSPEEWGCLRPAQRTLYRDVMRETYGHLGALGCAGPKPALISWLERNTDDWEPAALDPQEYPRGVTVQ

SEQ ID NO: 639 - protein, 81 aa, Mus musculus
MDALTFDDVHVHFTREEWSLLDPSQKRLYKDVMLEIYKNLTAIGYKWKDHNVGEHSQNDRRYGRHERSPAGENHNEYTQCD

SEQ ID NO: 640 - protein, 81 aa, Fukomys damarensis
VTFDDVAVNFTMEEWALLDPSQKKLYRDVMWENFRNVTAIGRNWDNQQIEDQYKNYRNNLRKTSADFQSLQKHAMTNPEEK

SEQ ID NO: 641 - protein, 81 aa, Peromyscus maniculatus
FQSEVMFRDVTVNFSQEEWECLNSYERDLYKDVMLENYSHLVSLGCSISKPDVITLLEQGKEPWMIVRDERRRWSQDLETR

SEQ ID NO: 642 - protein, 81 aa, Ictidomys tridecemlineatus
AHESLAFRDVAIDLSQEEWECLDTAQRDLYREVMLENYSNLISLGCIIPKPDVIVLLEQEKDPWLETREETRRRSSDFTKK

SEQ ID NO: 643 - protein, 81 aa, Mus caroli
AHSMVMFRDVTVDFSQEEWECLSSYERDLYRDVMLENYSHLVSLGCSISKPDVITLLEQGKEPWMIVRAEKRRWSRDLESR

SEQ ID NO: 644 - protein, 81 aa, Octodon degus
PTAPVAFSDLTICFSQEEWGWLSPTQKLLYEEVMLENYQNLVSVGLCTRKPHIITLLEKGKDPWIAEPLRKRGGPDPASRY

SEQ ID NO: 645 - protein, 81 aa, Octodon degus
EPWAVTFADVAVYFSSEEWRCLRPAQRALYRDVMRDTYGLLSALGGGGTKPALISWVEGEAELWDPDAQDPEVVRWPAEAD

SEQ ID NO: 646 - protein, 81 aa, Mus musculus
SQVSLTFEDVAVLFTRDEWKKLVPSQRSLYREVMLENYSNLASLAGFPFTKPKVISLLQQGEDPWKVEEEGPGGFSLGLKC

SEQ ID NO: 647 - protein, 81 aa, Mustela putorius
PQKSVTFEDVAVYFTQTEWDGLSPAQRALYRDVMLENYGNVASLGFSLLKPAVISQLEGAGELGRPSPLVAGTEIGLQGLW

SEQ ID NO: 648 - protein, 81 aa, Delphinapterus leucas
FQGSVSFKDVTVDFSREEWQQLDLAQKSLYRDVMLENYFNLISVGCQVPKPEVIFNLERGEQPCMLDGEISSQSYLDQGIG

SEQ ID NO: 649 - protein, 81 aa, Delphinapterus leucas
AQGLMAFEDVAVYFSREEWGLLDAAQRALYRRVMLENFTLLASLGLSVSRPHVVIQLECGKEPWVLNGTDVTLARNAQRRP

SEQ ID NO: 650 - protein, 81 aa, Vicugna pacos
SQGSLSFRDVTVGFTWEEWQQLDPAQRALYRDVMLETYSHLLSVGYCIPKPEVILKLEQGEEPWILEEESSSQSVPELINS

SEQ ID NO: 651 - protein, 81 aa, Odobenus rosmarus
SHGPLSFEDVAIAFTKEEWQQLDPAQRTLYRDVMLENFSHLVSLGHPVSKPDIISRLEQGEEPWIIKRDISDWICPERETR

SEQ ID NO: 652 - protein, 81 aa, Vicugna pacos
AQGSVMFSDVSIDFSQEEWECLNDDQRDLYRDVMLENYSNLVSMGHCISKPDVISFLEQGKEPWLVDREPTRYQWPVLESR

SEQ ID NO: 653 - protein, 81 aa, Odobenus rosmarus
SQEPVTFEDVAVYFTQNQWASLDPMQRALYLEVMLENYANITSLAALPFPKPDLILQLEQGEAPWGLDPWTPLEREALGGV

SEQ ID NO: 654 - protein, 81 aa, Delphinapterus leucas
SQESVSFEDVAVYFTRNQWASLDSAQRTLYREVMLENYANVTSLAAFPFPKPDLIFQLERGKAPGGLDPWTPIRREVRGVC

SEQ ID NO: 655 - protein, 81 aa, Carlito syrichta
SKDLVTFGDVAVNFSQEEWEWLNPAQRNLYRRVMLENYRSLVSLGVSVSKPDVISLLEQGKEPWMVKKEGTRGACPDWEYV

SEQ ID NO: 656 - protein, 81 aa, Vicugna pacos
RPESVTFEDVAIYFSENEWTGLAPAQRALYRDVMLENYGALASLAAFPFPKPALIFQLEQGEAPWSSAPQGALDGEGPRGI

SEQ ID NO: 657 - protein, 81 aa, Delphinapterus leucas
SQEAVTFEDVAVNFSNEEWQCLTHAQRHLYKDVMLENYGNVVSLGFPFPKPPLISHLEQEAELCVQDGQDREFLSCSHPVS

SEQ ID NO: 658 - protein, 81 aa, Delphinapterus leucas
FQGSLSFRDVAVGFTRKEWQQLDPTQRTLYRDVMLENYSHLVSVGCQVTKPAVISRLEQGQEPWMKEEEILRWSFPEVLQV

SEQ ID NO: 659 - protein, 81 aa, Cervus elaphus
SHTLVTFKDILVNFTREEWKLLDTAQQIMYKDVMLENYRNLVSLGHQLPKPDVILRLEKGEEPWLVEKEIHQETHPDLETP

SEQ ID NO: 660 - protein, 81 aa, Vicugna pacos
ALESVTFRDVAVFFSRDEWLHLNPAQRALYREVMLDNYSALLSLGILFSKPKVILQLEQGEDPWMVENGVSQSACLGWESL

SEQ ID NO: 661 - protein, 81 aa, Odobenus rosmarus
EELPVVFEDVAVYFTREEWGMLVKRQKELYRDVMRMNYELLASLGPAAAKPDLISKLERRAAPWIKDPNGPKWGKGRPPGK

SEQ ID NO: 662 - protein, 81 aa, Carlito syrichta
SQGLVTFGDVALDFSQEEWEWLNPSQKDLYRDVMLENYRNLVWLGLSISKPNMISLLEQGKEPWMVEREMSHGQCADWESW

SEQ ID NO: 663 - protein, 81 aa, Delphinapterus leucas
FESVVFEDVAVDFTPEEWALLDPAQRNLYRDVMLETFRNLASVGENWKCHSIEDQHKNQGTHLRWRVVEIPSENNESNQCG

SEQ ID NO: 664 - protein, 81 aa, Delphinapterus leucas
AQESVMFSDVSIDFSQEEWEYLNDDQRDLYREVMLENYSNLVSMAGHSISKPDVISFLEQGKEPWLVDRELTRDQWPVLES

SEQ ID NO: 665 - protein, 81 aa, Ornithorhynchus anatinus
AQVPVTFEDVAVYFSREEWAALDGRQKELYRDVMRGNYELVASLGCPAAKPDLICQIERDEELGVGEPQGRPVRRQPQRRS

SEQ ID NO: 666 - protein, 81 aa, Odobenus rosmarus
QAEVTFEDVAVLFSREEWGRLSPAQRGLYRDVMLETYRNLVSLGAGPAGPKPGVITQLERGDEPWVLDAQGAKGKERLRVS

SEQ ID NO: 667 - protein, 81 aa, Colobus angolensis
RLESVTFEDVAVYFTQNQWASLNPAQRALYGEVMLENYANVASLVAFPFPKPALISHLERGEAPWGPDPWDTKIPRGIGQG

SEQ ID NO: 668 - protein, 81 aa, Colobus angolensis
SKAPITFGDLAIYFSQEEWEWLSPIQKDLYEDVMLENYRNLVSLGLSFRRPNVITLLEKGKAPWMVEPVRRRQAPDSGSKC

SEQ ID NO: 669 - protein, 81 aa, Odobenus rosmarus
RPRAVKFADVAVYFSPEEWGCLRPAQRALYRDVMRETYGHLGALGCAGPKPALISWLERNTDDWEPAALDPQECPRGLTVQ

SEQ ID NO: 670 - protein, 81 aa, Erinaceus europaeus
RSEALSFADVSVSFSREEWGCLRPAQKALYRDVMRETCGLLGALGLSGPKPAFISWLEGEMEAWSPEAHEPERESRAADAR

SEQ ID NO: 671 - protein, 81 aa, Mustela putorius
PKVPVSFEDVSVYFTKTEWKLLDVQQRILYKTVMLENYHHLVSLGCLSTKPHLVSWLEQGEGPWTTDIWRTPATAKTQTEG

SEQ ID NO: 672 - protein, 81 aa, Mustela putorius
SSVTFEDVAVYFSQEEWRFLNKAQKHLYHDVMLEVFALIASLGGGQGALEAAAPSEQNVSGGGSQKAYAQDCSLDTNPGQT

SEQ ID NO: 673 - protein, 81 aa, Erinaceus europaeus
SQASVSFKDVTVEFTQDEWRLMSSAQRTLYREVMLENYSHLISMGYCSTKPELIFALEQKDFRESILERESLSTIPPEDFQ

SEQ ID NO: 674 - protein, 81 aa, Vicugna pacos
PQKSVTFEDVAVYFTQTEWDGLSPAQRALYRDVMLENYGNVASLGFPLLKPAVISQLEGGGKLGGPSPLASGTGTGPQGLW

SEQ ID NO: 675 - protein, 81 aa, Vicugna pacos
RPRAVKFADVAVYFSPEEWECLRPAQRALYRDVMQETYGHLGALGCAGPKPALISWLERNTNDWELAALDPQECPRQMTVQ

SEQ ID NO: 676 - protein, 81 aa, Odobenus rosmarus
KPGAVSFADVAVYFSPEEWGCLRPAQRALYRDVMRETYGHLGALGFPGPKPALISWMEQESEAWSPAAQDPEEGESLGGAL

SEQ ID NO: 677 - protein, 81 aa, Cervus elaphus
VFDAVTFTDVAVDFSQDEWERLTLAQRTLYKKVMLENYSNLASLGLCISKPDVISSLEQDKEPWTMKGELTRGPCADLEYV

SEQ ID NO: 678 - protein, 81 aa, Chelonia mydas
AQMLVTFEEVAVYFTQGQGALLGPAQRALYRDVMQENYEMVTSLGFSLPKPELISRLERGEEPWVPDLQACEKRESLRGAR

SEQ ID NO: 679 - protein, 81 aa, Loxodonta africana
QESVTFKDVAVDFTQEEWHHMDPTQRILYRDVMLETYSHLVSLGYQVSKPEVIFKLEQGEEPWISEEEIQRPFCPDWEIRP

SEQ ID NO: 680 - protein, 81 aa, Suricata suricatta
TQDPVVFEDVAVDFTQEEWALLNLAQRNLYRDVMLENFQNLASLGYPLHIPYLISQWKQEEDLGTVERGTIQGEHQEGFET

SEQ ID NO: 681 - protein, 81 aa, Mandrillus leucophaeus
SKGSLMFRDVSIDFSQEEWECLDSGQMNLYKEVMLENFSNLVSVGLSSSKPAVISLLEQGKEPWMVDRELTRGLCSDLESM

SEQ ID NO: 682 - protein, 81 aa, Mandrillus leucophaeus
ACESITFGDVAIDFSHQEWEYLNLVQKTLYQEVMMENYDNLVSLGHFISKPDLITLLEQGKEPWMIVGEETRGECTDLDSR

SEQ ID NO: 683 - protein, 81 aa, Sus scrofa
AQESVMFSDVSIDFSQEEWECLNDDQRALYRDVMLENYSNLVSMAGHSISKPDVISFLEQGKEPWLVDRELTRGQWPVLES

SEQ ID NO: 684 - protein, 81 aa, Neophocaena asiaeorientalis
PQGCAISEDVFVYFSREEWVLLDEDQRLLYRDVMLENFALLASLGIASSRSHLVTQLEQGEEPWMPAQVDMTPATEKEAQK

SEQ ID NO: 685 - protein, 81 aa, Nomascus leucogenys
WPESVTFEDVAVYFTQNQWASLDPAQRALYREVMLENYANVASLVAFPFPKPALISHLERGEAPWGPDPWDTEIPRGISQG

SEQ ID NO: 686 - protein, 81 aa, Capra hircus
RPRAVKFGDVALYFSREEWGCLRPAQRALYRDVMQETYGHLGALGCAGPKPALISWLERNTDDWETAALDPQECPKGVAVQ

SEQ ID NO: 687 - protein, 81 aa, Chrysochloris asiatica
SLEQVSFKDVCVDFTQEEWYLLDPAQKILYRDVILENYSNIVSVGHCGTKPEVIFKIEQGEEPWVLGEGFSSLQHPERNWK

SEQ ID NO: 688 - protein, 81 aa, Mandrillus leucophaeus
KEASVAFRDVAVDFTQEEWRLLSPAQRTLHREVMLETYNHLVSLEIPSSKPKLIAQLERGEEPWREERKCSLDLCPESKPE

SEQ ID NO: 689 - protein, 81 aa, Sus scrofa
QAEVTFEDVAVLLSREEWGRLGPAQKGLYRDVMLETYRNLVSLGAGHAGPKPGVIAQLERGDEPWVLDMQGREQSTIDGSA

SEQ ID NO: 690 - protein, 81 aa, Nomascus leucogenys
FQEAVTFKDVAVAFTEEELGMLDSAQKKLYRDVMLENFRNLVSVGHQSFKPDMISQLEREEKLWMKELQTQRGKHSGEYCA

SEQ ID NO: 691 - protein, 81 aa, Nomascus leucogenys
MGLLTFRDVAIEFSLEEWQCLDTAQKNLYRNVMLENYRNLAFLGIAVSKPDLIICLEKEKEPWNMKRHEMVDEPPDICPHF

SEQ ID NO: 692 - protein, 81 aa, Bos indicus
TLESVTFQDVAVDFTQEEWALLDTSQRTLFREVMLENISHLVSVGNQLYKSDVISHLEQGEQLSREGLGFLQGQSPVISDR

SEQ ID NO: 693 - protein, 81 aa, Suricata suricatta
EEPPVVFEDVAVYFTREEWGTLVTRQKELYRDVMRLNYELLASLEPAAAKPDLISKLERRAAPWIRDPSGPKWGKGRPPGK

SEQ ID NO: 694 - protein, 81 aa, Chrysochloris asiatica
MLAPVTFEDVTVVFTEAEWVTLSTEQKNLYKEVTLETYRNLLSLAEPTPETYPGPSCLLPFSCQQFLSQHVLQIFPGVCAE

SEQ ID NO: 695 - protein, 81 aa, Mandrillus leucophaeus
FQGSISFKDVTVGFSQEEWQHLNPSQRALYRDVMLENYSNLVSVGYCVHKPEVISRLEQGEEPWRLEEEFPSQSFSEVWTA

SEQ ID NO: 696 - protein, 81 aa, Sus scrofa
MAFRDVAVAFSQKEWKLLSPAQRTLYRDVMLENYSLLVSLGIAFPKPKLITQLEQGDEPWREESECFLDLYSEPRTEFQPC

SEQ ID NO: 697 - protein, 81 aa, Neophocaena asiaeorientalis
EEVPVVFEDVAVYFTREEWGTLDKRQKELYRDVMRMNYELLASLGPAAAKPDLISKLERRAAPWIKDPNGPKWGKGRPPGK

SEQ ID NO: 698 - protein, 81 aa, Nomascus leucogenys
RQAFLAFGDVTVDFTQKEWRLLSPAQRALYREVTLENYSHLVSLGILHSKPELIRRLEQGEAPWGEERRRRPGPCAGIYAE

SEQ ID NO: 699 - protein, 81 aa, Nomascus leucogenys
SVAFEDVAVNFTQEEWALLSPSQKNLYRDVMLETFRNLASVGIQWKDQNIENLYQNLGIKLRSLVERLCGPQEGSEHRETF

SEQ ID NO: 700 - protein, 81 aa, Capra hircus
IKSPLTFGDVAVEFSGEEWAWLDSAQRSLHRSVMLENYRNLASLGLCLSKPEMISSLEQRKEPWAVKRKSTSGKCPDLQTL

SEQ ID NO: 701 - protein, 81 aa, Capra hircus
SQVSVTFEDVAVLFTRDEWRKLAPSQRNLYQDVMLENYSNLVSLGLPFSKPEVISLLQQGEDPWKVEKESPGGSSLGEWSS

SEQ ID NO: 702 - protein, 81 aa, Sus scrofa
EEVPVVFEDVAVYFTRDEWGTLDKRQKELYRDVMQMNYELLASLGPAAAKPDLISKLEQRAAPWIKDPHGPTWGKGRPPGK

SEQ ID NO: 703 - protein, 81 aa, Sus scrofa
SQSSVTFGDVAVDFSQDEWAWLDATQRSLYRSVMLENYRNLVSLGLCSSKPDMISSLEQRKEPWTVKRKLPGGGCPDPQAV

SEQ ID NO: 704 - protein, 81 aa, Suricata suricatta
KPGAVSFADVAVYFSPEEWGCLRPAQRALYRDVMRETYGHLGALGFPGPKPALISWMEQESEESEAWSPAAKDPEEGESLG

SEQ ID NO: 705 - protein, 81 aa, Suricata suricatta
THGLVMFKDVAIDVSQEEWECLNPTQRSLYRDVMLENYSNLVSLGLSLSKPAVISSLEQGMEPWMVVREVTGKQCPDLVSR

SEQ ID NO: 706 - protein, 81 aa, Suricata suricatta
SKLPVTFGDLAIYFSQEEWEWLSPIQKDLYEDVMLENYQNLVSLGLSFRRPNVITLLEKGKAPWMVEPVRKRRGLDSKSKC

SEQ ID NO: 707 - protein, 81 aa, Mandrillus leucophaeus
MAFEDVAVYFSQEEWGLLDTAQRALYRRVMLDNFALVASLGLSTSRPRVVIQLERGEEPWVPSRTDTILSRNTYRRRNPGS

SEQ ID NO: 708 - protein, 81 aa, Sus scrofa
ALGSVTFRDVAVFFSQDEWLHLDSAQKTLYQEVMLENYSTLVSLGIPFSMPKVICQLQQGEDPCMVEGEALRDPCLDFKTW

SEQ ID NO: 709 - protein, 81 aa, Sus scrofa
VTFEDVALYFSRDEWRLLDEAQRRLYHDVMLQNFSLISSLGCCCGAEDAESPFQPSMFRDVSQARTLKAASLSQKNHPCEK

SEQ ID NO: 710 - protein, 81 aa, Nomascus leucogenys
GKELLSFEDVAMYFTREEWGHLNLGQKDLYRDVMLENYRNMVLLGFQFPKPEVICQLENWDEQWILDLPRAGNRKASGSAC

SEQ ID NO: 711 - protein, 81 aa, Capra hircus
PKVPVSFEDVAMYFTKTEWKLLDHRQRKLYKQVMLENYHHLVSLGFSFAKPQLVIQLEQGQKPWVADVHRMRITTGMQAGD

SEQ ID NO: 712 - protein, 81 aa, Capra hircus
ARESVMFSDVSIDFSLEEWEFLNLEQRDLYRDVMLENYSNLVSLGCFISKPDVISLLEQGKEPWNVVRKGRRQYPDLETNY

SEQ ID NO: 713 - protein, 81 aa, Sus scrofa
AHGSVMFSDVSIDFSQEEWEYLNLEQRDLYRNVMLENYSNLVSLGCFISKPDVISLLEQGKEPWKVVRKGRRPYSGLETKK

SEQ ID NO: 714 - protein, 81 aa, Sus scrofa
AQGQVTFEDVAVCFSQEEWGLLDETQRLLYRSVMLETFSLMASLGLTSSRTHDISQLERWGEPFLSASGAMRATRPTGCWH

SEQ ID NO: 715 - protein, 81 aa, Nomascus leucogenys
MVQESVTFKDVAVLFTQEEWGQLSPAQRALYRDVMLENYSNLVSLGLLGPKPDMFSQLEKREVWMPEDTPGGFCLDWMTMP

SEQ ID NO: 716 - protein, 81 aa, Suricata suricatta
RPRAVKFADVAVYFSTEEWGCLRPAQRALYRDVMRETYGHLGALGCAGPKPALISWLERNTDDWEPAALDPQECPKRVTVQ

SEQ ID NO: 717 - protein, 81 aa, Suricata suricatta
DQESLTLEDVAVDFSREEWQLLAPAQKDLYRDVMLENYRNLVSLGYQASTPDALCMLERGEGPWATGEAVRGGARPETRKV

SEQ ID NO: 718 - protein, 81 aa, Suricata suricatta
KPGVLTFADVAVYFSSEEWGCLRPAQRALYRDVMRETYGHLGALGCAGPKPALISWLERNTDDWEPAALDPQECPKRVTVQ

SEQ ID NO: 719 - protein, 81 aa, Sus scrofa
VREPLTFEDVAVNFTQEEWQQLDPAQKTLHRDVMLEIYSHLVSVGCSGIKPDIISKLEHGEDPWIRESELPRWTYSDREKS

SEQ ID NO: 720 - protein, 81 aa, Neophocaena asiaeorientalis
PQVLVSFEEVAVLLSQEEWGHLGPDQKRLYRDVMLETYGNLVSLGLQGSKPDVISKLEQGEEPWAPHSPRIEGSWIWRRRR

SEQ ID NO: 721 - protein, 81 aa, Nomascus leucogenys
YQEMVTFEDVAVHFTKTEWTGLSPAQRALYRSVMLENFGNLTALGYPVPKPALISLLEGGDMDWGLEAQDDPPAERTKNVC

SEQ ID NO: 722 - protein, 81 aa, Equus caballus
WKELLSFEDVALFFTREEWNQLDWAQKDLYRDVMLENYRNLILLGFQFPKPEVICQLEQWEEPWILDLPRAGTRKASGSAC

SEQ ID NO: 723 - protein, 81 aa, Suricata suricatta
AQAPLSFEDVAVGFSPEEWQLLAPAQKDLYRDVMLENYRNLVSLGYQASKPDSLFQLEHGGPPWAVGGAAPRPPCAEEIWE

SEQ ID NO: 724 - protein, 81 aa, Mandrillus leucophaeus
PQGHLTFMDVAIEFSQEEWKCLDPGQRALYRDVMLENYRNLVSLGICLPDLSIISMLKQRREPLTLQSEVKIVKNPDGREC

SEQ ID NO: 725 - protein, 81 aa, Trichechus manatus
IHESVTFEDVAVNFTDREWQCLTHAQRHLYKDVMLENYGNMVSLGFPFPKPPLISHLERETEPWVQDLQDRESLSSFYPVS

SEQ ID NO: 726 - protein, 81 aa, Trichechus manatus
AHELVMFRDVAIDFSKEEWECLDLEQRDLYRDVMLENYSNMVLLGLCIHQPDMFSLLEKGKEPWKVLRYQTRGPCPDMQSR

SEQ ID NO: 727 - protein, 81 aa, Sus scrofa
AQESVMFSDVSIDFSQEEWECLNDDQRALYRDVMLENYSNLVSMGHSISKPDVISFLEQGKEPWLVDRELTRGQWPVLESR

SEQ ID NO: 728 - protein, 81 aa, Nomascus leucogenys
GSLTFRDVAIEFSLEEWQCLDTAQQNLYRNVMLENYRNLVFLGIAAPKPDLIIFLEQGKEPWNVKRHEMVEEPPVICSHFA

SEQ ID NO: 729 - protein, 81 aa, Zalophus californianus
GHALLTFRDVAIEFSQEEWGCLNHTQRELYRDVMLENYGHLLFLGLIVSKPDLVSFLEQTKDPWDGKRKKTVAFHPGLALS

SEQ ID NO: 730 - protein, 81 aa, Equus caballus
LQVSVSFEDVTVDFSREEWQHLDPAQRRLYRDVTLENYSHLCSVGYQVPKPEVIFKLEQGEGPWMLEGEAPHQSCSDDDIG

SEQ ID NO: 731 - protein, 81 aa, Loxodonta africana
VVFTDVAVDFSQEEWECLDSYQRSLYRDVILENYSNLVSLGGGSISKPDVVTLLEQGKEPWMVVRDTKIRWSLGLESNYDA

SEQ ID NO: 732 - protein, 81 aa, Chrysochloris asiatica
KPGIVRFADVAVYFSREEWACLRPAQRALYRDVMRETYGHLGALGFPGPKPALISWMERESEAWSPAAQEPKEGENLGGAP

SEQ ID NO: 733 - protein, 81 aa, Nomascus leucogenys
AQGYVTFEDVAVYFSQEEWRLLDEAQKLLYRNVMLENFSLLASLGLASSKTHEITQLESWEEPFMPAWEVVTSATPRGTWW

SEQ ID NO: 734 - protein, 81 aa, Capra hircus
MADLVMFRDVTVDFSQEEWECLNSNQRNLYRDVILENYSNLVSLGGCSISKPDVITLLEQGKEPWMVVRDEKRRWRLDLES

SEQ ID NO: 735 - protein, 81 aa, Suricata suricatta
SLEPDSFGDVAVLFSQEEWARLAPAQRELYRDVMLETYSHLVSLGLAVSKPDVISFLEQGKEPWLGEKAAAGGLGPELESR

SEQ ID NO: 736 - protein, 81 aa, Capra hircus
DLDQVTFEDVVVDFTREEWGCLEPAQRTLYRDVMLETFRLLVSVGHWLPKPDVISLLEQEAELWAADEGGPRGMCPDLETR

SEQ ID NO: 737 - protein, 81 aa, Sus scrofa
AHMAFRDVAVDFTQEEWMLLSPAQRSLYREVMLENYSNMVSLGIPFSKPKLITQLEQGKETWREERKCPPATCSAEPQPEL

SEQ ID NO: 738 - protein, 81 aa, Chlorocebus sabaeus
FQEPVTFEDVAVYFTQNEWASLHPTQRALYREVMLENYANVTSLLAFPFPKPALISHLERGEAPWGPDPWDTEIPRGISQG

SEQ ID NO: 739 - protein, 81 aa, Mandrillus leucophaeus
FQEAVTFKDVAVAFTEEELGLLDSAQRKLYRDVMLENFRNLVSVGHQSFKPDMISQLEREEKLWMKEFQTQRGKHSGFLCF

SEQ ID NO: 740 - protein, 81 aa, Neophocaena asiaeorientalis
KSKSKAPVTFGDLAIYFSQEEWEWLSPIQKDLYEDVMLENYQNLVSLGLSFRRPNVITLLEKGKAPWMVEPVKRRRGLGPL

SEQ ID NO: 741 - protein, 81 aa, Sus scrofa
FRGPVTFKDITVEFTQEEWQLLDNAQRTLYREVMQENYHHLISVGYCVNKPNAVFKLKQGKEPWILEVEFPRRNNPEDLWN

SEQ ID NO: 742 - protein, 81 aa, Canis lupus
SKVPVTFGDLAIYFSQEEWEWLSPIQKDLYEDVMLENYQNLVSLGLSFRRPNVITLLEKGKAPWVVEPVRKRRGLDSGFKC

SEQ ID NO: 743 - protein, 81 aa, Mandrillus leucophaeus
SKAPITFGDLAIYFSQEEWEWLSPIQKDLYEDVMLENYRNLVSLGLSFRRPNVITLLEKGKAPWMIEPVRRRRAPDSGSKC

SEQ ID NO: 744 - protein, 81 aa, Nomascus leucogenys
VQEPVTFKDVAVDFTQEEWGQLDLVQRTLYRDVMLETYGHLLSVGNQIAKPEVISLLEQGEEPWSVEQACPQRTGPEWVRN

SEQ ID NO: 745 - protein, 81 aa, Canis lupus
PQKSVTFEDVAVYFTQTEWDGLSPAQRALYRDVMLENYGNVASLGFSLLKPAVISQLEGAGELEGPSPLAAGTEIGPQGLW

SEQ ID NO: 746 - protein, 81 aa, Canis lupus
PKGLLTFRDVAIEFSQEEWGCLNHTQRELYRDVMLENYGNLLFLGLIVSKPDLVSFLEQKKEPWSVKRKKRVTIHPAQRFG

SEQ ID NO: 747 - protein, 81 aa, Muntiacus muntjak
RTGPLTFGDVAVEFSGEEWAWLDSAQRSLHRSVMLENYRNLASLGLCMSKPEMISSLEQSKEPWAVKAKSTRGRCPDLNLC

SEQ ID NO: 748 - protein, 81 aa, Mandrillus leucophaeus
FQEPVTFEDVAVYFTQNEWASLHPMQRALYREVMLENYANVTSLSAFPFSKPDLIFQLEQGEAAWGPDPWTLAGGEALRGM

SEQ ID NO: 749 - protein, 81 aa, Canis lupus
CEGSVSFEDVTMDFSREEWQQLDPAQRCLYQDVMLEIYSHLLFVGYNIPNPEIISRMEKGEEPWMREIQLPHQRHRERAFG

SEQ ID NO: 750 - protein, 81 aa, Sus scrofa
SQVTVTFEDVAVLFSRDEWRKLGPSQKNLYQDVMLENYSNLVSLGLPFSKPKVISLLQQGEDPWKVEKESPGSFSPGWKSS

SEQ ID NO: 751 - protein, 81 aa, Mandrillus leucophaeus
MEGLVMFQDLFIDFSQEEWECLDAAQKDLYRDVMMENYSSLVSLGLCIPKPDVISLLEQGKEPWMVSRDVLGGWCPDRLKK

SEQ ID NO: 752 - protein, 81 aa, Neophocaena asiaeorientalis
SQESVSFEDVAVYFTQNQWASLDSAQRTLYREVMLENYANVTSLAAFPFPKPDLIFQLERGKAPGGLDPWTPIRRKVRGVC

SEQ ID NO: 753 - protein, 81 aa, Neophocaena asiaeorientalis
AHGSVMFSDVSIDFSQEEWDYLDLEQRDLYRDVMLENYSNLVSLGCFVSKPDVISLLEQGKEPWKVVRKGRRRYPDLETNY

SEQ ID NO: 754 - protein, 81 aa, Bos indicus
PQESVTFEDVAVNFSHEEWQCLTHAQRHLYKDVMLENYGNMVSLGFSFSKPPLISRLEQGTEPYVQDRQDWEFLSCSYPVS

SEQ ID NO: 755 - protein, 81 aa, Canis lupus
SQESVTFRDVAIDFSQEEWEWLQPAQRDLYRHVMLENYSHLVSLGLNISKPYVVSLLEQGKGPWLEKGDVRRDLFSESHGE

SEQ ID NO: 756 - protein, 81 aa, Muntiacus muntjak
MAFEDVAVHFSQEEWGLLDTAQRSLYRRVMLENFALLASLGLSVSRPHVVTQLERGEEPWVLSGVDVTLPQDAQRRPRRGS

SEQ ID NO: 757 - protein, 81 aa, Canis lupus
SEESVTFEDVAIYFSENEWTGLAPAQRVLYRDVMLENYGAVAALAAFPFPKPALISQLERGEAPWCKAPQGALDGEGPRGI

SEQ ID NO: 758 - protein, 81 aa, Canis lupus
SQSLVTFGDVAVNFSQEEWEWLNSAQRNLYRSVMLENYRNLVSLGLCVSKPDMISSLEQRKEPWMVKRKLTRGRCPDLKAV

SEQ ID NO: 759 - protein, 81 aa, Mandrillus leucophaeus
NSGLLTFRDVAIEFSLEEWQCLDTAQKNLYRNVMLENYRNLAFLGVAVSKPDLITCLEKDKEPWNMKRHEMVDEPPGICPH

SEQ ID NO: 760 - protein, 81 aa, Canis lupus
FQEAVTFKDVAVVFSEEELGLLGPAQRKLYRDVMLENFRNLVSVGHSSSKPDVISQLEREEKLCTKEFHTQGGGRNQKEME

SEQ ID NO: 761 - protein, 81 aa, Muntiacus muntjak
EVQETLTFDDVAVAFTWEEWQLLAPAQKALYRDVMLENHSNLVSVGFQASTPEVLSKLDQGEPWTMDDEVHCRTRSEVWKF

SEQ ID NO: 762 - protein, 81 aa, Muntiacus muntjak
LLESVTFGDVAVVFSRDEWLHLDAAQRSLYREVMLENYSALVSLGIPLSIPKLICQLQQGEDPCMVEREIPQDVCLGFKTW

SEQ ID NO: 763 - protein, 81 aa, Muntiacus muntjak
MGLLTFQDVTVDFTQEEWECLDLGQRGLYRDVMLENYGNLACLGLVVSKPDLVTFLEQMKDPWNVRRIETAIYPGMCLLNI

SEQ ID NO: 764 - protein, 81 aa, Bos mutus
QEPVTFEDVAVYFTQNQWASLDSAQRALYREVMLENYANVASLVVSPFPRPDLISQLERGEAPWDPDPWEAEDLRGICPGG

SEQ ID NO: 765 - protein, 81 aa, Neophocaena asiaeorientalis
VQASLSFEDVAVRFTWEEWQLLDPSQKDLYRNVMLENYCNLVSVGYQTPKPDSLFQLEQGEPPWRVEGAGQSQTCPEEIWE

SEQ ID NO: 766 - protein, 81 aa, Canis lupus
AQVLVTFKDVAVTFTREEWGQLDLDQKALYQEVMLETYGLLVSLGHPVPKPELTHLLECGQELWKGKRGLSHSTCSGDDTK

SEQ ID NO: 767 - protein, 81 aa, Canis lupus
LQRLLTFRDVAIEFSQEEWTCLNHTQRKLYRDVMLENYGHLLFLGLIVSKPDLVSFLEQKKEPWSVKRKKRVTIHPGKVAQ

SEQ ID NO: 768 - protein, 81 aa, Neophocaena asiaeorientalis
AQGSLTLKDVAVDFTWEEWQLLDPDQKDLYRDVMLENYSNLVSVGYQVNKPDILSMLEQGEPPWTLEDEVHSHPHPETDKV

SEQ ID NO: 769 - protein, 81 aa, Nomascus leucogenys
SLGSELFRDVAIVFSQEEWQWLAPAQRDLYRDVMLETYSNLVSLGLAISKPDVISFLEQGKEPWMVERVVSRGLCPVLESR

SEQ ID NO: 770 - protein, 81 aa, Canis lupus
AQGSVMFNDVSIVFSQEEWEYLDLEQKDLYRDVMLENYSNLVSLGCFISKPDVISLLEQGKEPWKVVRKGRRRYLDLENRY

SEQ ID NO: 771 - protein, 81 aa, Muntiacus muntjak
RMKSVTFEDVAVYFTQTEWDSLSTAQRALYRDVMLENYGNVASLGFPLLKPAVISQLEGGGELEGPSPLASGAGTGPQGLW

SEQ ID NO: 772 - protein, 81 aa, Canis lupus
FQGSLTFSDVAIGFSQQEWECLDPVQKSLYRDVMMENYGNLVSLGYSISKPDVITLLEQGKEPWMVLREETKRWDTDSFLS

SEQ ID NO: 773 - protein, 81 aa, Bos mutus
QEQVSFKDVCVDFTQEEWYLLDPAQKILYRDVILENYSHLVSVGNCITKPEVIFKIEQGEEPWILEERFPKQWHSGKSYKY

SEQ ID NO: 774 - protein, 81 aa, Bos indicus
TQVSVTFDDVAVTFTQEEWGHLDPAQRTLYREVMLETCRLLMSLGCPVPRPELIYQQEHGQELWTVKRDLSRSTCAGYSSE

SEQ ID NO: 775 - protein, 81 aa, Muntiacus muntjak
GLVMFKDVAIDVSQEEWECLNPAQRNLYKDVMLENYSNLVSLGLSVSKPAMITSLEQGKEPWMVLREVTGERCPDLVSKCE

SEQ ID NO: 776 - protein, 81 aa, Nomascus leucogenys
PQESVAFEDVAVYFTAKEWDIMVPAERALYRDVMLENYEAVAFVVPPTSKPALVSHLEQGKESCFTRPQGVLCRNDWRAGL

SEQ ID NO: 777 - protein, 81 aa, Neophocaena asiaeorientalis
PQKSVTFEDVAVYFTQTEWDGLSPAQRALYRDVMLENYGNVASLGFPLLKPTVISQLEGGGELEGPSPLTSGTGTGHQGLW

SEQ ID NO: 778 - protein, 81 aa, Gorilla sp.
EPGAVSFADVAVYFCREEWGCLRPAQRTLYRDVMRETYGHLSALGIGGKKPALISWVEEEAELWGPAAQDPEVAKCPTQTD

SEQ ID NO: 779 - protein, 81 aa, Bos indicus
SVTFEDVAVYFSWEEWALLDEAQRCLYHDVMLENFALTSSLGCWHGAEDKGAPSEKSISVEGVSQIKTLKADSCPQKGQPF

SEQ ID NO: 780 - protein, 81 aa, Muntiacus muntjak
SVMFSDVSIDFSLEEWEFLNLEQRDLYRDVMLENYSNLVSLGCFISKPDVISLLEQGKEPWKVVRQGRRQYPDLETNYEIK

SEQ ID NO: 781 - protein, 81 aa, Nomascus leucogenys
SYEGSVSFRDVAIDFSREEWRHLDLSQRNLYRDVMLETYSHLLSVGYQVPEAEVVMLEQGKEPWALQGERPRHSCPGEKLW

SEQ ID NO: 782 - protein, 81 aa, Ailuropoda melanoleuca
QSLVTFGDVAVDFSREEWEWLNSAQRTLHRDVMLENYRNLVSLGLCVSKPDMISSLEQRKEPWMLKRKLTRGRCPDLKTMQ

SEQ ID NO: 783 - protein, 81 aa, Bos indicus
EELPVVFEDVAVYFTREEWGALDKWQKELYRDVMQMNYELLASLGPAAAKPDLISKLERRAAPWIRDPHGPKLGKGRPPPG

SEQ ID NO: 784 - protein, 81 aa, Ailuropoda melanoleuca
RPRAVKFADVAVYFSPEEWGCLRPAQRALYRDVMRETYGHLGALGCAGPKPALISWLERNTDEWEPAALDPRECPRGVTVQ

SEQ ID NO: 785 - protein, 81 aa, Gorilla sp.
AQTLLTFRDVAIEFSLEEWKCLDLAQQNLYRDVMLENYRNLFSVGLTVSKPGLITCLEQRKEPWNVKRQEAADGHPAMSSC

SEQ ID NO: 786 - protein, 81 aa, Muntiacus muntjak
QAEVTFEDVAVLLSQEEWGLLGPSQKGLYREVMLETYRNLLSLGAGLADPKPEVIVQLERGDELWVLDMHGAEQPSVDGSA

SEQ ID NO: 787 - protein, 81 aa, Muntiacus muntjak
QILESLTFQDVAVDFTREEWDQLYPAQKNLYRDVMLENYRNLVALGHQLYKPEVITQLEQEERWMMGRVSPPDTHPDGENR

SEQ ID NO: 788 - protein, 81 aa, Gorilla sp.
KSMVTFEDVAVYFSQEEWELLDAAQRHLYHSVMLENLELVTSLGCWHGVEGEEAHPEQNVSVEVLQVRIPNADPSTKKANS

SEQ ID NO: 789 - protein, 81 aa, Gorilla sp.
MALVTFRDVAIDFSQKEWECLDTTQRKLYRDVMLENYNNLVSLGYSGSKPDVITLLEQGKEPCVAARDVTGRQCPGLLSRH

SEQ ID NO: 790 - protein, 81 aa, Lynx canadensis
LLQESLTLEDVAVDFTQEEWRLLAPAQKDLYRDVMLENFRNLVSVGYVASMPAALSRLERGGRWMTEDETRRGICPEIKKD

SEQ ID NO: 791 - protein, 81 aa, Gorilla sp.
AQESITLEDVAVDFTWEEWQLLGAAQKDLYRDVMLENYSNLVAVGYQASKPDALFKLEQGEQPWTIEDGIHSGACSDIWKV

SEQ ID NO: 792 - protein, 81 aa, Ailuropoda melanoleuca
SDEAFSFEDLSVDFTQKEWQLLNPGQKDLYKDVMLENYSSLVSLGYEIMKPDVIFKLEQGEEPWIGDGEVPSSGCPADMSY

SEQ ID NO: 793 - protein, 81 aa, Gorilla sp.
FQEPVTFEDVAVYFTQNEWASLHPTQRALYREVMLENYANVTSLSAFPFPKPDLIFQLEQGEAAWGPDPWTLAGGEALRGM

SEQ ID NO: 794 - protein, 81 aa, Bos indicus
AQEPVTFNDVAVDFTQEEWGQLDLVQRTLYRDVMLETYGHLLSVGNQITKPEVISLLEQGEEPWSMEPAYPLQGTCPAPEI

SEQ ID NO: 795 - protein, 81 aa, Bos indicus
HSEGRLTFQDVAIDFTQEEWECLDPGQRKLYRDVMVENYRNLASLGLVSKVDLVTFLELLKDPRNIRRMKTTAIYPAVSPQ

SEQ ID NO: 796 - protein, 81 aa, Muntiacus muntjak
EPVTFEDVAVYFSQNQWASLDSAQRALYREVMLENYANVASLVSPFPRPDLISQLERGEAPWDPNPWEAEDLRGICPGGER

SEQ ID NO: 797 - protein, 81 aa, Muntiacus muntjak
AQVCVTFDDVAVTFTQEEWGHLDPAQRTLYQEVMLETCGLLMSLGCPVPRPELIYQLEHGQELWTVKRDLSGSTCPVDKGK

SEQ ID NO: 798 - protein, 81 aa, Macaca fascicularis
MVSFEDVAVLLSQEEWDCLIPAQRGLYRDVMLETYGNLVSLGLQASKPDVISRLEQGDKPWTPHILRTQISWSWRHKRECY

SEQ ID NO: 799 - protein, 81 aa, Myotis lucifugus
DAVTFPDVAIDFSRDEWECLNLAQRTLYRKVMLENYRTLVSVGLCVSKPDVISLLEQGEEPWVTDGEMAGGLCPHSECVWM

SEQ ID NO: 800 - protein, 81 aa, Phascolarctos cinereus
AQELVTFQDVAVDFTQEEWGLLDHPQKELYKEVMLENARNALSLGLPVPREGLISHFGQREAPWMMELEDPRTSYPVSQKL

SEQ ID NO: 801 - protein, 81 aa, Phascolarctos cinereus
GEEAVTFRDVALDFTWEEWGCLSAAQRELYKDVMLENYRNLVSLAGLPGPKPGLISWLEGEEEPHPWDSLVHAARSTSLSK

SEQ ID NO: 802 - protein, 81 aa, Myotis lucifugus
AQEPLTFHDVAVDFTWEEWQLLDPEQKDLYRDVMLETYSHLVSVGYEASKPDILSKLDHGEAPWTVAGEIHCGTHSEIWKR

SEQ ID NO: 803 - protein, 81 aa, Puma concolor
FQASVVFEDVAVKFTPEEWALLDRGQRKLYRDVMLETCRNLSSVEKQKFHSNGDLTRMQEGLLRSPLVESVCERIEGDQCG

SEQ ID NO: 804 - protein, 81 aa, Lynx canadensis
AHRSLMFSDVSIVFSQEEWEYLDLEQRDLYRDVMLENYSNLVSLGCFISKPDVISLLEQGKEPWKVVRKGRRRYADLETRY

SEQ ID NO: 805 - protein, 81 aa, Phyllostomus discolor
PQKLVTFEDVAVYFTPTEWDGLSPAQRALYRDVMLENYGNVASLGFPILKPAVISQLEGGGELGIPSLLAAGVGSDPPGLW

SEQ ID NO: 806 - protein, 81 aa, Oryctolagus cuniculus
SLGPVSFKDVAVGFTQEEWRQLEPAQRRTYREVMLENYSHLVAVGCHFIKPDVITKLERGEEPWIEGGFLPQGCADEVWQA

SEQ ID NO: 807 - protein, 81 aa, Desmodus rotundus
SQSLVTFGDVAVDFSQEEWEQLTCAQRALYRDVMLENYRNLVSLGLCFSKPDMISSLEQREEPWMAKRKLTRGPCPDWRAV

SEQ ID NO: 808 - protein, 81 aa, Macaca fascicularis
VKESVTFKDVAIDFTLEEWRLMDPTQRNLHKDVMLENYRNLVSLGLAVSKPDMISHLENGKGPWPKPATKNATRTKDISED

SEQ ID NO: 809 - protein, 81 aa, Phascolarctos cinereus
WQESLTFKDVAVDFTQEEWGLLDHSQKRLYKEVMLENSQNLLSLGIPPLREDLISHLEEGEASWILDRKGPRKSCPDAETR

SEQ ID NO: 810 - protein, 81 aa, Phascolarctos cinereus
EELPVVFEDVAVYFTREEWAMLDKRQKELYRDVMRMNYELLASLGPAAAKPELISKLERRAAPWIKDPNGPKWGKGRPPGK

SEQ ID NO: 811 - protein, 81 aa, Sapajus apella
VHGSVTFRDVAIDFSQEEWECLQPAQKTLYRDVMLENYSHLISLGSSISKPDVITLLEQEKEPWMVRRKETNRWYPDLESK

SEQ ID NO: 812 - protein, 81 aa, Macaca fascicularis
CYQDSVTFDDVAVDFTQEEWTLLDPTQRSLYSDVMLENYKNLATVGGQIIKPSLISWLEQEESRTVRGGVLQGRKTQWRGT

SEQ ID NO: 813 - protein, 81 aa, Macaca fascicularis
FQGSVSFEDVTVGFSQEEWQHLDPSQRALYRDVMLENYSNLVSVGYCVHKPEVIFRLEQGEEPWRLEEEFPSQSFPEVWTA

SEQ ID NO: 814 - protein, 81 aa, Macaca fascicularis
AQESVTFEDVAVNFTNREWQSLTYAQRHLYKHVMLENYGNMVSLGFPFPKPPLISHLERGVEPCVQDPQDRESLSCSYPVS

SEQ ID NO: 815 - protein, 81 aa, Phascolarctos cinereus
VGHPVTFRDVAVDFSLEEWRCLSPAQRALYRDVMLENYENLVSVGLPVSKPTVISLLEKGEAPWMPQAGAPRGPCPDYLSW

SEQ ID NO: 816 - protein, 81 aa, Phascolarctos cinereus
AQELVTFQDVAVDFTEEEWGLLDHSQKELYKEVMLENAQNLLSLGLPVTREDLISFFQKGEAPWILEPKGPWNFCPDAVTR

SEQ ID NO: 817 - protein, 81 aa, Oryctolagus cuniculus
SQSLVEFGDVAIDFSQEEWEWLNPAQRTLYRKVMLENYRNLASLGLCGSKPAVISSLEQGKEPWAVKRKVARGWSPDLKTV

SEQ ID NO: 818 - protein, 81 aa, Muntiacus muntjak
APVTFGDLAIYFSQEEWEWLSPIQKDLYEDVMLENYQNLVSLGLCFRRPNVITLLERGKAPWMVDPVKRRRGLDLGSKGET

SEQ ID NO: 819 - protein, 81 aa, Macaca fascicularis
DTVVFEDVVVGFTLEEWALLNPAQRNLYREVMLETFKHLASVDNEAQPKTNGSISQQDTSGEKLSLKQKIEKFTRKHTWAS

SEQ ID NO: 820 - protein, 81 aa, Macaca fascicularis
MAFEDVAVYFSQEEWGLLDTAQRALYRHVMLENFTLVTSLGLSTSRPHVVIQLERGEEPWVPSGKDMTLARNTYRRLNAGE

SEQ ID NO: 821 - protein, 81 aa, Macaca fascicularis
RPESVTFEDVAVYFSENEWIGLGPAQRALYRDVMLENYGAVASLAFPFPKPALISQLERGEAPWCSVPWGALDGEDPRSIS

SEQ ID NO: 822 - protein, 81 aa, Puma concolor
LQVSVSFEDVTVNFSREEWQHLDPAQRRLYRDVTLENYSHLRSVGYQVPKPEVIFKLEQGEGPWTLEGETPHQSCSGEDIG

SEQ ID NO: 823 - protein, 81 aa, Phyllostomus discolor
CWGLLSFKDISMDFTWEEWQLLDSAQKYLYRDVILENYRNLVSVGYHGTKPDLIFKLEQGEEPWIRNAKISRPRCSEGWKE

SEQ ID NO: 824 - protein, 81 aa, Phascolarctos cinereus
LQGSVTFQDVAVDFSWEEWGHLGPAQKELYREVMLENYGNLVCLGLAVSSPDVVCQLERGEGPWMPEGDVPGSSCAGWETK

SEQ ID NO: 825 - protein, 81 aa, Macaca fascicularis
PQGLVTFGDVAVDFSQEEWEWLNPNQRNLYRKVMLENYKNLASLGLCVSKPDVISSLEQGKEPWTVKRKMTRAWCPDLKIV

SEQ ID NO: 826 - protein, 81 aa, Phascolarctos cinereus
PLELVTFKDVAVDFSWEEWGHLEPSQKELYREVMLENYRNLVCLGLAISKPDVIFQLEQGEAPWMPEREGPKCRCADWKTR

SEQ ID NO: 827 - protein, 81 aa, Myotis lucifugus
PQKSVTFEDVAVYFTPTEWDGLSPAQRALYRDVMLENYGNVASLGFPLIKPAVILQLEGGGELGGPSPLAAETGTDPPGLW

SEQ ID NO: 828 - protein, 81 aa, Ursus maritimus
AKGLLTFGDVAIEFSQEEWECLSHTQRELYRDVILENYGHLLFLGVIVSKPDLVSLLEQRKEPWGEKRNKTRIHVGKNPFG

SEQ ID NO: 829 - protein, 81 aa, Ailuropoda melanoleuca
QAEVTFEDVAVLFSREEWGRLGPAQRGLYRDVMLETYRNLVSLGAGPAGPKPGVITQLERGDEPWVLDTQGAKGKERLRVS

SEQ ID NO: 830 - protein, 81 aa, Sapajus apella
PQKLVTFEDVAVYFTQAEWDGLSPAQRILYRDVMLENYGNVASLGFPLLKPAVISQLEGGGELGAPSPLAAGTGLHGLRTV

SEQ ID NO: 831 - protein, 81 aa, Ailuropoda melanoleuca
QGLLTFGDVAIEFSQEEWRCLSHTQRELYRDVMLENYGHLLFLGLIVSKPDLVSLLEQRKEPWDVKRKKTVVFDPAVSSHG

SEQ ID NO: 832 - protein, 81 aa, Macaca fascicularis
GKELLSFEDVAMYFTREEWGRLDWGQKDLYRDVMLENYRNMVLLGFQFPKPEVICQLENWDEQWILDLPRAGSRKASGSAC

SEQ ID NO: 833 - protein, 81 aa, Macaca fascicularis
HQEMVTFEDVAVHFTKTEWTGLSPAQRALYRSVMLENFGNLTALGYPVPKPALISLLEGGDMAWGLEAQDDAPAERTKNIC

SEQ ID NO: 834 - protein, 81 aa, Phascolarctos cinereus
SQIPLTFQDVAVDFTWEEWGLLEPSQKDMYWDVMLENYENFVSLGGIPVSFPDVISQMERIEAPWMTERGVLVSAFLDSPN

SEQ ID NO: 835 - protein, 81 aa, Sapajus apella
KPGAVSFADVAVYFSPEEWGCLRPAQRALYRDVMRETYGHLGALGFPGPKPALISWMEQESEAWSSAAQDPEKGESLGGAR

SEQ ID NO: 836 - protein, 81 aa, Oryctolagus cuniculus
EALPVVFEDVAVYFTREEWGMLDKRQKELYRDVMRMNYELLASLGPAAAKPDLISKLERRTAPWIKDPNGPKLGKGCPPGK

SEQ ID NO: 837 - protein, 81 aa, Desmodus rotundus
LQVSVSFEDVTVDFSREEWQHLDPAQRRLYWDVTLENYSHLLSVGYQVPKPEVILKLEQGEGPWTLEGETPHQSCSDEDIG

SEQ ID NO: 838 - protein, 81 aa, Macaca fascicularis
MTFEDVSVEFTQGEWGQLNPAQKDLYREVMLENFRNLAFLGLPVSKPYVICQLEEGGEPFIVEREVSTGAYSDWERRSKSK

SEQ ID NO: 839 - protein, 81 aa, Phascolarctos cinereus
PQASVTFEDVAVYLTQEEWGHLEPAQRGLYRDVMLENYGNVVSLGFPVSKPDVILQLELRGEPWFLDMQGTEGREILRDCE

SEQ ID NO: 840 - protein, 81 aa, Phascolarctos cinereus
QQGSVTFRDVAVDFTLEEWGHLDPFQKELYRDVMLENFRNLVCLGLTVSKPDVIHQLEQGEAPWIPEGESPRNSFAGCASD

SEQ ID NO: 841 - protein, 81 aa, Myotis lucifugus
VKFADVAVYFSPEEWGCLRPAQRALYRDVMRENYGHLGALGCAGPKPALISWLERNTEDWEPAALDPQDCPRGLMVQRKWP

SEQ ID NO: 842 - protein, 81 aa, Macaca fascicularis
FQGSVTFEDVAIAFSQQEWESLDSSQRGLYRDVMLENYRNLVSMAGHSLSKPHVIALLERWKEPKVTERKDGRRWCTDLQL

SEQ ID NO: 843 - protein, 81 aa, Phascolarctos cinereus
PQESVTFRDVAVDFTWEEWGQLDPSQKELYREVMLENYGNLACLGLAVSKPDVILQLERGEIPWMSERKVPEGICPDWEAR

SEQ ID NO: 844 - protein, 81 aa, Phascolarctos cinereus
LRESVTFKDVAVDFTGEEWRRLDPAQRALYRDVMLENYENLVSLGLPVSKLDVISLLERGEAPWWLEGGGLQSPCSDALSQ

SEQ ID NO: 845 - protein, 81 aa, Puma concolor
QAEVTFEDVAVLFSREEWGRLGPTQRGLYRDVMLETYRNLVSLGAGRAGPKPGVITQLERGDEPWVLDAQGAKGKGRPRVS

SEQ ID NO: 846 - protein, 81 aa, Oryctolagus cuniculus
SPESVAFEDVAVYFTKKEWASLLPAQRALYKEVMLENYGMVASLAPPPISKPALISQLEQGKEPWFTRPQGALNRRARRVV

SEQ ID NO: 847 - protein, 81 aa, Phyllostomus discolor
SRKPVSFADVAVYFSPEEWGCLRPVQRALYRDVMRETYGHLGALGFQDTKPALISWMEEEAELWGSDARDPELGECLSEDT

SEQ ID NO: 848 - protein, 81 aa, Macaca fascicularis
KPRTVSFADVAVYFSREEWGCLRPAQRALYRDVMRETYGHLGALGFPGPKPALISWMEQETEAWSPAAQDPEKGERLGGAR

SEQ ID NO: 849 - protein, 81 aa, Phascolarctos cinereus
CKESVTFKDVAVEFTWEEWVHLNSSQKTLYRDVMLENYRNLVSLGFAVSKPDVIYQLERKEASWIPGADIPRSSCPESKEF

SEQ ID NO: 850 - protein, 81 aa, Myotis lucifugus
FQGSVTFRDVAIDFSQEEWAWLQPAQRDLYRHVMLENYGHLVSLGLNISKPDVVSLLEQGKEPWLGKGDVRTDFFPVSESN

SEQ ID NO: 851 - protein, 81 aa, Sapajus apella
SQDLVTFKDVAIDFSQEEWQWMNPAQKRLYRSMMLENYQSLVSLGLCVSKPYVISLLEQGREPWEMTSEMTRSPFSDWESI

SEQ ID NO: 852 - protein, 81 aa, Ailuropoda melanoleuca
QEPVTFEDVAVYFTQNQWAKLDPTQRALYREVMLENYANVASLGVAFPFPKPDLVSQLERGEVPWGPDPWEAEVLRGICPG

SEQ ID NO: 853 - protein, 81 aa, Sapajus apella
FQGSISFKDVTVGFTQEEWQHLDPSQRALYRDVTLENYSNLVSVGYCVHKPEVIFRLEQGEEPWRLEEEFPSQSFPEVWTA

SEQ ID NO: 854 - protein, 81 aa, Phascolarctos cinereus
PQEPVTFKDVAVDFSQEEWGLLGPAQRHLYRDVMLENYRNLVSLGLILAKPEVVCHLEQGGELWKPEHGVLCSGDGELWVR

SEQ ID NO: 855 - protein, 81 aa, Puma concolor
PQEPVTFEDVAVLFTPEEWMFLDSAQRSLYRDVMLENYRNLASVGDQLGKFSSFSHLEQGEEWWPTERRVFPGSCPEPSLP

SEQ ID NO: 856 - protein, 81 aa, Macaca fascicularis
SQGSVTFRDVAIDFSQEEWKWLQPAQRDLYRCVMLENYGHLVSLGLSISKPDVVSLLEQGKEPWLGKRNVNRDLFSVSESS

SEQ ID NO: 857 - protein, 81 aa, Phascolarctos cinereus
QQGSVTFQDVAVDFSWEEWGHLGPTQKELYREVMLENYGNLVCLGLAVSSPDVVCQLERGEGPWMPEGDAPGSSRAGSSKH

SEQ ID NO: 858 - protein, 81 aa, Phascolarctos cinereus
TQDSVTFKDVAVDFTREEWERLNSTQRDLYRDVMLENYRNLVSLGLAVSKPDIIFQLEQEKELWMLKRKVLRSTRPAQKTE

SEQ ID NO: 859 - protein, 81 aa, Gorilla sp.
RPGAVSFADVAVYFSPEEWECLRPAQRALYRDVMRETFGHLGALGFSGPKPAFISWVEGEVEAWSPESQDPDGESSAAFSR

SEQ ID NO: 860 - protein, 81 aa, Ailuropoda melanoleuca
LQGLLTFRDVAIEFSQEEWGCLSHTQRELYRDVMLENYGHLLFSGLIASKPDLVSCLEQKKEPWDLKRKKTVAIHPVYELK

SEQ ID NO: 861 - protein, 81 aa, Phascolarctos cinereus
RQGSVTFQDVAVDFSWEEWGRLGPTQKELYREVMLENYRNLVCLGLEVSKPDVVYQLERGEAPWMPEGAVRRSCSQNWGAR

SEQ ID NO: 862 - protein, 81 aa, Phascolarctos cinereus
SAASVTFRDVAVDFSREEWSRLDAAQRALYRDVMWETYENLVSTGIPVSRLDVISLLAKQEAQWTPEEVPGWTSPDSFSEE

SEQ ID NO: 863 - protein, 81 aa, Puma concolor
SWASVVFEDVAVNFTPEEWALLNRGQRKLYRDVMLETCRNLSAVEKRKFHSSGDLTRMQEGLLRSPLVESVCERIEGDPCG

SEQ ID NO: 864 - protein, 81 aa, Lynx canadensis
AHGLVMFKDVAIDVSQEEWECLNPTQRSLYKDVMLENYSNLVSLGLSISKPAVISSLEQGKEPWMVVREVTGEQCPDLVSR

SEQ ID NO: 865 - protein, 81 aa, Macaca fascicularis
SYEGSVSFRDVAINFSREEWQHLDLSQRNLYRDVMLETCSHLLSVGYQVPKPEVVMLEQGKEPWALQGERPRQSCPGEKLW

SEQ ID NO: 866 - protein, 81 aa, Phascolarctos cinereus
GEEAVTFRDVALDFTWEEWGCLSAAQRELYKDVMLENYRNLVSLGLPGPKPGLISWLEGEEEPHPWDSLVHAARSTSLSKA

SEQ ID NO: 867 - protein, 81 aa, Phascolarctos cinereus
HQGSVTFGDVAVDFSQDEWGHLDPAQKELYREVMLENYGNLVCLGLAVSRPHVIEQLERGEAPWLPRGAVPRSCDLDWMTR

SEQ ID NO: 868 - protein, 81 aa, Phascolarctos cinereus
QASVTFRDVAVDFTGEEWRCLEPAQRALYRDVMLETYENLVFLGLSVPISKLDLIFLLERGGALSRPMGRVPSDSCPDSFI

SEQ ID NO: 869 - protein, 81 aa, Oryctolagus cuniculus
QAQEVLMFDDVAVRFTWEEWQLLNPAQKALYRDVMLENYRSLVSVGWRASKPDLLSQLERGEPWTIEGENHCGTPPEIWKA

SEQ ID NO: 870 - protein, 81 aa, Ailuropoda melanoleuca
RPGAVSFADVAVYFSPEEWGCLRPAQRALYRDVMRETYGHLGALGFAGPKPALISWLERKKEVWSPEAEDPEEGARHPGSG

SEQ ID NO: 871 - protein, 81 aa, Macaca fascicularis
AQESVMFSDVSIDFSQEEWECLNDDQRDLYRDVMLENYSNLVSMGHSISKPNVISYLEQGKEPWLVDRELTRGQWPVLESR

SEQ ID NO: 872 - protein, 81 aa, Phascolarctos cinereus
SQESLTFKDVAVDFTPEEWGQLYPAQRDLYREVMLENYRNLVSLGHQVSKPHLISQLEQRKEPWMMERKIPRGNFPDWETR

SEQ ID NO: 873 - protein, 81 aa, Sapajus apella
SQGLVTFGDVAIDFSQEEWEWLSPIQRNLYRKVMLENYRNLASLGLCVSKPDVISLLEQGKEPWTVKRRMTRAGCPDLKAV

SEQ ID NO: 874 - protein, 81 aa, Sapajus apella
AQESVTFEDVAVNFTDREWQCLTYAQRHLYKDVMLENYGNMVSVGFLFPKPPLISHLERGVEPCVQDPQDRESLSCSCLVS

SEQ ID NO: 875 - protein, 81 aa, Lynx canadensis
KPGALSFADVAVYFSSEEWGCLRPAQRALYRDVMRETYGHLGALGFAGPKPALISWMERKKEAWSPEAEDPEDRASRIRAK

SEQ ID NO: 876 - protein, 81 aa, Phyllostomus discolor
SQPPVSFKDVVVSFTREEWGQLDTVQRTLYRDVTLETCGHLVSLGLLLPNLDVISHLENGEDPWRAEQEPPTQDWKTTLEK

SEQ ID NO: 877 - protein, 81 aa, Phascolarctos cinereus
PQESVTFEDVAVDFTWEEWGYLDTSQKELYWEVMLENYKNLVSLGFVVAKPDAISQLEQEEAPWRPEVLFPRSSCSDLDTK

SEQ ID NO: 878 - protein, 81 aa, Phascolarctos cinereus
QEDPVTFQDVAVVFTQEQWGYLDPSQKELYRDVMLENYQNLLCLGLAVSKPEVICQLEQGEAPWRPEGRVPGSSHPDGEVR

SEQ ID NO: 879 - protein, 81 aa, Sapajus apella
SQELLTFKDISIDFTQEEWGQLTPAHQNLYREVMLENYSNLVSVAGYQLSKPVVISQLEKGEEPWMTEKEGPGDPSSDLKS

SEQ ID NO: 880 - protein, 81 aa, Macaca fascicularis
KPRTVSFADVAVYFSREEWGCLRPAQRALYRDVMRETYGHLGALGVGGSKPALISWVEEEAELWDPAAQDPEVTKCPTETD

SEQ ID NO: 881 - protein, 81 aa, Lynx canadensis
RPESVTFEDVAVYFSENEWIGLAPAQRVLYRDVMLENYGVVASLAFPFPKPALISQLERGEAPWCKAPQGALDGECPRGVS

SEQ ID NO: 882 - protein, 81 aa, Macaca fascicularis
KPGAVSFADVAVYFSPEEWGCLRPAQRALYRDVMRETYGHLGALGFPGPKPALISWMEQETEAWSPAAQDPEKGERLGGAR

SEQ ID NO: 883 - protein, 81 aa, Phascolarctos cinereus
PQEAVTFKDVVVDFTQEEWKCLDSSQKEFYRDVMLENYSNLVSLGLAFPKPYVIDQLERREAPWIPEGDIPRISHPERKKK

SEQ ID NO: 884 - protein, 81 aa, Phascolarctos cinereus
PRGLVTFKDVAVDFTQEEWGLLDHNQKELYKEVMLENARNLLSLGLPVPREDVISYFEQREAPWMLEQEGLRSRCLEGEIR

SEQ ID NO: 885 - protein, 81 aa, Phascolarctos cinereus
GQESVTFTDVAVDFTLEEWAYLDHFQKELYKDVMLENYRNLLCLGLAVSKPDVISQLEQGDAPWMSEGGVPRSIYSDWETR

SEQ ID NO: 886 - protein, 81 aa, Canis lupus
SHGPLSFEDVAVAFTKEEWQQLDPAQRTLYRDVMLENFSHLVSLGHPVSKPDVISKLEQGEEPWIIKRDIPNWIYPERENR

SEQ ID NO: 887 - protein, 81 aa, Macaca fascicularis
ALRSVMFSDVSIDFSPEEWEYLDLEQKDLYRDVMLENYSNLVSLGCFISKPDVISLLEQGKEPWKVVRKGRRQYPDLETKY

SEQ ID NO: 888 - protein, 81 aa, Ailuropoda melanoleuca
SKVPVTFGDLAIYFSQEEWEWLSPIQKDLYEDVMLENYQNLVSLGLSFRRPNVITLLEKGKAPWMVEPVRKRRGVDSGSKC

SEQ ID NO: 889 - protein, 81 aa, Lynx canadensis
RPRAVKFADVAVYFSTEEWGCLRPAQRALYRDVMRETYGHLGALGCAGPKPALISWLERNTDDWEPAALDPQECPRGVAVQ

SEQ ID NO: 890 - protein, 81 aa, Phascolarctos cinereus
MQESVTFKDVAVDFTQEEWKQLDPAQRDLYRDVMLENYRNLVSLGLPVFKPDVISQLEKGEAPWTPEVPRSTCSGSFSQEA

SEQ ID NO: 891 - protein, 81 aa, Bos mutus
KPLAVRFADVAVYFSPEEWGCLRPAQRALYRDVMQETYGHLGALGFPGPKPALISWMEQESEAWSPAAQDPEEGESLGGAL

SEQ ID NO: 892 - protein, 81 aa, Muntiacus muntjak
PQEPVTFADVAVLFTPEEWLFLDSAQKSLYRDVMLENYRNLASVGDQLCKTRMSSHMEQREELCVTERGVFPGAHLGPHLQ

SEQ ID NO: 893 - protein, 81 aa, Phascolarctos cinereus
FQESVTFKDVAVDFTWEEWGYLDTSQKELYWEVMLENYRNLVSLGLADSNVNMISQLESGEAHGISVDSVLRSCWPDGDTR

SEQ ID NO: 894 - protein, 81 aa, Lynx canadensis
GPWTLLTFRDVAIEFSQEEWGCLNHSQRELYRDVMLETYGHLLFLGLVSKPDLVILLEQKKELWGVKRKETVASHPGRWEI

SEQ ID NO: 895 - protein, 81 aa, Macaca fascicularis
FQGSVTFEDVAIAFSQQEWESLDSSQRGLYRDVMLENYRNLVSMGHSLSKPHVIALLERWKEPKVTDRKDGRRWCTDLQLE

SEQ ID NO: 896 - protein, 81 aa, Phascolarctos cinereus
QNPVTFRDVAVDFSLEEWKCLSPAQRALYRDVMLENYENLASVGPRLPFSKPYVISQLERGEAPWMPEEEVPRDHWPDLFN

SEQ ID NO: 897 - protein, 81 aa, Phascolarctos cinereus
SQIPLTFQDVAVDFTWEEWGLLEPSQKDMYWDVMLENYENFVSLGGLPICLPDVISRMERIEAPWMAEGGVLVSTFLGSLS

SEQ ID NO: 898 - protein, 81 aa, Myotis lucifugus
LQESVTFKDVAVLFTQDEWAQLSPAQRALYRDVMLENYSHLVSLGLLGPKPDLFAQLGKGEEWTPEDTSRGFCLDWMTIPV

SEQ ID NO: 899 - protein, 81 aa, Puma concolor
EELPVVFEDVAVYFTREEWGMLVKRQKELYRDVMRMNYELLASLGPAAAKPDLILKLERRAAPWIKDPNGPKWGKGRPPGK

SEQ ID NO: 900 - protein, 81 aa, Ailuropoda melanoleuca
EELPVVFEDVAVYFTREEWGMLVKRQKELYRDVMRMNYELLAALGPAAAKPDLISKLERRAAPWIKDPNRPKWGKGRPLGK

SEQ ID NO: 901 - protein, 81 aa, Ailuropoda melanoleuca
MTFEDVAVEFTQWEWGQLDPAQQDLYREVMLENFKNLASLGLPVSKPYVITQLEEGKDPCVLDGEISTEYLSPPPDWEKRP

SEQ ID NO: 902 - protein, 81 aa, Phyllostomus discolor
IGSDLFRDVAVVFSREEWEQLTPAQRDLYRDVMLEIYSILLSLGPDLAVSKPDVISFLEQGKEPWRVEEAVTGGLCPVLES

SEQ ID NO: 903 - protein, 81 aa, Phascolarctos cinereus
ARGPVSFADVAVYFSPEEWGRLRPAQRALYRDVMRETYGHLGALGFPGPKPALMCWMDEETEVWGPDARDPEEAGEKGTEN

SEQ ID NO: 904 - protein, 81 aa, Phascolarctos cinereus
QDLVTFKDVSVDFTREEWMRLDHPQRALYRDVMLENYRNLVLVSLGHPISKPDVISRLEQGGVPWVLKKGATGRAFSDRET

SEQ ID NO: 905 - protein, 81 aa, Phascolarctos cinereus
PQESVTFKDVAVDFTWEEWGYLDTSQKELYWEVMLENYRNLVSLGLADSNVDMISQLESGEAQGIPVDSVLTSCWPDGDRR

SEQ ID NO: 906 - protein, 81 aa, Lynx canadensis
AQKSLTLEDVAVDFSREEWRLLAPAQKDLYRDVMLENYRNLVSVGHQASKPDVLAKLERGEEPWAIEEEVRSGTSPETGKV

SEQ ID NO: 907 - protein, 81 aa, Phyllostomus discolor
SPTLVTFKDIHVNFTREEWNLLDAAQQIMYKDVMLENYKNLVSVGHQLPKPDVILQLEKGEEPWLVERGVRQDTRPDWDTA

SEQ ID NO: 908 - protein, 81 aa, Phyllostomus discolor
YKESVMFRDVAVDFSQEEWECLDPAQRDLYRDVMLENYSNLLSMGLYIPKPQVISLLEQGKEPWMVGRELTRGLCSDLESM

SEQ ID NO: 909 - protein, 81 aa, Canis lupus
SLESDLFRDVAVVFSQEEWEQLVPTQRDLYRDVMLETYNNLVSLGLAISKPDVISFLEQGKEPWMVEKAATGGLCPVLESR

SEQ ID NO: 910 - protein, 81 aa, Lynx canadensis
LQGLLTFRDVAIEFSQDEWGCLNQSQRELYRDVMLETYGHLLFLGLIVSKPHLVIFLEQKRELWDVKRKKTVRTQKGENTS

SEQ ID NO: 911 - protein, 81 aa, Bos mutus
LQVSVSFEDVTVDFSREEWQHLDSAQRRLYQDVMLENYSHLLSLGYEVPKPEVIFKLEQGEEPWALKEKTLHHSCSDDTTL

SEQ ID NO: 912 - protein, 81 aa, Canis lupus
RPGAVSFADVAVYFSPEEWGCLRPAQRALYRDVMRETYGHLGALGFADAKPVLIAWLERKAEVWTPEAEDPEEGARHPGSG

SEQ ID NO: 913 - protein, 81 aa, Muntiacus muntjak
LQDLVTFKDVTVEFNQEEWALLDSSQQKLYRDVMLENYGNLASLGYHVDKPSLISQLEQEDKVMTEEGGILPGTCPDLETV

SEQ ID NO: 914 - protein, 81 aa, Muntiacus muntjak
QAGSDLFRDVAVVFSQEEWEQLAPTQRDLYRDVMLETYSNLVSLGLAVSKPDVISFLEQGKEPWTVEGVATGGLCPVLKSR

SEQ ID NO: 915 - protein, 81 aa, Ailuropoda melanoleuca
QGLVSFKDVAVDFTQEEWQQLDPAQRTLYRDVMLENFSHLVSIGYAVSKPDVISKLEQGEDPWIIKRDIPNWIYPDENQAD

SEQ ID NO: 916 - protein, 81 aa, Lynx canadensis
SQGLVSFKDVAVDFTQEEWQQLDPAQRTLYRDVMLENFSHVISLGYPVSKPDVISKLEQGEDPWIIKRDVSNWIYTDENQA

SEQ ID NO: 917 - protein, 81 aa, Lynx canadensis
AQGLVTFRDVAIEFSQEEWKCLEPAQRNLYRDVTLENFSNLVSLGLSISKPDLISLLEQGREPWMIANDMTGPWCPELESR

SEQ ID NO: 918 - protein, 81 aa, Lynx canadensis
GKPGALSFADVAVYFSSEEWGCLRPAQRALYRDVMRETYGHLGALGEARPPALISWMERKKEAWSPEAEDPEDRARHPGYG

SEQ ID NO: 919 - protein, 81 aa, Bos indicus
VQGSVSFEDVAVGFSQEEWQILGPSQKALYWDVMLENYCNLVSVGYQAPTPNSLFQLEQGGPPWTVEGAALSPTCSGKKLY

SEQ ID NO: 920 - protein, 81 aa, Muntiacus muntjak
RKRGSLTLEDVAVDFTWEEWQLLAPAQKALYRDVMLENYGNLVFVGYQASKPAALSRLERGEPWPVEDEVHSQLCPEMRKD

SEQ ID NO: 921 - protein, 81 aa, Desmodus rotundus
SVAFRDVIVDFTQEEWQQLKPAQKDLYRDVMMENYWNLVSLDLETRPDKKESDPQEDDWEDRPSIAVVAEGPMRTGDQGCI

SEQ ID NO: 922 - protein, 81 aa, Muntiacus muntjak
QPDLVTFGDVAVDFSQEEWEWLNPAQRSLYRTVMLDNYRSLVSLGVSASKPDVISLLEQGKEPWLVKEEGPRGARPDSSPT

SEQ ID NO: 923 - protein, 81 aa, Ailuropoda melanoleuca
QEPVTFEDVAVYFTQNQWAKLDPTQRALYREVMLENYANVASLVAFPFPKPDLVSQLERGEVPWGPDPWEAEVLRGICPGG

SEQ ID NO: 924 - protein, 81 aa, Lynx canadensis
GPWTLLTFRDVAIEFSQEEWGCLNHSQRELYRDVMLETYGHLLFLGLVSKPDLVILLEQKKELWGVKRKETVGCQFEGHVT

SEQ ID NO: 925 - protein, 81 aa, Desmodus rotundus
SVTFRDVIVDFTQEEWEQLKPVQKDLYRDVMMENYWNLVSLDLETEGDMNDPDPEKDSWEDRPSVTSSMPAPPRLEGPRGA

SEQ ID NO: 926 - protein, 81 aa, Macaca fascicularis
IWDLVMFRDVAVDFSQEEWECLNSYQRNLYRDVILENYSNLVSLGCSISKPDVITLLEQGKEPWMVMRDEKRRWTLDLESR

SEQ ID NO: 927 - protein, 81 aa, Phascolarctos cinereus
SQESVTFQDVAVDFTREEWKRLDSAQRDLYRDVMLENYQNLVSLGLLVFQSDVISQLENGEVPLVPGGEVPRGTRPGSVNQ

SEQ ID NO: 928 - protein, 81 aa, Phyllostomus discolor
MMGLVTFEDVAVDFTQEEWQYLNPPQRILYRGVMMETYRNLVFVAGQQATKPDLILKMEVEEPYLAEDKIPIWSCPEEACQ

SEQ ID NO: 929 - protein, 81 aa, Ailuropoda melanoleuca
LQESVTFRDVAVFFSQDEWLRLDSAQRTLYREVMLENYGTLVSLGIPFSTPKVICQLQQGEDPCVVDRELPQDAWPGLKTQ

SEQ ID NO: 930 - protein, 81 aa, Ailuropoda melanoleuca
KQGGVTFEDVAVYFSQEEWSLLNEAQRRLYHDVMLENFALISSLGCCCRAEAVETPFEQSISVGVSQAKTPKEPRSSQKTH

SEQ ID NO: 931 - protein, 81 aa, Lynx canadensis
SQGSVTFRDVAIDFSQEEWEWLQPTQRDLYRHVMLENYSHLVSLGLNISKPYVVSLLEQGKEPWLEKRGVRRNLFSEPNRE

SEQ ID NO: 932 - protein, 81 aa, Lynx canadensis
KPGAVSFADVAVYFSPEEWGCLRPAQRALYRDVMRETYGHLGALGFRGTKPALISWVEEEADLWGPDARDPEVGECLTAAD

SEQ ID NO: 933 - protein, 81 aa, Muntiacus muntjak
GLLSFEDVALYFTREEWDTLDWAQKALYRDVMLDNYRHIVSLGFPFPKPEVICQLEQWEEPWILDLPRAGTRKASGSACPD

SEQ ID NO: 934 - protein, 81 aa, Ailuropoda melanoleuca
TVGSVMFSDVSVDFSQEEWECLDPGQRDLYRDVMLENYSNLLSMGLYIPKPQVISLLEQGKEPWMVGRELTRGLCSDLESM

SEQ ID NO: 935 - protein, 81 aa, Lynx canadensis
SKVPVTFGDLAIYFSQEEWEWLSPIQKDLYEDVMLENYQNLVSLGLSFRRPNVITLLEKGRAPWMVEPVRKRRGLDSRSKY

SEQ ID NO: 936 - protein, 81 aa, Gorilla sp.
KPGAVSFADVAVYFSREEWGCLRPAQRALYRDVMRETYGHLGALGVGGSKPALISWVEEKAELWDPAAQDPEVAKCPTEAD

SEQ ID NO: 937 - protein, 81 aa, Ailuropoda melanoleuca
PQKSVTFEDVAVYFTQTEWDGLSPAQRALYRDVMLENYGNVASLGFSLLKPAVISQLEGADELEGPSPLVAGTEIGPQGLW

SEQ ID NO: 938 - protein, 81 aa, Gorilla sp.
RQEPVTFEDVAVYFTQNEWASLDSVQRALYREVMLENYANVASLAFPFITPVLVSQLEQGELPWGLDPWEPMGREALRGIC

SEQ ID NO: 939 - protein, 81 aa, Acinonyx jubatus
LQGSLSFEDVTVGFSQEEWQRLDPAQRTLYRDVMLENYSHLVAVGCCVPKPDVIFRLEQGQQPWLVEEESLDQSCPEVCRV

SEQ ID NO: 940 - protein, 81 aa, Macaca mulatta
KEKLVTFEDVAVYFTQAEWDGLSPAQRTLYRDVMLENYGNVASLGFPLLKPAVISQLEGGGELGGPSPLAAGTGLWGLRTG

SEQ ID NO: 941 - protein, 81 aa, Odocoileus virginianus
PQESVTFEDVAVNFSYEEWQCLTHAQRHLYTDVMLENYGNMVSLGFSFSKPPLISRLEQGTEPYVQDRQDWEFLNCSYPAA

SEQ ID NO: 942 - protein, 81 aa, Odocoileus virginianus
VTELLTFKDISVDFTQEEWGQLAPAHRNLYREVMLENYGNLVSVAGCQLSKPSVISQLEKGEEPWMTEKEGAGDPSSDLKS

SEQ ID NO: 943 - protein, 81 aa, Sapajus apella
FQESVAFEDVAVYFTQNQWGSLDPAQRALYSEVMLENYANVASLVAFPFPKPALISHLEKGEAPWGPDPWDAEIPSGINQG

SEQ ID NO: 944 - protein, 81 aa, Acinonyx jubatus
YTLESLTLEDVAVDFTQEEWRLLAPAQKDLYWDVMLENFRNLVSVGYVASMPAALSRLERGGQWMTEDETRHWICPEIKKD

SEQ ID NO: 945 - protein, 81 aa, Rhinopithecus roxellana
SLESELFRDVAIVFSQEEWQCLAPAQRDLYRDVMLETYSNLVSLGLAISKPDVISFLEQGKEPWMVERVVSGGLCPVLKYR

SEQ ID NO: 946 - protein, 81 aa, Rhinopithecus roxellana
FQEAVTFKDVAVAFTEEELGLLDPAQRKLYRDVMLENFRNLVSVGHQSFKPDMISQLEREEKLWMKEFQTQRGKHSGDRNL

SEQ ID NO: 947 - protein, 81 aa, Cebus imitator
PQESVAFDDVAVYFTKKEWAIMVPDQRALYRDVMLENYEAVAFVAVPPTSKPALVSHLEQGKEPCFTQPQGVLSRRDWRAG

SEQ ID NO: 948 - protein, 81 aa, Callithrix jacchus
PQVSLTFEDVAVLFTRDEWRKLAPSQRNLYRDVMLENYRNLVSLGLPFTKPKVISLLQQGEDPWKVEKDCFGGSFLGCKSN

SEQ ID NO: 949 - protein, 81 aa, Rhinopithecus roxellana
SCEGSVSFRDVAINFSREEWQHLDPSQRNLYRDVMLETYSHLLSVGYQVPEAEVVMLEQGKEPWALQGERPRQSCPGEKLW

SEQ ID NO: 950 - protein, 81 aa, Cebus imitator
SYEGSVSFRDVAIDFSREEWRHLDLSQRNLYRDVMLETYSHLLSVGYQVPEAEVVMLEQGNEPWALQGERPHQSCPGEKLW

SEQ ID NO: 951 - protein, 81 aa, Cebus imitator
GPLTFRDVTIEFSHEEWKCLDPAQKALYKDVMLENYRNLVFLGITPKCTTKELPPIGNNNTGEKFRTVTLERHECYDIEDI

SEQ ID NO: 952 - protein, 81 aa, Callithrix jacchus
EMEPLTFRDVAIEFSLEEWQCLNPAQQDLFRNVMLENYRNLVFLGIAASKPDLITCLEKAKEPWKMKQHEMVDEPPGASTF

SEQ ID NO: 953 - protein, 81 aa, Macaca mulatta
SVAFEDVAVNFTQEEWSLLDPSQKNLYREVMQETLRNLASIGKKWKDQNIENEYKNPRSNQRGLMEERLFESEGHQPGEIL

SEQ ID NO: 954 - protein, 81 aa, Cebus imitator
SKAPITFGDLAIYFSQEEWEWLSPIQKDLYEDVMLENYRNLVSLGLSFRRPNVITLLEKGKAPWMVEPARRRRGPELTEAS

SEQ ID NO: 955 - protein, 81 aa, Bos taurus
MKLGSVTFEDVAVYFSWEEWALLDEAQRCLYHDVMLENFALTSSLVVSSSSHTIAQLGLGEESFVLPRMHMIPLSTRWAQR

SEQ ID NO: 956 - protein, 81 aa, Rhinopithecus roxellana
PQESVAFEDVAVYFTTKEWAIMMPAERALYRDVMLENYEAVAFVVPPTSKPALVSHLEQGKESCFIQPQGVLSRSDWRAGL

SEQ ID NO: 957 - protein, 81 aa, Callithrix jacchus
SQGSVTFRDVAIDFSQEEWKWLQPAQRDLYRCVMLENYGHLVSLGLSISKPDVVSLLEQGKEPWLGKRDVKRDLFPALSPQ

SEQ ID NO: 958 - protein, 81 aa, Callorhinus ursinus
QQRPVSFKDVVVGFTQEEWHRLNPAQRALYRDVMLETYSNLVSVGYEGTKPYVILKLEQEEAPWICEAACSGCHCQENICQ

SEQ ID NO: 959 - protein, 81 aa, Acinonyx jubatus
LQVSVSFEDVTVNFSREEWQRLDPAQRRLYRDVTLENYSHLRSVGYQVPKPEVIFKLEQGEGPWTLEGETPHQSCSGEDIG

SEQ ID NO: 960 - protein, 81 aa, Acinonyx jubatus
NSQGLLTFRDVAIEFSQEELRCLNHSQWELYRDVMFENYGHLLFLGLVVSKPDLVIFLEQKKDVWAVKRKETVATHPGRWE

SEQ ID NO: 961 - protein, 81 aa, Sapajus apella
AQKVLTFRDVAIEFSLEEWKFLDPAQQNLYRDVMLENYRNLFSIGLTVSKPGLITCLEQRKAPWNLKRREAVDGHPAMSSH

SEQ ID NO: 962 - protein, 81 aa, Sapajus apella
MAHLMFRDVAIDFSQEEWEGLDLKQRDLYRDVMLENYSNMVSLGLCIYQPDVFSLLEKGKEPWKILRDETRGPCPDMQSRC

SEQ ID NO: 963 - protein, 81 aa, Acinonyx jubatus
KPGALSFADVAVYFSSEEWGCLRPAQRALYRDVMRETYGHLGALGFAGPKPALISWMERKKEAWSPEAEDPEDRARHPGYG

SEQ ID NO: 964 - protein, 81 aa, Rhinopithecus roxellana
MAFEDVAVYFSQEEWGLLDTAQRALYRRVMLDNFALVASLGLSTSRPRVVIQLERGEEPWVPSGTDTVLSRNTYRRRNPGS

SEQ ID NO: 965 - protein, 81 aa, Bison bison
FQGSVTFRDVSIDFSQEEWEWLQPAQRDLYRHVMLENYGHLVSLGLNMSKPDVVSLLEQGKEPWLGNGDVSRELFPASKSN

SEQ ID NO: 966 - protein, 81 aa, Cebus imitator
VQEPVTFKDVAVDFTQEEWGQLDLVQRTLYRDVMLETYGHLLSVGNQIAKPEVISLLEQGEEPWSVEQTCPQRACPEWMRN

SEQ ID NO: 967 - protein, 81 aa, Ovis aries
PQEPVTFADVAVLFTPEEWLFLDSSQKSLYRDVMLENYRNVASVGDQLCKTRMSSHLEQREELCVTERGIFPGAHLGPHLQ

SEQ ID NO: 968 - protein, 81 aa, Callithrix jacchus
PLGSELFRDVAIVFSQEEWQWLAPAQRDLYRDVMLETYSNLVSLGLAISKPDVISFLEQGKEPWMVERVVAGGLCPVLESR

SEQ ID NO: 969 - protein, 81 aa, Ovis aries
AHMSLSFRDVAIDLSQEEWECLDPVQRALYRDVMLENYSNLVSLGCSTPKPDMITLLEQEKEPWMIMREGTGSWFTGLESK

SEQ ID NO: 970 - protein, 81 aa, Ovis aries
AQVSVTFDDVAVTFTQEEWGHLEPAQRTLYQEVMLETCRLLMSLGCPVPRPELIYQLEHGQELWTVKRDLSRSTCPGYSSE

SEQ ID NO: 971 - protein, 81 aa, Vulpes vulpes
SQELVAFEDVLVDFTPEEWQYLNSSQKTLYREVMLETYSNLVSVAGQQDTKPDLILKLELEGPCLAERKISVWSFPEEACQ

SEQ ID NO: 972 - protein, 81 aa, Acinonyx jubatus
KPGALSFADVAVYFSSEEWGCLRPAQRALYRDVMRETYGHLGALGCAGPKPALISWLERNTDDWEPAALDPQECPRGVAVQ

SEQ ID NO: 973 - protein, 81 aa, Bison bison
LQGGVTFEDVAVDFTQEEWQRLSPEQRDLYRDVTLENYRNLVSMGEQDSTKPEVILRLENGEEPWMVGTQELRSCSPAGKD

SEQ ID NO: 974 - protein, 81 aa, Callithrix jacchus
PQESVAFDDVAVYFTKKEWAIMVPDQRALYRDVMLENYEAVAFVAVPPTSKPALISHLEQGKEPCFTQPQGVLSRRDWRAG

SEQ ID NO: 975 - protein, 81 aa, Ovis aries
AKAPVTFGDLAIYFSQEEWEWLSPIQKDLYEDVMLENYQNLVSLGLSFRRPNVISLLEKGKAPWMVDPVKRRRGLDLGSKC

SEQ ID NO: 976 - protein, 81 aa, Vulpes vulpes
CEGSVSFEDVTMDFSREEWQQLDPAQRCLYQDVMLEIYSHLLFVGYNIPNPEIISRMEKGEEPWMREVQLPHQRHRERAFG

SEQ ID NO: 977 - protein, 81 aa, Ovis aries
MAFRDVAVDFTQDEWVLLSPAQRSLYREVMLENYSNLVSLGIPFSKPKLITQLEQGKESWREERKCSPVSCLGEWGHWVVQ

SEQ ID NO: 978 - protein, 81 aa, Vulpes vulpes
FQHLVMFRDVAVDFSQEEWECLNSYQRNLYRDVILENYSNLVSVAGCSISKPDVITLLEQGKEPWMVVRDERRRSLDLESR

SEQ ID NO: 979 - protein, 81 aa, Vulpes vulpes
SQSLVTFGDVAINFSQEEWEWLNSAQRNLYRSVMLENYRNLVSLGLCVSKPDMISSLEQRKEPWMVKRKLTRGRCPDLKAV

SEQ ID NO: 980 - protein, 81 aa, Acinonyx jubatus
ASVVFEDVAVNFTPEEWALLNPGQRKLYRDVMLETCRNLSAVGCRSQGNTSTPRPQWSILLNEPPGEDKTGIFTRKDSCSV

SEQ ID NO: 981 - protein, 81 aa, Acinonyx jubatus
RPRAVKFADVAVYFSTEEWGCLRPAQRALYRDVMQETYGHLGALGCAGPKPALISWLERNTDDWEPAALDPQECPRGVAVQ

SEQ ID NO: 982 - protein, 81 aa, Rhinopithecus roxellana
MAFEDVAVYFSQEEWGLLDTAQRALYRHVMLDNFTLVTSLGLSTSRPHVVIQLERGEEPWVPSGKDMTLARNTYRRLNAGE

SEQ ID NO: 983 - protein, 81 aa, Rhinopithecus roxellana
MVTFEDVAVHFTKTEWTGLSPAQRALYRSVMLENFGNLTALGYPVPKPALISLLEGGDMAWGLEAQDDPLAERTKNICKGV

SEQ ID NO: 984 - protein, 81 aa, Acinonyx jubatus
AQAPLSFEDVAVSFSREEWRLLVPAQKDLYRDVMLENYRNLVSVGYQASEPDSLFQLEHGGPLWVVEGAAPRPPCPEEIWE

SEQ ID NO: 985 - protein, 81 aa, Odocoileus virginianus
SLGSDLFRDVAIVFSQEEWEQLAPTQRDLYRDVMLETYSNLVSLGLAVSKPDVISFLEQGKEPWTVEEVAAGGLCPVLKSR

SEQ ID NO: 986 - protein, 81 aa, Callithrix jacchus
AAGRVTFEDVTVSFTKGEWQQLNPEQRELYRDVMLENYGNLVSVGLEETSKPSVILRLEEGKEPWSEEEVLRGGRPEKNWD

SEQ ID NO: 987 - protein, 81 aa, Callithrix jacchus
PQESVAFDDVAVYFTKKEWAIMVPDQRALYRDVMLENYEAVAFVVPPTSKPALISHLEQGKEPCFTQPQGVLSRRDWRAGF

SEQ ID NO: 988 - protein, 81 aa, Ovis aries
SQVSVTFEDVAVLFTRDEWRKLAPPQRNLYQDVMLENYSNLVSLGLLFPKPKVISLLQQGEDPWKVEKENLGGSSLGWKNS

SEQ ID NO: 989 - protein, 81 aa, Ovis aries
YRGPVTFKDITVEFTREEWKLLDTAQRTLYREVMQENYSHLISVGYCANRPNAIFKLKQGKEPWILEVQFPRQKNPEDLCN

SEQ ID NO: 990 - protein, 81 aa, Callithrix jacchus
RPRALKFVDVAVYFSSEEWGCLRPAQRALYRDVMRETYGHLGALGFPGPKPALISWMEQESEAWSSAAQDPENGESLGGAR

SEQ ID NO: 991 - protein, 81 aa, Callithrix jacchus
VNDLVTFKDVAIDFSQEEWQWMNPAQKRLYRSMMLENYQSLVSLGLCVSKPYVISLLEQGREPWEMTSEMRRSPFSDWESI

SEQ ID NO: 992 - protein, 81 aa, Cebus imitator
KPGAVSFADVAVYFSPEEWGCLRPAQRSLYRDVMRETYGHLGALGFPGPKPALISWMEQESEAWSSAAQDPEKGESLGGAQ

SEQ ID NO: 993 - protein, 81 aa, Tursiops truncatus
PQKSVTFEDVAVYFTQTEWDGLSPAQRALYRDVMLENYGNVASLGFPLLKPTVISQLEGGGELEGPSPLASGTGTGPQGLW

SEQ ID NO: 994 - protein, 81 aa, Acinonyx jubatus
TPDVVTFEDVAVCFSSGEWQCLTRAQRHLYTDVMLENYGNMLSAGLACPKPPLISHLEQGAVPCAEDLQDWGFLTCSFPVS

SEQ ID NO: 995 - protein, 81 aa, Neophocaena asiaeorientalis
QAEVTFEDVAVLLSREEWGRLGPVQKGLYRDVMLETYRNLVSLGGGPAGPKPEVITQLERGDEPWVPDVQGRERLTIDGSA

SEQ ID NO: 996 - protein, 81 aa, Pongo sp.
SKAPVTFGDLAIYFSQEEWEWLSPIQKDLYEDVMLENYRNLVSLGLSFRRPNVITLLEKGKAPWMVEPVRRRRAPDSGSKC

SEQ ID NO: 997 - protein, 81 aa, Leptonychotes weddellii
PQKSVTFEDVAVYFTQTEWDGLSPAQRALYRDVMLENYGNVASLGFSLLKPAVISQLEGAGELGGPSPLVDGTETGPQGLW

SEQ ID NO: 998 - protein, 81 aa, Pan troglodytes
MAFEDVAVYFSQEEWGLLDTAQRALYRRVMLDNFALVASLGLSTSRPRVVIQLERGEEPWVPSGKDMTLARNTYGRLNSGS

SEQ ID NO: 999 - protein, 81 aa, Rhinopithecus roxellana
LKGLVTFEDVAVEFTQEEWALLDPAQRTLYRDVMLENFRNLASLGNQVDKPGLISQLEQEDKVMTEERGIFPGACPDVENP

SEQ ID NO: 1000 - protein, 81 aa, Odocoileus virginianus
FQEPVTFEDVAVYFTQNQWASLDSAQRALYREVMLENYANVASLVSPFPRPDLISQLERGEAPWDPNPWEAEDLRGICPGE

SEQ ID NO: 1001 - protein, 81 aa, Rhinopithecus roxellana
YQTPVSFKDVVVGFTQEEWHRLSPAQRALYRDVMLETYSNLVSVGYEGTKPDVILRLEQEEAPWIGGAARPGCHCWEDIWQ

SEQ ID NO: 1002 - protein, 81 aa, Bison bison
PLKLVTFEDVAVDFTQEEWSLLDKSQKNLFRNVMMETIHHLVSVGYQISKSDVISQLEQGKELWSKAAGGFQGQRPGEHQG

SEQ ID NO: 1003 - protein, 81 aa, Balaenoptera acutorostrata
QAEVTFEDVAVLLSREEWGRLGPVQKGLYRDVMLETYRNLVSLGAGPTGPKPEVITQLERGDEPWVLDVQGREGPTIDGSA

SEQ ID NO: 1004 - protein, 81 aa, Cebus imitator
SQGLVTFGDVAIDFSQEEWEWLSPIQRNLYRKVMLENYRNLASLGLCVSKPDVISLLEQGKEPWTVKRRMTRARCPDTQHL

SEQ ID NO: 1005 - protein, 81 aa, Callithrix jacchus
FQEAVTFKDVAVAFTEEELGLLDSAQRKLYRDVMLENFRNLVSVGRQSFKPDMISQLEREEKLWMKEFQTQRGRHSGDRNQ

SEQ ID NO: 1006 - protein, 81 aa, Callithrix jacchus
IQGLLTFGDVAVAFTRIEWRHLDAAQRALYRDVMLENYGNLVSVGLLSSKPKLIAQLEQGAEPWMEVREAPSGTRAVPDYW

SEQ ID NO: 1007 - protein, 81 aa, Callithrix jacchus
FQELVTFRDVAIDFSGQEWEYLDPHQRDLYRDVMLENYRNLVSLGHSISKPVLVDLLEQGKEPWMILREETQFPGKEDRGH

SEQ ID NO: 1008 - protein, 81 aa, Callorhinus ursinus
PQEPVTFEDVAVYFTQNQWASLDPMQRALYREVMLENYASVASLAFPFPKPDLVSQLERGEAPWSPDPWEAEVLKGTCPGG

SEQ ID NO: 1009 - protein, 81 aa, Callorhinus ursinus
IQEPVTFKDVAVDFTQEEWGRLDPVQRTLYRDVMLETYRHLLSVGNQIAKPEVISLLEQGEEPWSVEQAYPQSTCPAVDTE

SEQ ID NO: 1010 - protein, 81 aa, Cebus imitator
EPGAVSFGDVAVYFSREEWGCLRPAQRALYRDVMRETYSHLGALGVGGSKPALISWMEEEAELWVPAAQDPEVAKCPTEAD

SEQ ID NO: 1011 - protein, 81 aa, Cebus imitator
ESVAFEDVAVYFTQNQWGSLDPAQRALYREVMLENYANVASLVAFPFPKPALISHLEKGEAPWGPDPWDAEIPSGISQGGE

SEQ ID NO: 1012 - protein, 81 aa, Delphinapterus leucas
QAEVTFEDVAVLLSREEWGRLGPVQKGLYRDVMLETYRNLVSLGAGPAGPKPEVITQLERGDEPWVPDVQGRERPNIDGSA

SEQ ID NO: 1013 - protein, 81 aa, Pan troglodytes
SLGSVTFTDVAIDFSQDEWEWLNLAQRSLYKKVMLENYRNLVSVGLCISKPVVISLLEQEKDPWVIKGGMNRGLCPDLECV

SEQ ID NO: 1014 - protein, 81 aa, Sapajus apella
MAFEDVAVYFSQEEWGLLDTAQRALYRRVMLDNFALVASLGLSTSRPRVVIQLERGEEPWVPSGTDMTMSRNTHRRRNSGF

SEQ ID NO: 1015 - protein, 81 aa, Callorhinus ursinus
FQDSVTFEDVAVRFSSGEWQCLTRAQRHLYADVMLENYWNVISVGFAVPKPPLISHLEQGAEPCVQDLQDGGFLSCSFPVS

SEQ ID NO: 1016 - protein, 81 aa, Cebus imitator
SQGHVTFEDIAVYFSQEEWGLLDEAQRCLYHDVMLENFSLMTSVAGLSQNNHKDSCLQWKVPVSMNNVAQCSPDEVHYTPM

SEQ ID NO: 1017 - protein, 81 aa, Cebus imitator
ARDLVMFRDVAVDFSQEEWECLNSYQRNLYRDVILENYSNLVSLGCSISKPDVITLLEQGKEPWLVVRDEKRRWSLGPTFK

SEQ ID NO: 1018 - protein, 81 aa, Macaca mulatta
PQGLVTFGDVAVDFSQEEWEWLNPNQRTLYRKVMLENYKNLASLGLCVSKPDVISSLEQGKEPWTVKRKMTRAWCPDLKIV

SEQ ID NO: 1019 - protein, 81 aa, Bos taurus
SQGRLTFQDVAIDFTQEEWECLDLGQRELYRDVMLENYGNLASLGLVISKPDLVTFLEQMKDPWDTRRMETPAVHPAVSSH

SEQ ID NO: 1020 - protein, 81 aa, Ovis aries
PRESVTFEDVAVNFSHEEWQCLTHSQRHLYKDVMLENYGNMVSLGFSFSKPPLISCLEQGAESYVQDQQDWEFLSCSYPVS

SEQ ID NO: 1021 - protein, 81 aa, Ovis aries
QAEVTFEDVAVFLSQEEWGLLGPAQKGLYREVMLETYRNLVSLGAGLAGPKPEVIVHLERGDELWVLDMRGAEQPSVDGSA

SEQ ID NO: 1022 - protein, 81 aa, Otolemur garnettii
KELPSVFEDVAVYFTREEWGMLDKRQKELYRDVMRMNYELLASLGPAAAKPDLISKLERRAAPWIKDPNGPKWGEGHPPGK

SEQ ID NO: 1023 - protein, 81 aa, Otolemur garnettii
MAFEDVAVYFSQEEWGLLDTAQRALYRHVMLENFTLVSSLGLSTSRPRVVVQLERGEEPWVPSRIDSTPARNAQGRRNPGS

SEQ ID NO: 1024 - protein, 81 aa, Macaca mulatta
SHELLTFKDISVDFTQEEWGQLAPAYQNLYREVMLENYSNLVSVAGYQLSKPSVISQLEKGEEPWMAEKEGPGDPSSDLKS

SEQ ID NO: 1025 - protein, 81 aa, Ovis aries
TSQSPLTFGDVAVEFSGEEWAWLDSAQRSLHRSVMLENYRNLASLGKVSKPEMISSLEQRKEPWAVTRKTTGGECADSQTL

SEQ ID NO: 1026 - protein, 81 aa, Otolemur garnettii
SQGLVTFGDVAVDFSQEEWAWLSTTQRTLYRKVTLENYRNLASLGLCVSKPAVISLLEQGKEPWIVKRKMTRGGCPDLNAV

SEQ ID NO: 1027 - protein, 81 aa, Callithrix jacchus
AQESMTFRDVAVFFSQDEWLHLDSAQRALYREVMLENYSTLVSLGIPFSMPKVIHQLQQGQDPCTVEGDVPSNTCLGFKTW

SEQ ID NO: 1028 - protein, 81 aa, Vulpes vulpes
CWGLLSFKDISMEFTWEEWQLLDSAQKYLYRDVILENYSHLVSLGYHGTKPDLIFKLEQGEEPWMINARVSRQSYPEGWKE

SEQ ID NO: 1029 - protein, 81 aa, Ovis aries
HQEVVTFEDVAVYFTQTEWAGLSPAQRALYRSVMLEIYGNLTSLGYPVPKPELVSLLERGDLPVGLETQDNPPAQGTRDIY

SEQ ID NO: 1030 - protein, 81 aa, Enhydra lutris
FEELVTFEDVAVYFSENEWTSLAPTQRVLYRDVMLENYGAVASLAAFPFPKPALISQLERGEAPWCKAPQGALDGEGPRGI

SEQ ID NO: 1031 - protein, 81 aa, Bos taurus
FQEPVTFEDVAVYFTQNQWASLDSAQRALYREVMLENYANVASLVSPFPRPDLISQLERGEAPWDPDPWEAEDLRGICPGG

SEQ ID NO: 1032 - protein, 81 aa, Enhydra lutris
FQEAVTFKDVAVVFSEEELGLLDSTQRKLYRDVMLENFRNLVSVGHSSSKPDMISQLEREEEKLYVKEICTERGRHSDKNC

SEQ ID NO: 1033 - protein, 81 aa, Zalophus californianus
AYGSLSFGEVAISFSQEEWECLDPAQRALYRDVMLETYSNLVSLAGSSISKPDVITLLEQEKEPWVVVRRETSRWYPDLES

SEQ ID NO: 1034 - protein, 81 aa, Delphinapterus leucas
PQVLVSFEEVAVLLSQEEWGHLGPAQKRLYRDVMLETYGNLVSLGLQGSKPDVISKLEQGEEPWAPHSPRIEGSWIWRRRR

SEQ ID NO: 1035 - protein, 81 aa, Ovis aries
PLTFEDVALYFSEEEWLIMDPNQRTLYLDVMQELYENVTSLGLKLKNDTGNDPPVSLPTLEIQPSGCEVVRKATMKDAETT

SEQ ID NO: 1036 - protein, 81 aa, Rhinopithecus bieti
AHALVTFRDVAIDFSQKEWECLDTTQRKLYRDVMLENYSNLVSLGYSGSKPDVITLLEQGKEPCVAVRDVTGTQYPGLLSR

SEQ ID NO: 1037 - protein, 81 aa, Ovis aries
PLESVTFEDVAVDFTQEEWSLLDKSQKNLFRNVMLETVTHLVSVGYQISKSDVIFQLEQGKELWPEAAGGLQGQSPDEVTP

SEQ ID NO: 1038 - protein, 81 aa, Macaca mulatta
ACESITFGDVAIDFSHQEWEYLNLVQKTLYQEVMMENYDNLVSLGHSISKPDLITLLEQGKEPWMIVGEETRGECTDLDSR

SEQ ID NO: 1039 - protein, 81 aa, Enhydra lutris
SQVSVTFEDVAVLFTRDEWRKLGPSQRNVYQEVMLENYSNLVSLGLLFSKPRVISLLQEGEDPWKVEKESPGGPSLGWNSS

SEQ ID NO: 1040 - protein, 81 aa, Bos taurus
VQGSVSFEDVAVGFSQEEWQILGPSQKALYWDVMLENYCNLVSVGYQAPTPNSLFQLEQGGPPWTVEGAALSSTCSGYQAT

SEQ ID NO: 1041 - protein, 81 aa, Ovis aries
LQGGVTFEDVAVDFTQEEWQQLSPEQRGLYRDVTLENYRNLASMGGEDFAKPEVILRLENGEEPWMVETQVLRSCGPAEKD

SEQ ID NO: 1042 - protein, 81 aa, Pongo sp.
ARGKSKSKAPVTFGDLAIYFSQEEWEWLSPIQKDLYEDVMLENYRNLVSLGLSFRRPNVITLLEKGKAPWMVEPVRRRRAP

SEQ ID NO: 1043 - protein, 81 aa, Ovis aries
QPQGTMTFKDVEVTFSQDEWGLLDASQRNLYRDVMLENYGNMASVVGPFTKPALISWLEAREPWGLNVQGVQLKGNPGAAP

SEQ ID NO: 1044 - protein, 81 aa, Otolemur garnettii
LQESVTFRDVAVLFSQDEWLHLDSAQRTLYREVMLENYNNLASLGIPFSMPKVICQLQQGEDPCTVEGEVPSDSCIDAKGQ

SEQ ID NO: 1045 - protein, 81 aa, Pongo sp.
FQEPVTFEDVAVYFTQNEWASLHPTQRALYRGVMLENYANVTSLSAFPFPKPDLIFQLEQGEAAWGPDPWTLDGGEALRGM

SEQ ID NO: 1046 - protein, 81 aa, Macaca mulatta
ASVTVTFDDVALYFSEQEWEILEKWQKQMYKQEMKTNYQTLDSLGYAFSKPDLITWMEQGRMLFISEQGCLDKTRRTTSPP

SEQ ID NO: 1047 - protein, 81 aa, Ovis aries
SQSPLTFGDVAVEFSGEEWAWLDSAQRSLHRSVMLENYRNLASLGLCLSKPEMISSLEQRKEPWAVKRKLTGGECPDSQTL

SEQ ID NO: 1048 - protein, 81 aa, Otolemur garnettii
QELLTFKDVSVEFSMDEWACLDPAQQTLYQDVMLENYRHLVFLGLTLSKPDLITCLEQSKEPWKVKSHQTVVKHPAVSDPP

SEQ ID NO: 1049 - protein, 81 aa, Otolemur garnettii
FQGLMTFEDVTVEFTQWEWGQLDPAQKDLYREVMLENFRNLASLGLPLSKPYVICQLEEGQEPCMLEKEISVGTQSVGEAT

SEQ ID NO: 1050 - protein, 81 aa, Vicugna pacos
FKEAVTFKDVAVTFTEEELGLLDPAQRELYRDVMLENFRNLVSVGHQCFIPDVISQLEREEKLWMLRTAAQSRCSSGDKNL

SEQ ID NO: 1051 - protein, 81 aa, Trichechus manatus
PPESVTFEDVAVYFTQKEWASLMPAQKALYRDVMLENYEAVAFLAPATSKPALISQLEQGVEPSFSQAQGDLSMRDRGAGL

SEQ ID NO: 1052 - protein, 81 aa, Ovis aries
PQKLVTFEDVAVYFTQTEWDGLSTAQRALYRDVMLENYGNVASLGFPLLKPAVISQLEGGGELEGPSSLASGAGTGPQGLW

SEQ ID NO: 1053 - protein, 81 aa, Odocoileus virginianus
SRSPLTFGDVAVEFSGEEWARLDSAQRSLHRSVMLENYRNLASLGLCMSKPEMISSLEQRKEPWAVKRKSTRGRCPDSQTA

SEQ ID NO: 1054 - protein, 81 aa, Callithrix jacchus
PQKSVTFEDVAVYFTQAEWDGLSPAQRTLYRDVMLENYGNVASLGFPLLKPAVISQLEGGGELGGPSPLAAGTGLHVLRTV

SEQ ID NO: 1055 - protein, 81 aa, Rhinopithecus roxellana
FQRSVLFSDVSIDFSPEEWEYLDLEQKDLYRDVMLENYSNLVSLGCFISKPDVISLLEQGKEPWKVVRKGRRQYPDLETKY

SEQ ID NO: 1056 - protein, 80 aa, Cebus imitator
MGEPLEFRDVAIEFSLEEWHCLDTAQRNLYRDVMLENYRNLVFLGIAVSKPDLITWLEQGKKPLTVKGHEMIATPPGRCK

SEQ ID NO: 1057 - protein, 81 aa, Cebus imitator
AQESVTFEDVAVNFTDREWQCLTYAQRHLYKDVMLENYGNMVSVGFPFPKPPLISHLERGVELCVQDPQDRESLSCSCLVS

SEQ ID NO: 1058 - protein, 81 aa, Acinonyx jubatus
FQHLVMFRDVAVDFSQEEWECLNSYQRNLYRDVILENYSNLVSVGCTISKPDVITLLEQGKEPWMVVRDERRRRSLDLEAR

SEQ ID NO: 1059 - protein, 81 aa, Rhinopithecus roxellana
MVSFEDVAVPLSQEEWNCLIPAQRGLYRDVMLETYGNLVSLGLQASKPDVISRLEQGDEPWTPHILRTQGSWSWRHKREGY

SEQ ID NO: 1060 - protein, 81 aa, Macaca mulatta
RPESVTFEDVAVYFSENEWIGLGPAQRALYRDVMLENYGAVASLAAFPFPKPALISQLERGEAPWCSVPWGALDGEDPRSI

SEQ ID NO: 1061 - protein, 81 aa, Callithrix jacchus
EPGPVTFGDVAVYFSREEWGCLRPAQRALYRDVMRETYSHLGALGVEGSKPALISWVEEEAELWGPAAQDPEVAKRPTEAD

SEQ ID NO: 1062 - protein, 81 aa, Acinonyx jubatus
SHGPLSFEDVAVAFTKEEWQQLDPAQRTLYRDVMLENFSHVISLGHPVSKPDVISKLEQGEEPWIIKRDVSDWIYPERETR

SEQ ID NO: 1063 - protein, 81 aa, Rhinopithecus roxellana
AQESVTFEDVAVNFTNREWQSLTYAQRHLYKHVMLENYRNMVSLGFPFPKPPLISHLERGVEPCVQDPQDKESLSCSYPVS

SEQ ID NO: 1064 - protein, 81 aa, Odocoileus virginianus
HQESLTFKDVAVNFTQEEWHHVDAAQRRLYKDVMLENYSHLVSLGYQVSKPEVIFKLEQGEEPWIAEGEIQRPVCPDWKTR

SEQ ID NO: 1065 - protein, 81 aa, Pan troglodytes
SQESVSFKDVTVGFTQEEWQHLDPSQRALYRDVMLENYSNLVSVGYCVHKPEVIFRLQQGEEPWKLEEEFPSQSFPEVWTA

SEQ ID NO: 1066 - protein, 81 aa, Cebus imitator
AQESVMFSDVSIDFSQEEWECLNDDQRDLYRDVMLENYSNLVSMAGHSISKPNVISYLEQGKEPWLVDREITSGQWPVLES

SEQ ID NO: 1067 - protein, 81 aa, Papio anubis
MAFEDVAVYFSQEEWGLLDTAQRALYRHVMLENFTLVTSLGLSTSRPYVVIQLERGEEPWVPSGKDMTLARNTYRRLNAGS

SEQ ID NO: 1068 - protein, 81 aa, Ursus maritimus
HQDLVTFKDVAVYFTQTEWAGLSPAQKALYRSVMLENYGNLTSLGYPVPKPALISLLEGGNLPWGLEAQDNPSAERTKDIC

SEQ ID NO: 1069 - protein, 81 aa, Cebus imitator
SLGSELFRDVAIVFSQEEWQWLAPAQRDLYRDVMLETYSNLVSLGLAISKPDVISFLEQGREPWMVERVVAGGLCPVLESR

SEQ ID NO: 1070 - protein, 81 aa, Cebus imitator
FQEPVTFEDVAVYFTQNEWTSLQPSQRALFREVMLENYATVTSLSAFPFPKPDLIFRLEQGEAAWGPDPWTLAGEEALRGL

SEQ ID NO: 1071 - protein, 81 aa, Macaca nemestrina
YQTPVSFKDVVVGFTQEEWHRLSPAQRALYRDVMLETYSNLLSVGYEGTKPDVILRLEQEEAPWIGEAACPGCHCWEDIWQ

SEQ ID NO: 1072 - protein, 81 aa, Physeter macrocephalus
DEALMAFKDVAVAFTQKEWKLLSPAQRTLYRDVMLENYSHMVSLGIAFPKPKLITQLEQGEEPWREESESLLDLCPAEPRT

SEQ ID NO: 1073 - protein, 81 aa, Delphinapterus leucas
QAQETLTFEDVAVDFTWEEWQLLAPPQKDLYRDVMLENYSNLLSVGFQASKPNVLSKLGQGEPWTMEDEIHCQTRSEIWKV

SEQ ID NO: 1074 - protein, 81 aa, Leptonychotes weddellii
PQEPVTFEDVAVYFTQNQWASLDPTQRALYREVMLENYASVASLVVFPFPKPDLVSQLEREEAPWGPDPWEAEVLRGICPG

SEQ ID NO: 1075 - protein, 81 aa, Leptonychotes weddellii
SQEPVTFEDVAVYFTQNQWASLDPMQRALYLEVMLENYANITSLAALPFPKPDLILQLEQGEAPWDLDPWTPLEGEALEGV

SEQ ID NO: 1076 - protein, 81 aa, Phascolarctos cinereus
SLESVTFQDVAVNFTQEEWGHLEPAQKDLYREVMLENYQNFVSLGLPFSKPHVISQLERGEAPWITERDVPRVSCQDFFIQ

SEQ ID NO: 1077 - protein, 81 aa, Pongo sp.
AQESVMFSDVSVDFSQEEWECLNDDQRDLYRDVMLENYSNLVSMGHSVSKPNVISYLEQGKEPWLVDRELTRGQWPVLESR

SEQ ID NO: 1078 - protein, 81 aa, Callorhinus ursinus
SYGSFSFEDVTVGFTQEEWQHLGPAQRILYRDVMLENYSHLVSVGCCIPKPEVILKLEQGEQPWILEEESPSQSYPGLPTD

SEQ ID NO: 1079 - protein, 81 aa, Callorhinus ursinus
AHHLVMFRDVAVDFSKEEWECLNSYQRNLYRDVILENYSNLVSVAGCSISKPDVITLLEQGKEPWMVVRDERRRRSLDLES

SEQ ID NO: 1080 - protein, 81 aa, Tursiops truncatus
HQEVVTFEDVAVYFTQTEWAGLSPAQRALYRSVMLEIYGNLTSLGYPVPKPALVSLLERGDLPWGLETRDDPPAQGTKDIC

SEQ ID NO: 1081 - protein, 81 aa, Phascolarctos cinereus
CQETLTFKDVAVDFTREEWGHLGPAQRDLYKEVMLDNYRNLVSLGLQVSKPDVIFQLERGESPSMLEGKDSSDPCPEFLSQ

SEQ ID NO: 1082 - protein, 81 aa, Ursus arctos
SKVPVTFGDLAIYFSQEEWEWLSPIQKDLYEDVMLENYQNLVSLGLSFRRPNVITLLEKGKAPWMVEPARKRRGVDSGSKC

SEQ ID NO: 1083 - protein, 81 aa, Leptonychotes weddellii
PQVLVSFEDVAVFLSREEWGCLGPAQRGLYSNVMLETYRNLISLGLQGSKPDVISRLEKGEEPWAPYSPKIEEGWIRSHRS

SEQ ID NO: 1084 - protein, 81 aa, Pan troglodytes
MAFEDVAVYFSQEEWGLLDTTQRALYRHVMLENFTLVTSLGLSTSRPHVVIQLERGEEPWVPSGTDTTLSRTTYRRRNPGS

SEQ ID NO: 1085 - protein, 81 aa, Enhydra lutris
QAEVTFEDVAVLFSREEWGRLGPAQRGLYRDVMLETYRNLVSLGAGPAGPKPGVITQLERGDEPWVLDAQGTEGKERLRVS

SEQ ID NO: 1086 - protein, 81 aa, Monodelphis domestica
AQVLVTFQDVAVDFTQEEWRLLDLGQKELYKEVMLENVQNMLFLGLPVPREDWISHFDQGRAPWMLEGEGPSNSRLDGQRR

SEQ ID NO: 1087 - protein, 81 aa, Saimiri boliviensis
FQEPVTFEDVVVYFTQNEWTSLQPSQRALYREVMLENYATVTSLSAFPFSKPDLIFRLEQGEAAWGSDPWTLAGEEAPRGL

SEQ ID NO: 1088 - protein, 81 aa, Balaenoptera acutorostrata
HQEVVTFEDVAVYFTQTEWAGLSPAQRALYRSVMLEIYGNLTSLGYPVPKPALVSLLERGDLPWGLETRDDRPAQGTKDIC

SEQ ID NO: 1089 - protein, 81 aa, Callorhinus ursinus
ARASLSFEDVAVGFSWEEWQLLAPSQKDLYRDVMLENYRNLVSVGYEASKPDSVFQLEQGEPPWMVEGAAQSQTCQEEIWE

SEQ ID NO: 1090 - protein, 81 aa, Delphinapterus leucas
KDQGSLTLEDVAVDFTWEEWQLLAPAQKDLYRDVMLENYSNLLSIGYQASKPDALSRLERGEPWPVEDEIHSQICPEMRKD

SEQ ID NO: 1091 - protein, 81 aa, Balaenoptera acutorostrata
PQASVSFKDVTVEFTQEEWWQMDSAQRTLYRDVMLENYSHLVSVGYCFTKPELIFMLEQGEDPWLLEKEFVNRSSPEESQP

SEQ ID NO: 1092 - protein, 81 aa, Ursus maritimus
ARASLSFEDVAVGFSWEEWQLLAPSQKDLYRDVMLENYRNLVSVGYQASKLDSLFQSEQGGPPWTVEGAAQSQTCPEEIWE

SEQ ID NO: 1093 - protein, 81 aa, Papio anubis
MVSFEDVAVLLSQEEWDCLIPAQRGLYRDVMLETYGNLVSLGLQASKPDVISRLEQGDEPWTPHILRTQRSWSWRHKRECY

SEQ ID NO: 1094 - protein, 81 aa, Callorhinus ursinus
LQKSVTFEDVAVYFTQTEWDGLSPAQRALYRDVMLENYGNVASLGFSLFKPAVISQLEGAGELGGPSPLVDGTETGPQGLW

SEQ ID NO: 1095 - protein, 81 aa, Rhinolophus ferrumequinum
SQSLVTFGDVAVDFSQEEWERLNSAQRGLYRDVMLENYRSLVSLGLCFSKPDMISSLEQRKEPWMPKRKLMRGQCPGWKAV

SEQ ID NO: 1096 - protein, 81 aa, Rhinopithecus roxellana
LKDLVTFKDVAIDFSQEEWQWMNPAQKHLYRSMMLENYQSLVSLGLCISKPYVISLLEQGREPWEMTSEMTRSPFSDWESI

SEQ ID NO: 1097 - protein, 81 aa, Callorhinus ursinus
SQSLVTFGDVAVDFSQEEWEWLNSAQRNLYRSVMLENYRNLVSLGLCVSKPDMISSLEQRKEPWMVKRKLTRGRCPDLKTV

SEQ ID NO: 1098 - protein, 81 aa, Delphinapterus leucas
HQEVVTFEDVAVYFTQTEWAGLSPAQRALYRSVMLEIYGNLTSLGYPVPKPALVSLLERGDLPWGLETQDDPPAQGTKHIC

SEQ ID NO: 1099 - protein, 81 aa, Odocoileus virginianus
RPRAVKFGDVALYFSREEWGCLRPAQRALYRDVMQETYGHLGALGCAGPKPALISWLERNTDDWEPAALDPQECPKGVAVQ

SEQ ID NO: 1100 - protein, 81 aa, Rhinolophus ferrumequinum
SEDLVTFRDVAVDFSQEEWEQLNSAQRGLYRDVMLENYRSLVSLGVSVSKPDVISLLEQGKEPWVVKEGTRGTYSDWKYAF

SEQ ID NO: 1101 - protein, 81 aa, Sapajus apella
SQEPVTFADVAVVFTPEEWVFLDSTQRSLYRDVMLENYRNLASVAGDQLRKPNASSDLEQRGEQWNTERGVISDTCPEPQL

SEQ ID NO: 1102 - protein, 81 aa, Balaenoptera acutorostrata
PQVLVSFEEVAVLLSQEEWGRLSPAQKGLYRDVMMETYGNLVSLGLQGSKPDVISKLEQGKEPWAPHSPRIEGSWIWRRRR

SEQ ID NO: 1103 - protein, 81 aa, Rhinopithecus roxellana
PQGSLTFRDVAIEFSQEEWKCLDPIQKALYRDVMLENYRNLGFLGLCLPDLNIISMLEEGKEPWTVVSQVKIARNPNWGEC

SEQ ID NO: 1104 - protein, 81 aa, Rhinopithecus roxellana
VHGSVTFRDVAIDFSQEEWECLQPEQRTLYRDVMLENYSHLISLGSSISKPDVITLLEQEKEPWMVVRKETSRWYPDLESK

SEQ ID NO: 1105 - protein, 81 aa, Macaca mulatta
VHGSVTFRDVAIDFSQEEWECLQPDQRNLYRDVMLENYSHLISLGSSISKPDVITLLEQEKEPWIVVRKETSRWYPDLESK

SEQ ID NO: 1106 - protein, 81 aa, Phyllostomus discolor
MAASQESLTFKDVSVDFSLEEWECLDPAQRKLYSDVMLENYSNLVSLGLVVSKPGLVTFLEQMQEVWDVSRKKSISTPPGR

SEQ ID NO: 1107 - protein, 81 aa, Panthera pardus
AQESLTLEDVAVDFSREEWRLLAPAQKDLYRDVMLENFRNLVSVGHQASKPDVLAKLERGEEPWAIEEEVRSGTSPETGKV

SEQ ID NO: 1108 - protein, 81 aa, Ursus arctos
PQKSVTFEDVAVYFTQTEWDGLSPAQRALYRDVMLENYGNVASLGFSLLKPAVISQLEGAGELEGPSPLVAGTEIGPQGLW

SEQ ID NO: 1109 - protein, 81 aa, Ursus arctos
LLTFEDVAVSFSEEEWKLLDPSQKILYNDVMQENYETVISLGLKLKNDTGNDQPISLSALEIQASGGKVLRKARMKVAQKT

SEQ ID NO: 1110 - protein, 81 aa, Ursus maritimus
AHHLVMFRDVAVDFSQEEWECLNPYQRNLYRDVILENYSNLVSVAGCSISKPDVITLLEQGKEPWMVVRDERRRSLDLESR

SEQ ID NO: 1111 - protein, 81 aa, Physeter macrocephalus
VQESVTFKDVAVLFTQDEWAQLSPAQRALYRDVMLENYSNLVSLGLLGPKPDVFSQLGKGEEWMPEDSLGGFCLDWMTTPV

SEQ ID NO: 1112 - protein, 81 aa, Zalophus californianus
FQDSVTFEDVAVRFSSGEWQCLTRAQRHLYADVMLENYGNMISVGFAVPKPPLISHLEQGAEPCVQDLQDGGFLSCSFPVS

SEQ ID NO: 1113 - protein, 81 aa, Ursus maritimus
SQEPVTFEDVAVYFTQNQWANLDFTQRALYREVMLENYANVASLAFPFPKPDLVSQLERGEAPWGPDPWEAEVLRGVCPGG

SEQ ID NO: 1114 - protein, 81 aa, Ursus arctos
TQGSLSFRDVTVGFTQEEWQHLDPAQRSLYRDVMLENYSHLVSLGYSISKPEVILKLEQGEEPWILEEEFPSQSDLELIKS

SEQ ID NO: 1115 - protein, 81 aa, Pteropus vampyrus
AHGSVIFSDVSIAFSQEEWEYLDLEQRDLYRDVMLENYSNLVSLGCFISKPNVISLLEQGKEPWKVVRKERRYPDMGIRYE

SEQ ID NO: 1116 - protein, 81 aa, Delphinapterus leucas
PENGVTFEDIALYFSWEEWKLLDEAQRRLYHDVMLENFALISSLGVWSGEENVEASFEQSVSVVMSQVRTSKEPSSSQKTH

SEQ ID NO: 1117 - protein, 81 aa, Rhinolophus ferrumequinum
WKEELSFEDVAVNFTREEWNKLDWTQRDLYRDVMLENYRNMILLGFQFPKPEVICQLEQWEDPWILDLPRAGTRKASSNAC

SEQ ID NO: 1118 - protein, 81 aa, Muntiacus muntjak
MGRLMFQDVAIDFTQEEWECLDLSQRDLYRDVMLETYGNLASLGLVVSKPDLVTFLEQMKNPWDVRRTDTKATYPAVSSHN

SEQ ID NO: 1119 - protein, 81 aa, Vicugna pacos
CEVSVSFEDVTVDFSREEWQHLDPAQRRLYRDVTLENYSHLCSVGYQVPKPEVIFKLEQGEGPWTLEEETPHQSCSDEDMG

SEQ ID NO: 1120 - protein, 81 aa, Tursiops truncatus
SKAPVTFGDLAIYFSQEEWEWLSPIQKDLYEDVMLENYQNLVSLGLSFRRPNVITLLEKGKAPWMVEPVKRRRGLDLGSKC

SEQ ID NO: 1121 - protein, 81 aa, Bison bison
KPLAVRFADVAVYFSPEEWGYLRPAQRALYRDVMQETYGHLGALGFPGPKPALISWMEQESEAWSPAAQDPEEGENLGGAL

SEQ ID NO: 1122 - protein, 81 aa, Camelus dromedarius
AQETVTFKDVAVDFTQEEWGQLDPVQRTLYRDVMLETYGHLLSVGNQIAKPEVISLLEQGEEPWSMDRVYPPQRTCPEWMR

SEQ ID NO: 1123 - protein, 81 aa, Leptonychotes weddellii
ARASLSFEDVAVGFSWEEWQLLAPSQKDLYREVMLENYRNLVSVGYQASKPDSLFHLEQGEPPWTVVGAAQSQTCQEIWEI

SEQ ID NO: 1124 - protein, 81 aa, Leptonychotes weddellii
SSQGLLTFRDVAIEFSQEEWGCLNHTQRELYRDVMLENYGHLLFLGLIVSKPDLVSFLEQKKDPWDVKRKKTVAFHPGRWE

SEQ ID NO: 1125 - protein, 81 aa, Leptonychotes weddellii
PQESVTFKDIAVDFTQEEWALLDTSQRKLYRDVMLENISHLVSVGYHLCKSDVISQLEQGVELWREGRGFPQGLNPDRKSG

SEQ ID NO: 1126 - protein, 81 aa, Ovis aries
SQSPLTFGDVAVEFSGEEWAWLDSAQRSLHRSVMLENYRNLASLGLCLSKPEMISSLEQRKEPWAVKRKSTGGECADSQTL

SEQ ID NO: 1127 - protein, 81 aa, Vulpes vulpes
AQESVMFSDVSIDFSQEEWECLNDDQRDLYRDVMLENYSHLVSMGHSVSKPDVISFLEQGKEPWLVDRELTRDQWPVLESR

SEQ ID NO: 1128 - protein, 81 aa, Monodelphis domestica
QVPVTFEDLAVRFSAEEWHLLEEWQREFHRDVMRENYEMLVSLGTAQLLPLSAFLSLTEPQEDMGDNGCSDGEWERPGGGL

SEQ ID NO: 1129 - protein, 81 aa, Cercocebus atys
MEGLVMFQDLFIDFSQEEWECLDTAQKDLYRDVMMENYSSLVSLGLCIPKPDVISLLEQGKEPWMVSRDVLGGWCPDSEFR

SEQ ID NO: 1130 - protein, 81 aa, Neomonachus schauinslandi
PQEPVTFEDVAVYFTQNQWASLDPTQRALYREVMLENYASVASLVFPFPKPDLVSQLERGEAPWGPDPWEAEVLRGICPGG

SEQ ID NO: 1131 - protein, 81 aa, Monodelphis domestica
AQEVVSFKDVAVDFTREEWRLLSPPQKELYKEVMLENARNLLSVGLPAPSEEVISYLEQREAPWILEQEGLRNCCSEGEIR

SEQ ID NO: 1132 - protein, 81 aa, Physeter macrocephalus
YQGLVSFEDVAVNFTWEEWQDLDAAQRTLYRDVMLENYSSLVSLGHCITKPEVIIKLEQGAAPWTVKETPDQGSPDVQIVD

SEQ ID NO: 1133 - protein, 81 aa, Monodelphis domestica
SQGSITFKDVAVDFTQEEWCLLDHSQKALHLEVMLENVQNLLSVGLPVPRENFISCFQQGKAPYLLQQNDPKSSSPEAETN

SEQ ID NO: 1134 - protein, 81 aa, Myotis davidii
SMGSDLFRDVAVVFSREEWERLAPAQRDLYRDVMLETYSHLRSLDLAISKPDVIAFLEQGEEPWRAEEAARDGLCPVDWEC

SEQ ID NO: 1135 - protein, 81 aa, Cercocebus atys
SQGSVSFKDVTVDFTQEEWQQLDPAQKALYRDVMLENYCHFVSVGFHMTKPDMIRKLEQGEELWTQRIFPSYSYLAEDGKT

SEQ ID NO: 1136 - protein, 81 aa, Neomonachus schauinslandi
FEESVTFEDVAVYFSENEWTGLAPAQRVLYRDVMLENYGAVASLAFPFPKPALISQLERGEAPWCKAPQGALDGGGPRGIS

SEQ ID NO: 1137 - protein, 81 aa, Neomonachus schauinslandi
VQGSMSFEDVIVEFTQDEWQYMSPAQRILYRDVMLENYSHLISVGYCTTKPEMIFKLEQGEEPWSLEEEFLNQRYPGYFSV

SEQ ID NO: 1138 - protein, 81 aa, Cercocebus atys
MAQVTFSDVAIDFSHEEWAWLDSAQRDLYKDVMVQNYENLVSVGLSVTKPYVITLLEDGKEPWMVEKKLSKGMIPDWESRW

SEQ ID NO: 1139 - protein, 81 aa, Monodelphis domestica
PQAAMTFQDVAVDFTREEWRLLEPPQKELYWEVMLENYRNLVCLGLTVSKPDVISQLEQGEAPWRLEGGSARGRCLDWGMR

SEQ ID NO: 1140 - protein, 81 aa, Monodelphis domestica
PQELVTFQDVAVYFTPEEVRYLDSYQKALYKDVMLENYGNMASLGFPLSKPVLISQLERGEEPWAMDPLVAKERKTRRGTS

SEQ ID NO: 1141 - protein, 81 aa, Monodelphis domestica
AQEAVTFKDVAVDFTREEWRLLSPPQKELYKEVMLENAQNLLTVGLPAPPENVISALGAEGSPVDARGRRPEGACCPGEII

SEQ ID NO: 1142 - protein, 81 aa, Monodelphis domestica
FQEPVTFKDVAVEFTWEEWRQLDPTQRALFRDVMLENYRNLVSLGLAVTKPDVIFQLESGEVPWMLEREVPRSSPTECLNL

SEQ ID NO: 1143 - protein, 81 aa, Monodelphis domestica
LQASVTFEDVAVDFSAEEWRRLRPLQRELYREVMLENYRSLAWLGLAASKPGVICRLERGEAPREPDPDGPQSGWADCGTG

SEQ ID NO: 1144 - protein, 81 aa, Cercocebus atys
MAFEDVAVYFSQEEWGLLDTAQRALYRRVMLENFTLVTSLGLSTSRPHVVIQLERGEEPWVPSGKDMTLARNTYRRLNAGE

SEQ ID NO: 1145 - protein, 81 aa, Neomonachus schauinslandi
ARASLSFEDVAVGFSWEEWQLLAPSQKDLYREVMLENYRNLVSVGYQASKPDSLFQLEQGEPPWTVVGAAQSQTCQEEIWE

SEQ ID NO: 1146 - protein, 81 aa, Monodelphis domestica
FQGLVTFQDVAVIFSLDEWGHLDPAQRELYREVMLENYQTLACLGLAVSKPDVIAQLEQGGAPWKLEKDIPASPCPGEQYV

SEQ ID NO: 1147 - protein, 81 aa, Physeter macrocephalus
AHVSLSFRDVAIDLSQEEWECLDPVQRALYRDVMLENYSNLVSLGCSSPKPDVITLLEQEKEPWTVMREGTRSWYTDLESK

SEQ ID NO: 1148 - protein, 81 aa, Leptonychotes weddellii
LQEAIVFEDVAVYFTRIEWSCLAPHQRALYRDVMLENYGHMASLGFLVAKPALISLLEQGEEPGALILQGTEEQGSTASLC

SEQ ID NO: 1149 - protein, 81 aa, Leptonychotes weddellii
SQEPVTFEDVAVYFTQNQWASLDPMQRALYLEVMLENYANITSLALPFPKPDLILQLEQGEAPWDLDPWTPLEGEALEGVH

SEQ ID NO: 1150 - protein, 81 aa, Camelus dromedarius
MPQGSVSFKDVTVDFTQEEWQQLDSAQKALYRDVMLENYCHFVSVGFHMTKPDMIHKLEQGKELWTTGRIFPSRSYLGESV

SEQ ID NO: 1151 - protein, 81 aa, Pongo sp.
VQEPVTFKDVAVDFTQEEWGQLDLVQRTLYRDVMLETYGHLLSVGNQIAKPEVISLLEQGEEPWSVEQACPQRTCSEWVRN

SEQ ID NO: 1152 - protein, 81 aa, Pongo sp.
EPGAVSFADVAVYFCREEWGCLRPAQRALYRDVMRETYGHLSALGIGGNKPALISWVEEEAELWDPAAQDPEVAKCQTEAD

SEQ ID NO: 1153 - protein, 81 aa, Leptonychotes weddellii
AHGSVMFNDVSIVFSQEEWEYLDLEQRDLYRDVMLENYSNLVSLGCFISKPDVISLLEQGKEPWKVVRKGRRRYPDLETRY

SEQ ID NO: 1154 - protein, 81 aa, Leptonychotes weddellii
QAEVTFEDVAVLFSREEWGRLGPAQRGLYRDVMLETYRNLVSLGAGPAGPKPGVITQLEQGDEPWVLDAQGAKGKERLRVS

SEQ ID NO: 1155 - protein, 81 aa, Cercocebus atys
RLESVTFEDVAVYFTQNQWASLDPAQRALYGEVMLENYANVASLVAFPFPKPALISHLERGEAPWGPDPWDTKIPRGISQG

SEQ ID NO: 1156 - protein, 81 aa, Enhydra lutris
QEPVTFADVAVLFTPEEWMFLDSAQRSLYRDVMLENYRNLASVGAGDQLGKPSMLSLSEPGEELWAPERRTFPGTRPEPQH

SEQ ID NO: 1157 - protein, 81 aa, Pongo sp.
EMGLLTFRDIAIEFSLAEWQCLDHAQRNLYRDVMLENYRNLVSLGIAVSKPDLITCLEQNKEPRNIKRNEMVAKHPGREKS

SEQ ID NO: 1158 - protein, 81 aa, Otolemur garnettii
LPDSLTFTDVAIDFSQDEWEWLSLAQRSLYRKVMLENYMNLVSVGLCISKPDVISLLEQEKEPWMVTEQITRGLCADLEYM

SEQ ID NO: 1159 - protein, 81 aa, Aotus trivirgatus
AQKVLTFRDVAIEFSLEEWKFLDPAQQNLYRDVMLENYRNLFSIGLTVSKPGLITCLEQRKAPWNLKRREAVDGHIFFAEY

SEQ ID NO: 1160 - protein, 81 aa, Papio anubis
FQGSVSFKDVTVGFSQEEWQHLDPSQRALYRDVMLENYSNLVSVGYCVHKPEVIFRLEQGEEPWRLEEEFPSQSFPEVWTA

SEQ ID NO: 1161 - protein, 81 aa, Neomonachus schauinslandi
AQGHVTFEDVAVYFSWEEWGLLDEAQRLLYRDVMLENFSLMASLGLASSMTHEITQLEWWREPFLPPCGVMTAAMPRDGRQ

SEQ ID NO: 1162 - protein, 81 aa, Monodelphis domestica
PQGSVTFRDVAVNFSQDEWGRLDPSQKELYREVMLENYHNLVCLGLAASKPDVIDQLERGEAPWMPGIGCPDQKIRSDTQE

SEQ ID NO: 1163 - protein, 81 aa, Monodelphis domestica
IQESVTFKDVSVDFTWEEWRHLDPAQRDLYRNVMLENYENLVSVGISVSTVDMISLLEKRDGPWMPEGEVSGAICPDSLNE

SEQ ID NO: 1164 - protein, 81 aa, Sarcophilus harrisii
FQESLTFKDVAVDFTYEEWQQLNPDQRYLYRDVMLENYKNLVFLGHQISKPDVISQLEQGKEPWPIEREIFTYSCRDWETK

SEQ ID NO: 1165 - protein, 81 aa, Cercocebus atys
FQGSVTFTDVAIDFSQEEWRWLQPAQRDLYRCVMLENYGHLVSLGLSISKPDVVSLLEQGKEPWLGKRNVNRDLFSVSESR

SEQ ID NO: 1166 - protein, 81 aa, Physeter macrocephalus
SQSLVTFGDVAVEFSPEEWEWLDSAQRSLYRSVMLENYRSLVSLGLCVSKPKMISSLEQRKEPWAAKRTLTRGGCSDSRAL

SEQ ID NO: 1167 - protein, 81 aa, Monodelphis domestica
AQVLVTFQDVAVDFTQEEWRLLDPGQKELYKEVMLDNAQNMLFLGLPVPREDWFSHFHEGGASWMLEGEDPSNSGLDGERR

SEQ ID NO: 1168 - protein, 81 aa, Monodelphis domestica
PQGLVTFRDVAVDFTREEWRLLSPRQKELYKEVMLENAGNLLSLGLPVPREDVISYFEQKDVPWMLEQKALRSFCPGGPVK

SEQ ID NO: 1169 - protein, 81 aa, Physeter macrocephalus
APLPLTFEDVAVYFSEQEWRNLEAWQKELYKQVMRTNYEILVSLDDGLPKPELISWLEQGRELFKNWGESQKSGNIICFSA

SEQ ID NO: 1170 - protein, 81 aa, Aotus trivirgatus
SQGLVTFGDVAIDFSQEEWEWLSPIQRNLYRKVMLENYRNLASLGLCVSKPDVISLLEQGKEPWTVKRKMTRAGCPDLKAV

SEQ ID NO: 1171 - protein, 81 aa, Leptonychotes weddellii
AHHLVMFRDVAVDFSQEEWECLNSYQRNLYRDVILENYSNLVSVGCSISKPDVITLLEQGKEPWMVVRDERRRRSLDLESR

SEQ ID NO: 1172 - protein, 81 aa, Felis catus
AQESLTLEDVAVDFSREEWRLLAPAQKDLYRDVMLENYRNLVSVGHQASKPDVLARLERGEEPWAIEEEVRSGTSPETGKV

SEQ ID NO: 1173 - protein, 81 aa, Leptonychotes weddellii
PQEPVTFEDVAVYFTQNQWASLDPTQRALYREVMLENYASVASLVFPFPKPDLVSQLEREEAPWGPDPWEAEVLRGICPGG

SEQ ID NO: 1174 - protein, 81 aa, Neomonachus schauinslandi
SLESDVFTDVAIVFSQEEWEQLAPAQRDLYRDVMLETYSNLVSLGLAIAKPDVISFLEEGKEPWVVEKTSRGGLCPVLESR

SEQ ID NO: 1175 - protein, 81 aa, Monodelphis domestica
AQEVVTFQDVAVDFTREEWRLLSPPQKELYKEVMLENARNLLSVGLPAPPDDVVSYLEQREGPSMLDQEDLRTCGPEGEIR

SEQ ID NO: 1176 - protein, 81 aa, Monodelphis domestica
IQGSLTFKDVAVDFTQEEWCLLDHSQKELYLEVMLENVQNLLSVGLPVPREYCTSYFQQEKARWLLEQKCPRSSSPEAETN

SEQ ID NO: 1177 - protein, 81 aa, Monodelphis domestica
PQESVTFEDVAVYFTQKEWEGLAPAQRALYRDVMLENYGNLVSLAFLFPKPAVISQLEQGEKPWIQTPQRPLDKKKTYKGC

SEQ ID NO: 1178 - protein, 81 aa, Monodelphis domestica
SQGSITFKDVAVDFTQEEWCLLDPSQKELYREVMLENVQNLLFVETNFEVKEISTKQSLFVEGSGPPRGKNKGPCDFLLRE

SEQ ID NO: 1179 - protein, 81 aa, Monodelphis domestica
NLEAVTFQDVAVEFTCEEWRHLAPPQKELYRDVMLENYKNLVRLGLAVSKPDVISQLERREAPWMPGGIQRSRCPDWEASC

SEQ ID NO: 1180 - protein, 81 aa, Monodelphis domestica
SQGSITFKDVAVDFTQEEWCLLDHSQKELYLEVMLENVQNLLSVGLPVPRENFISCLQQGKAPWLLAQKDSRNSCLEAKTN

SEQ ID NO: 1181 - protein, 81 aa, Monodelphis domestica
IQGSLTFKDVAVDFTQDEWCLLDNSQKELYLEVMLENVQNLLSVGLPVPREYLTSCFQQGEAPWLLEQEVPRSSCPEAETN

SEQ ID NO: 1182 - protein, 81 aa, Neomonachus schauinslandi
SQGLVTFRDVALDFSQEEWEWLDPSQKDLYRDVMLENYRNLVWLGLSISKPNMISLLEQGKEPWMVEKEMSDGQCADWESW

SEQ ID NO: 1183 - protein, 81 aa, Neomonachus schauinslandi
FQETVTFKDVAVVFSEEELGLLDSTQRKLYRDVMLENFRNLVSVGHSSSKPDMISQLEREEKLCMKEIHTERGRHSGGRNQ

SEQ ID NO: 1184 - protein, 81 aa, Physeter macrocephalus
EEVPVVFEDVAVYFTREEWAALDKRQKELYRDVMRTNYELLASLGPAAAKPDLISKLERRAAPWIRDPDGPEWGKGRPPGK

SEQ ID NO: 1185 - protein, 81 aa, Physeter macrocephalus
FQELVSFKDVTVGFTQEEWQHLDPTQRSLYRDVMLENYSNLVSVGYCVTKPEVIFRLEQGEEPWILEEEFPRQSFPEVWKI

SEQ ID NO: 1186 - protein, 81 aa, Physeter macrocephalus
MAFRDVAVDFTQEEWMLLSPAQRSLYREVMLENYSNLVSLGIPFSKPKLITQLEQGKETWREERKCPPANGPPEPKPELHL

SEQ ID NO: 1187 - protein, 81 aa, Aotus trivirgatus
EPGTVSFGDVAVYFSREEWGCLRPAQRALYRDVMRETYSHLGALGVGGSKPALISWVEEEAELWGPAAQDPEVAKRPTEAD

SEQ ID NO: 1188 - protein, 81 aa, Felis catus
AQAPLSFEDVAVSFSREEWRLLVPAQKDLYRDVMLENYRNLVSVGYQASEPGSLFQLEHAGPLRAVEGAAPRPPCPEEIWE

SEQ ID NO: 1189 - protein, 81 aa, Monodelphis domestica
MLFQELVTFKDVAVDFTQEEWKCLAPSQKELYREVMLENYRNLVSLGRAVSKPELIHQLERGETPWRPKGDGWRNSLRPGE

SEQ ID NO: 1190 - protein, 81 aa, Monodelphis domestica
GQEEVAFKDVAVDFTREEWRLLSPPQKELYKEVMLENIRNLLSVGLPAPPEDMISYLEQREAPWMLEQEGLRSYSPGEEIR

SEQ ID NO: 1191 - protein, 81 aa, Monodelphis domestica
GQEEVTFKDVAVDFTREEWRLLSPPQKELYKEVMVENARNLLSVGLPAPTKDVLSYLKKRGAPVMLEQEGLRNYFPEGEIR

SEQ ID NO: 1192 - protein, 81 aa, Monodelphis domestica
FQESVTFKDVTVNFTQEEWEQLNPAQRELYRDVMLENYRNLISLGLPISKPDVIFQLEQGQEPWMLDVQGTERQAVPRSTS

SEQ ID NO: 1193 - protein, 81 aa, Aotus trivirgatus
VAFEDVAVNFTQEEWALLDPSQKNLYREVMQETLRNLASIGQRWSNQNAEDKHQNPRRNLRRLIGERLFQSKESHQHVEVL

SEQ ID NO: 1194 - protein, 81 aa, Myotis davidii
MVFEDVAVYFSREEWGLLDSAQRALYRQVMLENFALVASLGLSASRPRIVLQLERGEEPWVLSGLDVALARDAQRRPGPGE

SEQ ID NO: 1195 - protein, 81 aa, Cercocebus atys
EELPVVFEDVAVYFTREEWGMLDKRQKELYRDVMRMNYELLASLGPAAAKPDLISKLERRAAPWIKDPNGPKWGKGRPPGN

SEQ ID NO: 1196 - protein, 81 aa, Camelus dromedarius
WKESLSFEDVALYFTREEWSRLDWAQKDLYRDVMLENYRNMIVLGFQFPKPEVICQLEQWEEPWILDLPRAGTRKASGSAC

SEQ ID NO: 1197 - protein, 81 aa, Cercocebus atys
SQESVAFEDVAVYFTTKEWAIMVPAERALYRDVMLENYEAVAFVVPPTSKPALISHLEQGKESCFIRPQGVLSRSDWRAGL

SEQ ID NO: 1198 - protein, 81 aa, Neomonachus schauinslandi
QPREAVTFKDVEVTFSQDEWGWLDPAQRNLYRDVMLENYGNVVSLVGPFTKPVLISWLEAREPWGLNVQGAQPKGKPGVAP

SEQ ID NO: 1199 - protein, 81 aa, Monodelphis domestica
AQVLVTFQDVAVDFTQEEWRLLDPGQKELYKEVMLENAENMLFLGLPVPREDWFFHFHEGGDPWMLEGKGPSISRLDEERH

SEQ ID NO: 1200 - protein, 81 aa, Physeter macrocephalus
AQGLVLFEDVSVDFTQKEWQLLDRTQRLLYRDVMLENYGHLVSLGHCVSKPELILKLEQEEEPWILKGQLASESHPEVQRT

SEQ ID NO: 1201 - protein, 81 aa, Monodelphis domestica
VKEVVTLQDVAVDFTWEEWRLLSPPQKELYREVMLENAQNLLSVGLPAPLEDVLSYLEQRKGPWMLEQKRLRSCCPGEIRL

SEQ ID NO: 1202 - protein, 81 aa, Neomonachus schauinslandi
LQVSVSFEDVTVDFSREEWQHLDPAQRRLYRDVTLENYSHLHSVGYQVPKPEVIFKLEQGEGPWTLEGETPHQGCSDEAIG

SEQ ID NO: 1203 - protein, 81 aa, Monodelphis domestica
FQASVTFKDVAVDFTWEEWRLLDPPQKELFWEVMLENYRNLVCLGLADSNKDVMISELESGEPHWIPTGGVLRSCWPGWES

SEQ ID NO: 1204 - protein, 81 aa, Camelus dromedarius
GQESVSFKDVTVDFTWDEWLQLTGMQRTLYRDVMLENYSHLVSVGCCITKPEVIFKLEQGEEPWPREGELPGRRDPDRSQE

SEQ ID NO: 1205 - protein, 81 aa, Felis catus
FQESVTFEDVAVYFSENEWIGLAPAQRVLYRDVMLENYGVVASLAFPFPKPALISQLERGEAPWCKAPQGAVDGECPRGVS

SEQ ID NO: 1206 - protein, 81 aa, Vulpes vulpes
FQEAVTFKDVAVVFSEEELGLLDPTQRKLYRDVMLENFRNLVSLGHSSSKPDVISQLEREEKLCTKEFHTQGGGRNQKEME

SEQ ID NO: 1207 - protein, 81 aa, Pan troglodytes
FQEPVTFEDVAVYFTQNEWASLHPMQRALHREVMLENYANVTSLSAFPFPKPDLIFQLEQGEAAWGPDPWTLAGGETLRGM

SEQ ID NO: 1208 - protein, 81 aa, Myotis davidii
PNALVTFQDVFVDFSPEELASLSAAQRRLHREVTLENYRNLVSLGYQFPRPDIITQLEEEESSAMEEDSNTKTGPDWETGP

SEQ ID NO: 1209 - protein, 81 aa, Monodelphis domestica
PGQEVVTFKDMAVDFTREEWRLLTPPQKELYKEVMLENARNLLSVGFAVPGDVISYLEQREAPWLLEQEGLRSCSPGDISP

SEQ ID NO: 1210 - protein, 81 aa, Monodelphis domestica
APAPVSFRDVAVDFTRQEWQLLAPAQRALYREVMLENYRNVASLGHPVSKPNVIFQLEQSEAPWMPEGEAARSLPPDWEAR

SEQ ID NO: 1211 - protein, 81 aa, Monodelphis domestica
SITFKDVVVDFTQEEWCLLDPSQKELYREVMLENVQNLFFVEAETNFEVKEMSTKMRLFVEGSNSPRGMKRNPCDFLFREI

SEQ ID NO: 1212 - protein, 81 aa, Pan troglodytes
ALRSVMFSDVSIDFSPEEWEYLDLEQKDLYRDVMLENYSNLVSLAGCFISKPDVISSLEQGKEPWKVVRKGRRQYPDLETK

SEQ ID NO: 1213 - protein, 81 aa, Leptonychotes weddellii
LLTFEDVAVSFSEEEWKLLDPTQKILYNDVMQENYETVISLGLKLKNDTGNDQPISLSALEIQASGCKVLRKARMKVAQKT

SEQ ID NO: 1214 - protein, 81 aa, Monodelphis domestica
GARVLVSFADVAVYFSPEEWGRLRPEQRALYRDVMRETYGHLGALGFPGPKPALISWMEEAAWDSEAKPVIKRLEDVGQPP

SEQ ID NO: 1215 - protein, 81 aa, Monodelphis domestica
RQERVTFGDVAVDFTLDEWVCLDSAQKALYRDVMLENYGHLVCLGLAGAKPAVIQRLERGEAAWCPGVPGSRLPDWETRLE

SEQ ID NO: 1216 - protein, 81 aa, Camelus dromedarius
PLETVTFGDVVLDFTQEEWALLDTSQKKLFRDVMLENIHHLVSVGYQISKSDVILQLEQGKELWREGEGRPQGRGPGSESP

SEQ ID NO: 1217 - protein, 81 aa, Camelus dromedarius
FQESVTFEDVAIYFSENEWTGLAPAQRALYRDVMLENYGAVASLAAFPFPKPALIFQLEQGEAPWSSAPQGALDGEGPRGI

SEQ ID NO: 1218 - protein, 81 aa, Pongo sp.
SKAPVTFGDLAIYFSQEEWEWLSPIQKDLYEDVMLENYRNLVSLGLSFRRPNVITLLEKGKAPWMVEPVRRRRAPGWTTMM

SEQ ID NO: 1219 - protein, 81 aa, Callithrix jacchus
ASGTLTFDDVALYFSEQEWEILEKWQKQMYKQEMKTNYETLDSLGYAFSKPDLITWMEKGRMLLISDQGRLHKTKRTAGPP

SEQ ID NO: 1220 - protein, 81 aa, Ovis aries
HQEVVTFEDVAVYFTQTEWAGLSPAQRALYRSVMLEIYGNLTSLGYPVPKPALVSLLERGDLPVGLETQDNPPAQGTRDIY

SEQ ID NO: 1221 - protein, 81 aa, Enhydra lutris
HQGLLTFRDVAVEFSLEEWGRLTHTQRQLYRDVMLENYGHLLFLGLIVSKPDLVSFLEQKKEPWNLKRKKTVAFHPAISSH

SEQ ID NO: 1222 - protein, 81 aa, Enhydra lutris
RPGAVSFADVAVYFSPEEWGCLRPAQRALYRDVMRETYGHLGALGFAGSKPALISWLERKKEVWSPEAEDPEDGARHPGSG

SEQ ID NO: 1223 - protein, 81 aa, Pongo sp.
SKAPVTFGDLAIYFSQEEWEWLSPIQKDLYEDVMLENYRNLVSLGLSFRRPNVITLLEKGKAPWMVEPVRRRRAPELTEAS

SEQ ID NO: 1224 - protein, 81 aa, Pongo sp.
CYQDSVTFDDVAVDFTQEEWTLLDSTQRSLYSDVMLENYKNLATVGGQIIKPSLISWLEQEESKTVQGGVLQGRKTQWRGT

SEQ ID NO: 1225 - protein, 81 aa, Enhydra lutris
SQSLVTFGDVAVDFSREEWEWLSSAQRTLYRTVMLENYRNLVSLGLCISKPDMISSLEQRKEPWMAKRKLTRGRCPDLKIV

SEQ ID NO: 1226 - protein, 81 aa, Pongo sp.
ACGSITFRDVAIDFSHQEWEYLNLVQKTLYQEVMMENYDNLVLLGHSKSKPDLITLLEQGKEPWMIVREETRGECTAELQS

SEQ ID NO: 1227 - protein, 81 aa, unidentified
  source 1..81: note = Bos indicus x Bos taurus
HQEVVTFEDVAVYFTRTEWAGLSPAQRALYRSVMLEIYGSLTSLGYPVPKPALISLLERGDLPVGLETQDNPPAQGTRDIY

SEQ ID NO: 1228 - protein, 81 aa, Vulpes vulpes
FQGSVSFKDVTVGFTLEEWQHLDSTQRSLYRDVMLENYSNLVSLGYCVTKPEVIFRLEQGEEPWILEEEFPSQSFPESWET

SEQ ID NO: 1229 - protein, 81 aa, Otolemur garnettii
SVMFNDISIVFSQEEWEYLDLEQKDLYKDVMLENYGNLVSLGCFIAKPDVISLLEQGKEPWKVIRKGRRGYPDLETRYETK

SEQ ID NO: 1230 - protein, 81 aa, Otolemur garnettii
GTVVFSDVSVDFSQEEWECLDPVQRDLYREVMLENYSNLVSVGAGPYIPKPQVISLLEQGKEPWMVGRELTRGLCSDLESM

SEQ ID NO: 1231 - protein, 81 aa, Enhydra lutris
PQDLMTFEDVAVEFTQWEWGQLDPAQKDLYRVVMLENFKNLASLGFPVAKPYVISQLEKGKEPCVLEGEISTDWEKRPKAK

SEQ ID NO: 1232 - protein, 81 aa, Camelus dromedarius
TPEPVRFADVAVYFSLEEWGCLQPAQRALYRDVMRETYGHLGALGFRGTKPALISWVEKEAELWGPDARDPEVGECLTEAD

SEQ ID NO: 1233 - protein, 81 aa, Camelus dromedarius
PQGLVTFGDVAVDFSQEEWEWLDCAQRTLYRSVMLENYRSLVSLGLCVSKPEMISSLEQRKEPWTVKRKCTRGQCPDSEAV

SEQ ID NO: 1234 - protein, 81 aa, Myotis davidii
EPVTFKDVAVVFSEEELGLLDSVQRKLYRDVTLENFRNLVSVGHLFSKPDVISQLEREEQLWMTEIQTQRGGHSAENCAAR

SEQ ID NO: 1235 - protein, 81 aa, Pongo sp.
YEEMVTFEDVAVHFTKTEWTGLSPAQRALYRSVMLENFGNLTALGYPVPKPALISLLEGGDMAWGLEAQDDPLAEMTKNVC

SEQ ID NO: 1236 - protein, 81 aa, Monodelphis domestica
AQEMVTFQDVAVDFTREEWCLLSPPQKELYKEVMLENARNLLSVGLPALPEDVISYLEQREAPWMLEREGPRSCCPGEILL

SEQ ID NO: 1237 - protein, 81 aa, Monodelphis domestica
EELPVVFEDVAVYFTREEWAMLDKRQKELYRDVMRMNYELLASLGPAAPKPDLILKLERRAAPWIKDPNGPKWGKGRPPGK

SEQ ID NO: 1238 - protein, 81 aa, Physeter macrocephalus
MTFEDVAVEFTRWEWGQLDPTQKDVYREVMLENFKNLASLGFPMSKPYVICRLEEGEEPCILEREISTGAPADWERRRQAK

SEQ ID NO: 1239 - protein, 81 aa, Monodelphis domestica
IQGSLTFKDVAMNFTQEEWCLLDHSQKELYLEVMLENVQNLLSVGLPVPREYYTSYFQQEKAPWLLVQKGPRNSSPEAETN

SEQ ID NO: 1240 - protein, 81 aa, Monodelphis domestica
PPRQERVTFGDVAVDFTLDEWVCLDSAQKALYRDVMLENYGHLVCLGLAGAKPAVIQRLERGEAAWCPGVPGSRLPGLFFF

SEQ ID NO: 1241 - protein, 81 aa, Monodelphis domestica
FQESVTFKDVAVDFTQEEWKQLDPAQRDLYRDVMLENYRNLVSLGLPVFKPDVISQLERGEAPWIPEVPRSICQGEVVRTR

SEQ ID NO: 1242 - protein, 81 aa, Aotus trivirgatus
METLTFRDVAIEFSLEEWQCLDIAQQDLYRKVMLENYRNLAFLGIALTKPDLITCLEQRKVPWNMKRHEMADEPPVLCSNF

SEQ ID NO: 1243 - protein, 81 aa, Monodelphis domestica
PQASVTFKDVAVDFTWEEWRLLDPSQKELFWEVMLENYRNLVCLGLADSNKDVRISELESGEPHWIPTGGVLRSCWPGWES

SEQ ID NO: 1244 - protein, 81 aa, Monodelphis domestica
PAQVLVTFKDVAVDFTQEEWRLLDPHQKELYKEVTLENAWNMLSMGLPVPRDLVSHFKQVEAPWMLEEEGSSNSCLDGERR

SEQ ID NO: 1245 - protein, 81 aa, Monodelphis domestica
PQELVTFRDVAVDFTPEEWGQLGPAQKELYQEVMLENYRNLVCLGLTVSKPDVISQLEQGEAPWRLEGGSARGRCLDWGMR

SEQ ID NO: 1246 - protein, 81 aa, Monodelphis domestica
CQETLTFKDVAVDFTREEWGQLGPAQRDLYKEVMLDNYRNLISLGLQGSKPDVIFWLERGQSPWTLKRRKSRDCCPEFHLH

SEQ ID NO: 1247 - protein, 81 aa, Monodelphis domestica
PQELVTFEDVAVYLTKEEWEHLGPAQRRLYRDVMLENYENVVSLGFPVSKPDLISQLEQGEVPCLPDLPRTEVPEIHGGPL

SEQ ID NO: 1248 - protein, 81 aa, Papio anubis
FQGSVTFRDVAIDFSQEEWKWLQPAQRDLYRCVMLENYGHLVSLGLSISKPDVVSLLEQGKEPWLGKRNVNRDLQALCIPI

SEQ ID NO: 1249 - protein, 81 aa, Papio anubis
AQMLVTFKDVAVTFTQEEWRQLDLTQRTLYREVMLETCGLLVSLGHRVPKPELVHLLEHGQELWTVKRGLSDPTCAGDRTQ

SEQ ID NO: 1250 - protein, 81 aa, Monodelphis domestica
MELVTFEDVAVYFTRKEWGWLDPAQRDLYRDVMLENYGNFVSMGLPFSKPDVISQLEQGEESWVEDLQECEEGEFSPVVHS

SEQ ID NO: 1251 - protein, 81 aa, Monodelphis domestica
AWEVVTFQDVAVDFTREEWRLLSPPQKELYKEVMLENVRNLLSVGLPAPPDDVVSYLEQREGPSMLDQEDLRTCGPEGEIR

SEQ ID NO: 1252 - protein, 81 aa, Monodelphis domestica
QLGSVAFEDVAVDFTQEEWGYLAPAQRDLHREVMLENYRNLVFLGLVASKPDVICHLEQRKEPWSLRGIEKRKALRGTCPD

SEQ ID NO: 1253 - protein, 81 aa, Monodelphis domestica
AQVLVTFQDVAVDFTQEEWRLLDPGQKELYKEVMLENVQNVLSLGLPVPREDWFFHFHEGGDPWMLEGKGPSISRLDEERH

SEQ ID NO: 1254 - protein, 81 aa, Monodelphis domestica
SQVSLTFRDVAVDFSQEEWGLLEPAQKDMYRDVMLENYENFLSLGLPISKPNMISQLKRREAPSWIAEGKVSLSTYLGTLR

SEQ ID NO: 1255 - protein, 81 aa, Physeter macrocephalus
FQEPVSFKDVSVVFTEEELGLLDSAQRKLYRDVMLENFQNLLSVGNQPFKPELIFQLEREEELLMMETETQRDGCSGTKSQ

SEQ ID NO: 1256 - protein, 81 aa, Lipotes vexillifer
SLGSDLFRDVAVVFSQEEWEQLAPAQRDLYRDVMLEIYSNLVSLGFAISKPDVISFLEQGREPWMVEKVVTGGQCPVLESR

SEQ ID NO: 1257 - protein, 81 aa, Monodelphis domestica
SEETVTFKDVAVDFTWEEWKQLTPVQRDLYRDVMLENYQNLVSLGLPVFQSDLISQLERGEVPWIPEGETFRGPCPGSINQ

SEQ ID NO: 1258 - protein, 81 aa, Otolemur garnettii
LQGSVSFKDVTVDFTQEEWQQLDPAQKALYRDVMLENYCHFVSVGFHMTKPDMIRRLEQGEELWTERIFPGQSYLEEDGKA

SEQ ID NO: 1259 - protein, 81 aa, unidentified
  source 1..81: note = Bos indicus x Bos taurus
TQVSVTFDDVAVTFTQEEWGHLDPAQRTLYREVMLETCRLLVSLGCPVPRPELIYRLEHGQELWTVKRDLSRSTCAVDEGK

SEQ ID NO: 1260 - protein, 81 aa, Pan troglodytes
EPGAVSFADVAVYFSPEEWECLRPAQRALYRDVMRETYGHLGALGFPGPKPALISWMEQESEAWSPAAQDPEKGERLGGAR

SEQ ID NO: 1261 - protein, 81 aa, Otolemur garnettii
FQGPVTFRDVAIDFSQEEWKWLQPAQRDLYRCVMLENYGHLVSLGLSISKPDVVSLLEQGKEPWLEQGDVRRNLFSVSQSN

SEQ ID NO: 1262 - protein, 81 aa, Enhydra lutris
LQEPVTFADVAVLFTPEEWMFLDSAQRSLYRDVMLENYRNLASVGDQLGKPSMLSLSEPGEELWAPERRTFPGTRPEPQHQ

SEQ ID NO: 1263 - protein, 81 aa, Pongo sp.
RRESVTFEDVAVYFSENEWIGLGPAQRALYRDVMLENYGAVASLAFPFPKPALISQLERGETPWCSVPQGALDGEAPRGIS

SEQ ID NO: 1264 - protein, 81 aa, Pongo sp.
MVTFEDVAVHFTKTEWTGLSPAQRALYRSVMLENFGNLTALGYPVPKPALISLLEGGDMAWGLEAQDDPLAETTKNVCKDV

SEQ ID NO: 1265 - protein, 81 aa, Pan troglodytes
FEELVTFEDVLVDFSPEELSSLSAAQRNLYREVMLENYRNLVSLGHQFSKPDVISRLEEEESHAMETDSRHTVICPGESHD

SEQ ID NO: 1266 - protein, 81 aa, Enhydra lutris
RPRAVKFADVAVYFSPEEWGCLRPAQRALYRDVMRETYGHLSALGCSGPKPALISWLERNTDDWEPAALDPQECPRGLTVQ

SEQ ID NO: 1267 - protein, 81 aa, Zalophus californianus
SLESDLFRDVAIVFSQEEWEQLAPAQRDLYRDVMLETYSNLVSLGLAIAKPDVISFLEQGKEPWVVEKMSRGGLCPVLESR

SEQ ID NO: 1268 - protein, 81 aa, Rhinolophus ferrumequinum
SQGLVTFRDVALDFSQEEWEWLDPSQKDLYRDVMLENYRNLVCLGLSISKPNMISLLEQGKEPWMVQREMSDDPYTDWESW

SEQ ID NO: 1269 - protein, 81 aa, Rhinopithecus roxellana
EMVTFKDVAVVFTEEELGLLDSAQRKLYRDVMLENFRNLLLVAHQPFKPDLISQLEREEKLLMVEMETPKDGCSGRKNQQK

SEQ ID NO: 1270 - protein, 81 aa, Zalophus californianus
PQESVTFKDIAVDFTQEEWALLDTSQRKLYRDVMLENISHLVSVGYHLCKSDVVSQLEQGVELWREGRGFPQGPNPDRKSG

SEQ ID NO: 1271 - protein, 81 aa, Panthera pardus
AQGSVVFSDVSVDFSQEEWECLDSGQRDLYRDVMLENYSNLLSMGFYIPKPPVISLLEQGKEPWMVGRELTKGLCSDLESM

SEQ ID NO: 1272 - protein, 81 aa, Vicugna pacos
SKAPVTFGDLAIYFSQEEWEWLSPIQKDLYEDVMLENYQNLVSLGLSFRRPNVIALLEKGKAPWMVEPVKRRRGLDSGSKC

SEQ ID NO: 1273 - protein, 81 aa, Zalophus californianus
ARASLSFEDVAVGFSWEEWQLLAPSQKDLYRDVMLENYRNLVSVGYQASKPDSVFQLEQGEPPWMVEGAAQSQTCQGYPAT

SEQ ID NO: 1274 - protein, 81 aa, Callorhinus ursinus
SHGPLSFEDVAIAFTKEEWQQLDPAQRTLYRDVMLENFSHLVSLGHPVSKPDIISKLEQGEEPWIIKRHISDWICPERETR

SEQ ID NO: 1275 - protein, 81 aa, Zalophus californianus
SQEPVTFEDVAVYFTQNQWASLDPMQRALYLEVMLENYANITSLAALPFPKPDLILQLEQGGAPWGLDPWTPLEGEALGGV

SEQ ID NO: 1276 - protein, 81 aa, Pan paniscus
MLMMFRDVAVDFSQEEWECLDLEQRGLYRDVMLENYSNMVSLGLCIYQPEAFSLLEKGKEPWKILRDETRGPCPDMQSRCQ

SEQ ID NO: 1277 - protein, 81 aa, Tursiops truncatus
QAEVTFEDVAVLLSREEWGRLGPVQKGLYRDVMLETYRNLVSLGAGPAGPKPEVITQLERGDEPWVPDVQGRERPTIDGSA

SEQ ID NO: 1278 - protein, 81 aa, Tursiops truncatus
EEVPVVFEDVAVYFTREEWGTLDKRQKELYRDVMRMNYELLASLGPAAAKPALISKLERRAAPWIQDPNGPKWGKGRPPGK

SEQ ID NO: 1279 - protein, 81 aa, Panthera pardus
PQEPVTFEDVAVYFTQNQWASLDPMQRALYREVMLENYTNMASLAFPFPKPVLVSHLERGEAPWGPDPWEAEVLRGICPGG

SEQ ID NO: 1280 - protein, 81 aa, Tursiops truncatus
FQVLVSFEEVAVLLSQEEWGHLGPAQKRLYRDVMLETYGNLVSLGLQGSKPDVISKLEQGEEPWTPHSPRIEGSWIRRRRP

SEQ ID NO: 1281 - protein, 81 aa, Leptonychotes weddellii
AQESVVFSDVSIDFSQEEWECLNDDQRDLYRDVMLENYSHLVSMAGHSVSKPDVISVLEQGKEPWLVDRELTREQWPVLES

SEQ ID NO: 1282 - protein, 81 aa, Physeter macrocephalus
KSAAVSFSDVAVYFSLEEWGCLRPAQRALYRDVMRETYGHLGALGFPGPKPALISWMEQESEAWSPAAQDPEEGESLGGAL

SEQ ID NO: 1283 - protein, 81 aa, Carlito syrichta
LQGSVSFKDVTVDFTQEEWHQLNPAQKALYRDVMLENYCHFISVGFHMTKPDMIRKLEQGEELWTERIFSRQSHLEEDGKA

SEQ ID NO: 1284 - protein, 81 aa, Tursiops truncatus
SQSLVTFGDVAVEFSPEEWEWLDSAQRSLYRSVMLENYRSLVSLGLCVSKPKMISSLEQRKEPWVAKRTLTRGGCPDSRAL

SEQ ID NO: 1285 - protein, 81 aa, Panthera pardus
PQEPVTFEDVAVLFTPEEWMFLDSAQRSLYRDVMLENYRNVASVGDQLGKFSSFSHLEQGEEWWPTERRVFPGSCPEPSLP

SEQ ID NO: 1286 - protein, 81 aa, Phascolarctos cinereus
FQVSVTFQDVAVDFSRDEWKRLDDAQKALYRDVMLENYENLVSLGLPVSKLDVISLLERREAPRRAKERVPRDLPPDSISQ

SEQ ID NO: 1287 - protein, 81 aa, Physeter macrocephalus
HQEVVTFEDVAVYFTQTEWAGLSPAQRALYRSVMLEIYGNLTSLGYPVPKPALVSLLERGELPWGLETRDDPPAQGTKDIC

SEQ ID NO: 1288 - protein, 81 aa, Acinonyx jubatus
FQDFVSFNDVSVNFTEEEWRELDPVQRVLYRDVMLENYRNLVSLGFPFSKPDIISQLEQAVNPWMQEGEVLRGSCTHLETR

SEQ ID NO: 1289 - protein, 81 aa, Sus scrofa
FQEAVTFKDVAVTFTEEELGLLDSTQRKLYRDVMLENFRNLLLVGNQPFKPELIFQLEREEMLLMLETEIQRGTKSHHSLE

SEQ ID NO: 1290 - protein, 81 aa, Odocoileus virginianus
SKAPVTFGDLAIYFSQEEWEWLSPIQKDLYEDVMLENYQNLVSLGLCFRRPNVITLLEKGKAPWMVDPVKRRRGLDLGSKG

SEQ ID NO: 1291 - protein, 81 aa, Trichechus manatus
ARESVVFSDVSIAFSQEEWAHLDLEQKDLYRDVMLENYSNLVSLAGCFVSKPDVISLLEQGKEPWKIVRKGRRRYPDLETR

SEQ ID NO: 1292 - protein, 81 aa, Pteropus vampyrus
SQEPVSFLDVAVDFTQEEWQQLDPVQRTTYRDVMLENYSHLVALGYDSAKPNVIVKLEQGEEPWVAEGDLPCRSRPEEVWQ

SEQ ID NO: 1293 - protein, 81 aa, Vicugna pacos
SQHLVTFEDVAVNFTQEEWTLLDQTQRDLYRDVMLENYQNLMALAGSESCKPHVNSPLEGAEELRTRARRILQSEFMAESD

SEQ ID NO: 1294 - protein, 81 aa, Phascolarctos cinereus
PQELVTFEDVAVYLSKEEWGLLDPAQRRLYRDVMLENYGNVASLGLPVSKPDLISQLERTDLPLVPRLPQTEIEDLFDEKL

SEQ ID NO: 1295 - protein, 81 aa, Cercocebus atys
LKGLVTFEDVAVEFTQEEWALLDPAQRTLYRDVMLENFRNLASLGDQVDKPGLIAQLEQEDKVMTEERGILPGTCPDVENP

SEQ ID NO: 1296 - protein, 81 aa, Callithrix jacchus
KPGAVSFADVAVYFSPEEWGCLRPAQRALYRDVMRETYGHLGALGFPGPKPALISWMEQESEAWSSAAQDPENGESLGGAR

SEQ ID NO: 1297 - protein, 81 aa, Callithrix jacchus
EQEPVTFKDVAVDFTQEEWGQLDLVQRTLYRDVMLETYGHLLSVGNQTAKPEVISLLEQGEEPWSVEQTCPQRACPEWMRN

SEQ ID NO: 1298 - protein, 81 aa, Panthera pardus
SQGTVSFKDVAVNFTQEEWQYLDLPQRDLYKDVMLENYTNLISVGYQTTKPSVIHKLEQGEEPWMVEREIPNWSYAEETWQ

SEQ ID NO: 1299 - protein, 81 aa, Cebus imitator
MVSFEDVAVLLSQEEWDCLIPAQRGLYRDVMLETYGNLVSLGLQASKPDVISRLEQGDEPWTTHTLRTQGSWSWRHKREGY

SEQ ID NO: 1300 - protein, 81 aa, Vicugna pacos
AQETVTFKDVAVDFTQEEWGQLDPVQRTLYRDVMLETYGHLLSVGNQIAKPEVISLLEQGEEPWSMERVYPPQRTCPEWMR

SEQ ID NO: 1301 - protein, 81 aa, Pteropus vampyrus
SKASVTFADLAVYFSQEEWEGLSPIQKDLYEDVMLETYQNLVSVGLSCRRPSVITLLEKGKAPWTVEPARQRRGPDSGAKC

SEQ ID NO: 1302 - protein, 81 aa, Ursus arctos
WKELLSFEDVAMYFTREEWNRLDWAQKDLYRDVMLENYRNMILLGFQFPKPEVICLLEQWEEPWILDLPRAGTRKASSSAC

SEQ ID NO: 1303 - protein, 81 aa, Saimiri boliviensis
ALRSVMFSDISIDFSPEEWEYLDLEQKNLYRDVMLENYSNLVSLGCFISKPVVISLLEQGKEPWKVVRKRRQYPDLETKYE

SEQ ID NO: 1304 - protein, 81 aa, Physeter macrocephalus
SQESVSFEDVAVYFTQNQWASLDSAQRTLYRKVMLENYANVTSLAAFPFPKPDLILQLEQGEAPGGLDPWTPIRREVRGVC

SEQ ID NO: 1305 - protein, 81 aa, Sus scrofa
LVFEDVAINFTPEEWALLDPAQRRLYRDVMLETFKNLAFVGSCLHVKTSGSSAQRDILENVLCSEEKIVRFKRNDSKSVLG

SEQ ID NO: 1306 - protein, 81 aa, Nomascus leucogenys
MEGLVMFQDLSIDFSQEEWECLDAAQKDLYRDVMMENYSSLVSLGLSTPKPDVISLLEQGKEPWMVSRDVLGGWCPDRLKK

SEQ ID NO: 1307 - protein, 81 aa, Trichechus manatus
FQESVVFSDVSIAFSQEEWAHLDLEQKDLYRDVMLENYSNLVSLGCFVSKPDVISLLEQGKEPWKIVRKGRRRYPDLETRY

SEQ ID NO: 1308 - protein, 81 aa, Equus caballus
PPSLVTFGDVAIDFSQEEWEWLNSAQRTLYRNVMLENYRNLASLGLCGSKPDMISSLEQRREPWITKRKLTRGRCPDLKAV

SEQ ID NO: 1309 - protein, 81 aa, Mandrillus leucophaeus
EKGPLTFRDVVIEFSQEEWQCLDTAQQDLYRKVMLENFRNLVFLGIDVSKPDLITCLEQGKNPWNMKRHSMVATPPGVFFV

SEQ ID NO: 1310 - protein, 81 aa, Nomascus leucogenys
PQKSVTFEDVAVYFTQAEWDGLSPAQRTLYRDVMLENYGNVASLGFPLLKPAVISQLEGGGDLGGPSPLAAGTGLQGLRTV

SEQ ID NO: 1311 - protein, 81 aa, Chlorocebus sabaeus
KPGTVSFADVAVYFSREEWGCLRPAQRALYRDVMRETYGHLGALGVGGSKPALISWVEEAAELWDPAARDPEVTKCPTETD

SEQ ID NO: 1312 - protein, 81 aa, Mandrillus leucophaeus
VHGSVTFRDVAIDFSQEEWECLQPEQRTLYRDVMLENYSHLISLGSSVSKPDVITLLEQEKEPWIVVRKETSRWYPDLESK

SEQ ID NO: 1313 - protein, 81 aa, Sus scrofa
CKESVIFKDVCVNFSLEEWECLDLTQRNLYRCVMLENYSNLVSVVGLSIPKPDVISLLEQGKEPWGVFDSEMTRGLNQDCG

SEQ ID NO: 1314 - protein, 81 aa, Chrysochloris asiatica
RREPVTFEDVAVYFSENEWSSLAPAQRALYRDVMLENYGAVASLAFSFPKPALISQLERGEAPWSLAPQGALDGEGSRGIS

SEQ ID NO: 1315 - protein, 81 aa, Suricata suricatta
KPGAVSFADVAVYFSPEEWGCLRPAQRALYRDVMRETYGHLGALGFRGTKPALICWVEEEADLWGPEARDPEVGACLTEAD

SEQ ID NO: 1316 - protein, 81 aa, Sus scrofa
SQVSVTFEDVAVLFSRDEWRRLGPSQKNLYQDVMLENYSNLVSLGLPFSKPKVISLLQQGEDPWKVEKESPGSFPGCKSSP

SEQ ID NO: 1317 - protein, 81 aa, Neophocaena asiaeorientalis
SQGSVTFRDVAVDFSREEWEWLQPAQRDLYRHVMLENYGHLVSLGLNISKPHVVSLLEQGKEPWLGKDASRGLFSASESNG

SEQ ID NO: 1318 - protein, 81 aa, Suricata suricatta
AHGSLMFSDVSIVFSQEEWECLDLEQRDLYRDVMLENYTNLVSLGCFISKPDVISLLEQGKEPWKVVRKRRGQYADLETRY

SEQ ID NO: 1319 - protein, 81 aa, Mandrillus leucophaeus
SKAPITFGDLAIYFSQEEWEWLSPIQKDLYEDVMLENYRNLVSLGLSFRRPNVITLLEKGKAPWMIEPVRRRRAPELTEAS

SEQ ID NO: 1320 - protein, 81 aa, Suricata suricatta
QAEVTFEDVAVLFSREEWGRLGPAQRGLYRDVMLETYRNLASLGAGRAGSKPGVITQLERGDEPWVLDAQGAKGKGQPRVS

SEQ ID NO: 1321 - protein, 81 aa, Mandrillus leucophaeus
VHGSVTFRDVAIDFSQEEWECLQPDQRTLYRDVMLENYSHLISLGSSISKPDVITLLEQEQEPWMVVRKETNRWYPDLESK

SEQ ID NO: 1322 - protein, 81 aa, Chrysochloris asiatica
LQEAVTFKDVAVVFSEEELGLLDSAQRTLYRDVMLETFQNLVSLGHQPFKPDVISQLEREEMLWMKGLQTGRGRCSGGRNQ

SEQ ID NO: 1323 - protein, 81 aa, Sus scrofa
CKESVIFKDVCVNFSLEEWECLDLTQRNLYRCVMLENYSNLVSVGLSIPKPDVISLLEQGKEPWGVFDSEMTRGLNQDCGS

SEQ ID NO: 1324 - protein, 81 aa, Suricata suricatta
KPGVLTFADVAVYFSSEEWGCLRPAQRALYRDVMRETYGHLGALGFPGPKPALISWMEQESEESEAWSPAAKDPEEGESLG

SEQ ID NO: 1325 - protein, 81 aa, Mandrillus leucophaeus
GPLTFRDVAIEFSQEEWKSLDPVQKALYWDVMLENYRNLVFLGILPKCMTKELPPIGNSNTGEKFQRVMLERHECYDIENF

SEQ ID NO: 1326 - protein, 81 aa, Pan paniscus
SPGLLTFRDVVIEFSLEEWQCLDHAQQNLYRDVMLENYRNLVSLGIAVSKPDLITCLEQNKDPWNIKRNEMVTKHPVMCSH

SEQ ID NO: 1327 - protein, 81 aa, Equus caballus
MIESQISFEDVAVDFTLEEWQLLNPTQKNLYRDVMLENYSNLAFLGYQIIKPDAVFQLEQEEQWITDEEILNHSCPEEVWL

SEQ ID NO: 1328 - protein, 81 aa, Sarcophilus harrisii
SQIPLTFQDVAVDFTWEEWGLLEPSQKDMYWDVMLEIYENFISLGGVPLSIPDVISQLERMEAPWMTQGGVLISTFLDSST

SEQ ID NO: 1329 - protein, 81 aa, Zalophus californianus
SQGLVTFRDVALDFSQEEWEWLDQSQKDLYRDVMLENYRNLVWLGLSISKPNMISLLEQGKEPWMVEKEMSDGQCADWDSW

SEQ ID NO: 1330 - protein, 81 aa, Loxodonta africana
KPGVVRFVDVAVYFSPEEWACLRPAQRALYRDVMRETYGHLGALGFPGPKPALISWMEQENEAWSPAAQDPEERENLGGVP

SEQ ID NO: 1331 - protein, 81 aa, Pteropus vampyrus
FQGSVMFRDVSINFSQEEWECLDPGQMNLYKEVMLENFSNLVSVGLSSAKPVVISLLEEGKEPWMVEREVKRGLCSDLESM

SEQ ID NO: 1332 - protein, 81 aa, Trichechus manatus
LKASVSFKDVAVELTQEEWQHMGPAQRTLYRDVMLENYSHLVSVGYCIFKPEVIFKLEQGEQPWFLEQEFSNQSYPEDYNI

SEQ ID NO: 1333 - protein, 81 aa, Neovison vison
SKVPVTFGDLAIYFSQEEWEWLHPAQRDLYRHVMLENYGHLVSLGLNISKPYVVSLLEQGRDPWLDNRDVRRDLFSESKGE

SEQ ID NO: 1334 - protein, 81 aa, Callorhinus ursinus
FQESVTFEDVAVYFSENEWTGLAPAQRVLYRDVMLENYGAVASLAAFPFPKPALISQLERGEAPWCKAPQGALDGEGPRGV

SEQ ID NO: 1335 - protein, 81 aa, Suricata suricatta
AQESVTFRDVAVVFSRDEWLCLDPAQRSLYREVMLENYGTLVSLGILFSKPKVIFQLQQGEDPWMVESGVSQGPCVGWESM

SEQ ID NO: 1336 - protein, 81 aa, Sarcophilus harrisii
PQECVTFKDVAVNFTQEEWQQLNPAQRDLYREVMLENYRNLISLGLPVSKPDVIFQLEQGEEPWMLDLQRIEEGEISRNMY

SEQ ID NO: 1337 - protein, 81 aa, Sarcophilus harrisii
LQESVTFSDVAVDFTLEEWGCLCPPQKEMYREVMLENYGNLVCLGLAMSKPDVISRLERGEAPRSPGGDLGSADWGTESGA

SEQ ID NO: 1338 - protein, 81 aa, Callorhinus ursinus
SQEPVTFEDVAVYFTQNQWASLDPMQRALYLEVMLENYANITSLALPFPKPDLILQLEQGEAPWGLDPWTPLDGEALGGVH

SEQ ID NO: 1339 - protein, 81 aa, Tursiops truncatus
TQVSVTFDDVAVTFTQEEWRQLDPAQRTLYQEVMLENCRLLVSLGCPVPRLELIFQLEQGQKLWTVKKDLSRSTCPGKRCR

SEQ ID NO: 1340 - protein, 81 aa, Sarcophilus harrisii
PQGPVTFQDVAVVFTQEEWRYLDPSQKELYRDVMLENYRNLLYLGLVVSKPNVIYRFEQGEASWRPDQRDSGSTCSDEETG

SEQ ID NO: 1341 - protein, 81 aa, Pteropus vampyrus
MEPVTFEDVAVYFTQNQWASLDPVQRALYREVMLENYANVASLAFPFPKPVLISQLEQGEAPWGPDPGEAEVLKGIWPGGE

SEQ ID NO: 1342 - protein, 81 aa, Mandrillus leucophaeus
FEELVTFEDVFVDFSPEELSSLSAAQRNLYREVMLENYRNLVSLGYQFSKPDIISRLEAEESRAMEKDSRHTVICQGEAHD

SEQ ID NO: 1343 - protein, 81 aa, Aotus trivirgatus
PQDLMTFDDVAVEFTQWEWGQLNPAQKDLYREVMLENFRNLTLLGLLVSKPYMICQLEEGGEPFMVNTEISVGAHSDWERR

SEQ ID NO: 1344 - protein, 81 aa, Lipotes vexillifer
QAEVTFEDVAVLLSREEWGRLGPVQKGLYRDVMLETYRNLVSLGAGPAGPKPEVITQLERGDEPWVPDVQGREQPTIDGSA

SEQ ID NO: 1345 - protein, 81 aa, Zalophus californianus
SQEPVTFEDVAVYFTQNQWASLDPMQRALYLEVMLENYANITSLALPFPKPDLILQLEQGGAPWGLDPWTPLEGEALGGVH

SEQ ID NO: 1346 - protein, 81 aa, Equus caballus
TSAPVTFGDLAIYFSQEEWEWLSPVQKALYEDVMLENYQTLASLGLSFRRPNVITLLEKGKAPWMVEPVRRRRGLDSGSKC

SEQ ID NO: 1347 - protein, 81 aa, Equus caballus
RQEPVTFEDVAVYFTQNEWVILDPAQRALYREVMLENYANVASLAFSFTRPVLVSQLERGELPPGLDPWERASPEALRGIC

SEQ ID NO: 1348 - protein, 81 aa, Equus caballus
SQGSVTFGDVAIDFSREEWEWLQPAQRDLYRIVMLENYGHLVSLGLNVSKPDVVSLLEQGKEPWLGNGDVRRDLFSVSESN

SEQ ID NO: 1349 - protein, 81 aa, Equus caballus
AQESLTFDDVAVEFTWEEWQLLAPAQKDLYRDVMLENYSNLVSVGYQASKPDALSKLVQGEPPWTMEDEIHCRTHSEIWEV

SEQ ID NO: 1350 - protein, 81 aa, Physeter macrocephalus
QPQEAVTFKDVEVTFSQDEWGWLDASQRNLYRDVMLENYGNVASLVGPFTKPALISWLEAREPWGLNVQGAHPKGSPSAAP

SEQ ID NO: 1351 - protein, 81 aa, Pteropus vampyrus
EMDSVTFEDVAVNFTSEEWALLDPSQKKLYRAVMRETFRNLASIGLNLGKKWEDHNIEDRYKTHGKKLRSHMVEKLHESKE

SEQ ID NO: 1352 - protein, 81 aa, Pan paniscus
LRGLVTFEDVAVEFTQEEWALLDPAQRTLYRDVMLENCRNLASLGCRVNKPSLISQLEQDKKVITEERGILPSTCPDLETL

SEQ ID NO: 1353 - protein, 81 aa, Tursiops truncatus
MDSVTIEDVAVDFTLEEWALLGPSQRKLYRDVMQETLRNLAAVGAKREYHAIEDQYKNQGRKLRTFMVERFCKSKDISLCG

SEQ ID NO: 1354 - protein, 81 aa, Sarcophilus harrisii
ALESVTFQDVAVNFTHEEWGHLKPAQKDLYREVMMENYQNFVSLGLPFSKPHVISQLEKGEAPWITEKASLVPRVSCQDFF

SEQ ID NO: 1355 - protein, 81 aa, Callorhinus ursinus
PQESVTFKDIAVDFTQEEWALLDTSQRKLYRDVMLENISHLVSVGYHLCKSDVISQLEQGVELWREGRGFPQGPNPDRKSG

SEQ ID NO: 1356 - protein, 81 aa, Aotus trivirgatus
ESVAFEDVAVYFTQNQWASLDPAQRALYREVMLENYANVASLVAFPFPKPALISHLEKGEAPWGPDPWDAEIPSSLSQGDE

SEQ ID NO: 1357 - protein, 81 aa, Monodelphis domestica
FQESVTFRDVAVDFTQEEWRHLEPAQRALYRDVMLENYENLVSVGIPVSRLDVTSLLERQEAVWKDGGLRDSCLDSLSNKI

SEQ ID NO: 1358 - protein, 81 aa, Monodelphis domestica
SQELVTFEDVAIYFTEEEWGLLDPAQRKLYRDVMLENFGNVLLLGFPVSKPDIISKLERGEIPCVPFLPRKKILVIRLGGG

SEQ ID NO: 1359 - protein, 81 aa, Monodelphis domestica
SQEVVTFQDVAVNFTREEWRLLSPPQKELYREVMLENARNLLSVGLPASIEDVISNVEQREALWMLEREGLRSCCPEEDIR

SEQ ID NO: 1360 - protein, 81 aa, Trichechus manatus
AQEFVMFRDVAVFFSQEEWGHLDPAQRALYREVMLENYSNLVSLGIRFSKPKVISQLQQGEDPWMVDRGVPQGACQGWKSL

SEQ ID NO: 1361 - protein, 81 aa, Equus caballus
FQGSVMFSDVSIDFSQEEWEYLDLEQRALYRDVMLENYSNLVSLGCFISKPDVISLLEQGKEPWKVVRKGKRRYPDLETRY

SEQ ID NO: 1362 - protein, 81 aa, Equus caballus
QAELTFEDVAVFLSQEEWGRLDPAQRGLYRDVMLETYRNLVSLGAGPAGPKPGVITQLERGDEPWVLDTQGVEGRERQKVD

SEQ ID NO: 1363 - protein, 81 aa, Aotus trivirgatus
VQEPVTFKDVAVDFTQEEWGQLDLVQRTLYRDVMLETYGHLLSVGNQIAKPEVISLLEQGEEPWSVEQTCPQRSCPEWMRN

SEQ ID NO: 1364 - protein, 81 aa, Chlorocebus sabaeus
FEELVTFEDVFVDFSPEELSSLSAPQRNLYREVMLENYRNLVFLGYQFSKPDIISRLEVEESHAMETDSRHTVICQGEAHD

SEQ ID NO: 1365 - protein, 81 aa, Equus caballus
FQGSLSIEDVTVGFTQEEWQHLDPAQRTLYRDVMLENYSHLVSVGYCIPKPEVIFKLERGEQLWILEEESSSQSHPEVCKV

SEQ ID NO: 1366 - protein, 81 aa, Lipotes vexillifer
TQGLVTFRDVAIEFSQEEWKCLEPAQKDLYKDVTLENFSNLVSLGLSLPKPDVISLLEQGKEPWMVINDMTGPWCPDLESR

SEQ ID NO: 1367 - protein, 81 aa, Equus caballus
SQGLVTFEDVAVYFSLEEWERLDAAQRDLYKEVMQENYGILVSLGYPIPKPDLIFRLEQGEEPWVPDSPRPEEGDIVTGVY

SEQ ID NO: 1368 - protein, 81 aa, Suricata suricatta
AHHLVMFRDVAVDFSQDEWECLNSYQRNLYRDVILENYSNLVSVAGCSISKPDVITLLEQGREPWMVVRDERRRRTLDLES

SEQ ID NO: 1369 - protein, 81 aa, Callorhinus ursinus
AHHLVMFRDVAVDFSKEEWECLNSYQRNLYRDVILENYSNLVSVGCSISKPDVITLLEQGKEPWMVVRDERRRRSLDLESR

SEQ ID NO: 1370 - protein, 81 aa, Trichechus manatus
LQEAVTFKDVAVVFTEEELGLLDSTQRTLYRDVMLENFRNLVSLGHQSFKPDVISQLEREEKLWLKKLQTQRGRRSGGRSQ

SEQ ID NO: 1371 - protein, 81 aa, Equus caballus
PHRLVLFRDVAVDFSQEEWACLDSEQKDLYRDVMLENYSNLVSLGFSSSKADMLSLLEQGKEPWKVVQDVARSQSSDLGSR

SEQ ID NO: 1372 - protein, 81 aa, Suricata suricatta
PQKSVTFEDVAVYFTQTEWDGLSPAQRALYRDVMLENYGNVASLGFSLLKPAVILQLEGAGELGDPSLLVAGTEVGSQGVW

SEQ ID NO: 1373 - protein, 81 aa, Sarcophilus harrisii
VPALVTFRDVAVDFTQEEWRHLEPAQRALHRDVMLENFQNLVSVGLPVSKVDVISLLERGEAPWQPEGGGPPDPCYDYLNW

SEQ ID NO: 1374 - protein, 81 aa, Lipotes vexillifer
MAFKDVAVAFTQKEWKLLSPAQRTLYRDVMLENYSHMVSLGIAFPKPKLIIQLEQGDEPWREESESLLDLCPEPRTEFQPH

SEQ ID NO: 1375 - protein, 81 aa, Tursiops truncatus
AHGSVMFSDVSIDFSQEEWDYLDLEQRDLYRDVMLENYSNLVSLGCFVSKPDVIFLLEQGKEPWKVVRKGRRRYPDLETNY

SEQ ID NO: 1376 - protein, 81 aa, Trichechus manatus
PQGSVTFEDVAVDFSQEEWELLDPAQRTLYREVMLETCRNLVSLGCSLCQPVAPPHLEQGEAVWMVDRGIPQAFCSDWETR

SEQ ID NO: 1377 - protein, 81 aa, Sarcophilus harrisii
FHQLVTFEDVAVYLSKEEWKRLNLAQRELYRDVMLENYENLLSLGFPVSKPDIISQLEQRKEAWIVQGPEKRKFSQNAHRD

SEQ ID NO: 1378 - protein, 81 aa, Pteropus vampyrus
LLTFEDVAISFSEEEWKLMDPAQKMLYSDVMQENYETVISLGLKLKKDTGNDQPISTSTLEIQASGCKVLRKARMKVAQKT

SEQ ID NO: 1379 - protein, 81 aa, Trichechus manatus
QAAVTFEDVAVLLSREEWCRLAPAQRDLYRDVMLETYRNLISLGTGLTGPKPGVISQLERGHEPWVLDVQSTKGRVDGSDC

SEQ ID NO: 1380 - protein, 81 aa, Lipotes vexillifer
LQVSVSFEDVAVDFSREEWQQLDSTQRRLYQDVMLENYSHLLSLGCEIPKPEVIFKLEQGEEPWTLEEETPHQSCSDEKFG

SEQ ID NO: 1381 - protein, 81 aa, Trichechus manatus
FQESVTFEDVAVYFTQSQWASLGPLQRALYREVMLENYANVASLAFPFPKPVLISQLEREEAPLGPDPWETEVLRDICPGG

SEQ ID NO: 1382 - protein, 81 aa, Trichechus manatus
TQVSLTFDDVAVKLTWEEWQLLDPAQKDLYRDVMLENYSNLVSVGYQVSKPDALSRLERGEPPWSIEDKIHTRTFSGERPY

SEQ ID NO: 1383 - protein, 81 aa, Pan paniscus
MMTFRDVAIDFSQEEWKWLQPAQRDLYRCVMLENYGHLVSLGLSISKPDVVSLLEQGKEPWLGKKGISESSGEIKDFSPKN

SEQ ID NO: 1384 - protein, 81 aa, Lipotes vexillifer
ELVTFRDVVISFSQEEWEYLDSAQRDLYWDVMMENYSNLVSLDLESKYDKKTLSTEKDIIEKNDSQWEVIESSKLVGLANS

SEQ ID NO: 1385 - protein, 81 aa, Pteropus vampyrus
KPEDVSFAEVAVYFSLDEWGYLWPAQRALYRDVMRETYGHFGELGFPGPKPALISWMEQESEAWSPAAQDPEEGESVGGAV

SEQ ID NO: 1386 - protein, 81 aa, Pteropus vampyrus
SQSLVTFGDVAVDFSQEEWERLSSDQRDLYRRVMLENYRNLVSLGLCFSKPDIISSLEQRKELWMAKREVTRGQCPDWKAV

SEQ ID NO: 1387 - protein, 81 aa, Trichechus manatus
KTQVSLEFNDVAVEFAWEEWQLLDPAQKDLYREVMLENFHNLVSVGCQVGKPDVLFRLEREPPWSLEDEIHSQNFSEIQEV

SEQ ID NO: 1388 - protein, 81 aa, Sarcophilus harrisii
HQDLVTFKDVAVDFTPEEWGQLVPSQKELYRDVMLENYQNLVWLGLAVSKPDVIYQLEQVGGTWVPEGETLTVSCSDFVTR

SEQ ID NO: 1389 - protein, 81 aa, Monodelphis domestica
AQEVVSFKDVAVDFTREEWRLLSPPQKELYKEVMLENARNLLSVGLSAPPEDMFSSLEQREAPWMLEKDDLRSCCPEGKMR

SEQ ID NO: 1390 - protein, 81 aa, Tursiops truncatus
QPQEAVTFKDVEVTFSQDEWGWLDASQRNLYRDVMLENYGNVTSLVGPFTKPALISWLEAREPWGLNVQGAHPKRSPSAAP

SEQ ID NO: 1391 - protein, 81 aa, Aotus trivirgatus
AIRSVMFSDISIDFSPEEWEYLDLEQKDLYRDVMLENYSNLVSLGCFISKPDVISLLEQGKEPWKVVRKRRRQYPEMLLLL

SEQ ID NO: 1392 - protein, 81 aa, Tursiops truncatus
PQGCAISEDVFVYFSREEWVLLDEDQRLLYRDVMLENFALLASLGITSSRSYLVTQLEQGEEPWMPAQVDMTAATEKEAQK

SEQ ID NO: 1393 - protein, 81 aa, Tursiops truncatus
PQDLVTFKDVAIDFSQEEWEWLNPAQRSLYRSMMLENYQSLVSVGLCVSKPYVISLLEQGKEPWEMKSEMRRTPFPDWESV

SEQ ID NO: 1394 - protein, 81 aa, Pteropus vampyrus
TQESVTFRDVAVHFSRDEWLYLDPAQRALYREVMLENYSSLVSLGILFSKPKVIFQLQQGEDPWMVENGVSCGACLGWESL

SEQ ID NO: 1395 - protein, 81 aa, Aotus trivirgatus
EPGAVTFGDVAVYFSREEWGCLRPAQRALYRDVTRETYSHLGALGVGGSKPALISWMEEEAELWGPAAQDPEVAKCPTEAD

SEQ ID NO: 1396 - protein, 81 aa, Aotus trivirgatus
SQEPVTFADVAVVFTPEEWVFLDSTQRSLYRDVMLENYRNLASVAGDQLCKPNALSYLEQRGEQWTTERGVISDTCPEPQL

SEQ ID NO: 1397 - protein, 81 aa, Callorhinus ursinus
FQGSVTFRDVAIDFSQEEWEWLQPAQRDLYRHVMLENYGHLVSLAGFNISKPYVVSLLEQGREPWLVKGDVRRDPFSESNG

SEQ ID NO: 1398 - protein, 81 aa, Monodelphis domestica
AQEVVTFKDVAVDFTREEWCLLSPPQKELYKEVMLENAQNLLSVGLPGPPEDVISYLKQRKDPWMLEQEGLRSCCPEGEIR

SEQ ID NO: 1399 - protein, 81 aa, Monodelphis domestica
VQVPIKFEDVAVYFSEPEWKNLDQWQKELYKHVMTANYEILFSLDSAIPKPDLISHIERGEEPFLRDHGNLMKRDKTIGYG

SEQ ID NO: 1400 - protein, 81 aa, Monodelphis domestica
SQGPVKFEDVAIYLWKEEWELMDSTQKRLYRQVMLETYENVLSVGTPHDKPAMIVHLEQGETAWSPALQRPGKEKGRLHGH

SEQ ID NO: 1401 - protein, 81 aa, Monodelphis domestica
SQKALTFQDVAVEFTQEEWGLLEPAQKNMHRDVMLENYENFVSLGLPVPKSALIFHLERRETPWLPSGEVLRNTYPDYLVQ

SEQ ID NO: 1402 - protein, 81 aa, Papio anubis
SQESVAFEDVAVYFTTKEWAIMVPAERALYRDVMLENYEAVAFVVPPTSKPALVSHLEQGKESCFIRPQVVLSRSDWRAGL

SEQ ID NO: 1403 - protein, 81 aa, Aotus trivirgatus
RPRALKFVDVAVYFSSEEWGCLRPAQRALYRDVMRETYGHLGALGFPGPKPALISWMEQESEAWSSAAQDPEKGENLGGAR

SEQ ID NO: 1404 - protein, 81 aa, Aotus trivirgatus
TQESLTLEDVAVEFSWEEWQLLDTAQKDLYRDVMVENYNHLVSLGYQTSKPDALSKLAHGQEPWMTDAKIQNKNCPGIRKV

SEQ ID NO: 1405 - protein, 81 aa, Callorhinus ursinus
CEGLVSFEDVTMDFSREEWQQLDPAQRCLYWDVMLEIYSHLLSVGYHIPNPEIISRMEKGKKSWIRGAQLPHQRHREVVFG

SEQ ID NO: 1406 - protein, 81 aa, Aotus trivirgatus
SKGSLMFRDVSIDFSQEEWECLDSGQMNLYKEVMLENFSNLVSVGLSSSKPAVISLLEQGREPWMVDRELTRGLCSDLESM

SEQ ID NO: 1407 - protein, 81 aa, Lipotes vexillifer
KEAFMAFGDVAVDFTQEEWRLLSPAQRTLHREVMLETYNHLVSLEIPFSKPKLISQLERGEEPWIKERQRPLSLCPAGSKL

SEQ ID NO: 1408 - protein, 81 aa, Callorhinus ursinus
SQEPVTFEDVAVYFTQNQWASLDPMQRALYLEVMLENYANITSLAALPFPKPDLILQLEQGEAPWGLDPWTPLDGEALGGV

SEQ ID NO: 1409 - protein, 81 aa, Tursiops truncatus
VQASLSFEDVAVHFTWEEWQLLDPSQKDLYRNVMWENYCNLVSVGYQTPKPDSFFQLEQGEPPWTVEGAGQSQTCPGTRAS

SEQ ID NO: 1410 - protein, 81 aa, Papio anubis
VQEPVTFKDVAVDFTQEEWGQLDLVQRTLYRDVMLETYGHLLSVGNQIAKPEVISLLEQGEEPWSVEQACPQRACPEWMRN

SEQ ID NO: 1411 - protein, 81 aa, Nomascus leucogenys
FQASVSFQDVTVEFSQEEWQHLGPVERTLYRDVMLENYSHLVSVGYCFTKPELIFTLEQGEDPWLLEKEKGFLSRNSPEDS

SEQ ID NO: 1412 - protein, 81 aa, Homo sapiens
PQKSVTFEDVAVYFTQAEWDGLSPAQRTLYRDVMLENYGNVASLGFPLLKPAVISQLEGGSELGGSSPLAAGTGLQGLQTV

SEQ ID NO: 1413 - protein, 81 aa, Ursus arctos
AHHLVMFRDVAVDFSQEEWECLNPYQRNLYRDVILENYSNLVSVGCSISKPDVITLLEQGKEPWMVVRDERRRSLDLESRY

SEQ ID NO: 1414 - protein, 81 aa, Saimiri boliviensis
KPGALSFADVAVYFSPEEWGCLRPAQRALYRDVMRETYGHLGALGFPGPKPALISWMEQESEAWSSAAQDPEKGESLGGAR

SEQ ID NO: 1415 - protein, 81 aa, Balaenoptera acutorostrata
TQVSVTFDDVAVTFTREEWRQLDPAQRTLYQEVMLENCRLLVSLGCPVPRPELIFQLEQGQKLWTVKEDLSRSTCPGKRYR

SEQ ID NO: 1416 - protein, 81 aa, Propithecus coquereli
GSVMFSDVSVDFSQDEWECLDPVQRDLYREVMLENYSNLVSVGLYIPKPQVISLLEQGKEPWMVGKELTRGLCSDLESMCE

SEQ ID NO: 1417 - protein, 81 aa, Propithecus coquereli
ESVTFEDVAVYFSENEWIGLGPAQRALYRDVMLENYGAVASLAFPFPKPALISQLERGEAPWCSAPQGALDGESPRGISSE

SEQ ID NO: 1418 - protein, 81 aa, Panthera pardus
SYGSLSFEDVTVGFSQEEWQHLDPAQRTLYRDVMLENYSHLVAVGCCVPKPDVIFRLEQGQQPWIVEEESLDQSCPEVCKV

SEQ ID NO: 1419 - protein, 81 aa, Panthera pardus
FQASVVFEDVAVNFTPEEWALLNRGQRKLYRDVMLETCRNLSAVEKQKFHSSGDLTRMQEGLLRSPLVESVCERIEGDPCG

SEQ ID NO: 1420 - protein, 81 aa, Ursus maritimus
SQEPVTFEDVAVYFTQNQWASLDPTQRALYREVMLENYANITSLAAFPFPKPDLILQLERGEARWGLDPWIAIEGEALGGV

SEQ ID NO: 1421 - protein, 81 aa, Ursus americanus
RPRAVKFADVAVYFSPEEWGCLRPAQRALYRDVMRETYGHLGALGFPGPKPALISWMEQESEAWSPDAQDPEEGESLGGAL

SEQ ID NO: 1422 - protein, 81 aa, Propithecus coquereli
MTFEDVTVEFTPWEWGQLDPAQKDLYREVMLENFRNLASLGLPVSKPHVICQLEEGEEPCVLEREISVGAQSDLKRRPKAK

SEQ ID NO: 1423 - protein, 81 aa, Saimiri boliviensis
SQGSVSFKDVTVDFTQEEWQQLDPAQKALYRDVMLENYCHFIAVGFHMTKPDMIRKLEQGEELWTQRIFPSYSYLEEDGKT

SEQ ID NO: 1424 - protein, 81 aa, Vombatus ursinus
FQGSVTFQDVAVVFTPEEWGHLEPSQKELYREVMLENFRNLVCLGLVVYKPSVIYQLERGGAPWKPGGGGRRSGSSDWETL

SEQ ID NO: 1425 - protein, 81 aa, Cervus elaphus
MAFEDVAVHFSQEEWGLLDTAQRSLYRRVMLENFALLASLGLSVSRPHVVTQLERGEEPWVLSGVDVTLPRDAQRRPHRGS

SEQ ID NO: 1426 - protein, 81 aa, Colobus angolensis
KPGTVSFADVAVYFSREEWGYLRPAQRALYRDVMRETYCHLGALGVGGSKPALISWVEEEAELWDPAARDPEVTKGLTETD

SEQ ID NO: 1427 - protein, 81 aa, Tupaia chinensis
VQGSVTFRDVAVLFSQDEWLHLDTAQRTLYREVMLENYSNLVSLGILFSKPKVISQLEQGQDPWKVEHGAPQGTCPGWESL

SEQ ID NO: 1428 - protein, 81 aa, Ursus arctos
PQVLVSFEDVAVFLSREEWGCLGPAQRGLYRDVMLETYRNLISLGFQDSKPDVISKLEEGEEPWAPYSPRIEEGWIQSHGS

SEQ ID NO: 1429 - protein, 81 aa, Muntiacus reevesi
PQEPVTFADVAVLFTPEEWLFLDSAQKSLYRDVMLENYRNLASVGDQLCKTKMSSHMEQREELCVTERGVFPGAHLGPHLQ

SEQ ID NO: 1430 - protein, 81 aa, Muntiacus reevesi
KPLAVRFADVAVYFSPEEWGCLLPAQRALYRDVMRETYGHLGALGFPGPKPALISWMEQESEAWSPDAQDPEEGESLGGAL

SEQ ID NO: 1431 - protein, 81 aa, Lynx pardinus
AQAPLSFEDVAVSFSREEWRLLVPAQKDLYRDVMLENYRNLVSVGYQASEPDSLFQLEHGGPLWAVEGAAPRPPCPGFVLQ

SEQ ID NO: 1432 - protein, 81 aa, Saimiri boliviensis
PQESVAFDDVAVYFTKKEWAIMVPDQRALYRDVMLENYEAVAFVVPPTSKPALVSHLEQGKEPCFTQPQGVLSRSNWRAGF

SEQ ID NO: 1433 - protein, 81 aa, Cervus elaphus
RTSAFPFQAPVTFGDLAIYFSQEEWEWLSPIQKDLYEDVMLENYQNLVSLGLCFRRPNVITLLEKGKAPWMVDPVKRRRGL

SEQ ID NO: 1434 - protein, 81 aa, Cervus elaphus
SEGLVTFGDVAVDFSQEEWEWLNPAQRSLYRKVMLDNYRSLVSLGVSVSKPDVISLLEQGKEPWLVKEEGPRGARSDWEYA

SEQ ID NO: 1435 - protein, 81 aa, Cervus elaphus
TSEPVSFADVAVYFSQEEWGCLQPAQRALYRDVMRETYGHLGALGFRGTKPALISWVEEEAELWGPDAGPPEMGECLTEAD

SEQ ID NO: 1436 - protein, 81 aa, Colobus angolensis
AQMLVTFKDVAVTFTQEEWRQLDLTQRTLYREVMLETCGLLVSLGHRVPKPELVHLLEHGQELWTVKTGLSQPTCAGDRTQ

SEQ ID NO: 1437 - protein, 81 aa, Saimiri boliviensis
IQRLLTFGDVAVAFTRIEWRHLDAAQRALYRDVMLENYGNLVSVGLLSSKPKLIAQLEQGAEPWMEARETPSGTRAVPDYW

SEQ ID NO: 1438 - protein, 81 aa, Saimiri boliviensis
MDLVMFRDVAVDFSQEEWECLNSYQRNLYRDVILENYSNLVSLAGCSISKPDVITLLEQGKEPWLVVRNEKRRWSLDLESR

SEQ ID NO: 1439 - protein, 81 aa, Vombatus ursinus
FQESVMFEDVAVYFTQKEWADLAPAQRALYRDVMLENYGNMVSLAFPFPKPAVISKLERGEEPWGLDPQVVPNEEGLKGFP

SEQ ID NO: 1440 - protein, 81 aa, Balaenoptera acutorostrata
MDSVTIEDVAVDFTLEEWALLDPSQRKLYRDVMQETLRNLAAVGAKREYHDIEDQYKNQGRKLRTFMVERFCKSKDISLCG

SEQ ID NO: 1441 - protein, 81 aa, Mustela putorius
SKVPVTFGDLAIYFSQEEWEWLSPIQKDLYEDVMLENYQNLVSVGLSFRRPNVITLLEKGRAPWMVEPVRKRRGMDSGSKC

SEQ ID NO: 1442 - protein, 81 aa, Propithecus coquereli
ESLTLEDVAVEFTWEEWQLLGPAQKDLYWDVMLENYNHLVSLGYQASKPDALSKLAQGEEPCVIEGKIQNRNCPGIRKADS

SEQ ID NO: 1443 - protein, 81 aa, Mustela putorius
LQGLLTFRDVAIEFSEEEWGCLTHTQRQLYRDVMLENYGHLHFLGLLLSKPDLIMFLEQEKQLWDVKRKESRGFSPESQCL

SEQ ID NO: 1444 - protein, 81 aa, Camelus ferus
GSVCEVSVSFEDVTVDFSREEWQHLDPAQRRLYWDVTLENYSHLCSVGYQVPKPEVIFKLEQGEGPWTLEEETPHQSCSGA

SEQ ID NO: 1445 - protein, 81 aa, Vicugna pacos
SQGLVTFGDVAVDFSQEEWEWLDCAQRTLYRSVMLENYRSLVSLGLCVSKPEMISSLEQRKEPWTVKRKWTRGQCPDSEAV

SEQ ID NO: 1446 - protein, 81 aa, Colobus angolensis
SLTLEDVAVDFTWEEWQLLGPAQKDLYRDVMLENYSNLVAVGYQASKPDALSKLEQGEEPCTTEDEIYTRICCGGQPQTCS

SEQ ID NO: 1447 - protein, 81 aa, Odobenus rosmarus
SKVPVTFGDLAIYFSQEEWEWLSPIQKDLYEDVMLENYQNLVSLGLSFRRPNVITLLEKGKAPWIVEPVRKRRGVDSGSKS

SEQ ID NO: 1448 - protein, 81 aa, Ursus americanus
QAEVTFEDVAVLFSREEWGRLGPAQRGLYRDVMLETYRNLVSLGAGPAAPKPGVITQLERGDEPWVLDAQGAKGKERLRVS

SEQ ID NO: 1449 - protein, 81 aa, Vombatus ursinus
TQESVMFEDVAVDFTREEWSHLDPAQRALYREVMLENYENLVSLGLPVSKLDVISLLERGEAPWRPEGGGPRCSCPDPFIE

SEQ ID NO: 1450 - protein, 81 aa, Vombatus ursinus
FQESVTFQDVAVDFTWEEWGHLGPAQKELYREVMLENYRNLVCLGLEVSKPDVVCQLERGEAPWMPEGAVPRSCSQNWGAR

SEQ ID NO: 1451 - protein, 81 aa, Vicugna pacos
RPESVTFEDVAIYFSENEWTGLAPAQRALYRDVMLENYGALASLAFPFPKPALIFQLEQGEAPWSSAPQGALDGEGPRGIS

SEQ ID NO: 1452 - protein, 81 aa, Delphinapterus leucas
MDSVTIEDVAVDFTLEEWALLGPSQRKLYRDVMQETLRNLAAVGAKREYHDIEDQYKNQGRKLRTFMVERLCKSKDISLCG

SEQ ID NO: 1453 - protein, 81 aa, Tupaia chinensis
QPGAVRFADVAVYFSPEEWGCLRPVQRALYRDVMRETYSHLVALGVGGTKPKLISWVEEEAELWGPEAQDLEGAKCLTEAN

SEQ ID NO: 1454 - protein, 81 aa, Colobus angolensis
CWGLLSFKDISMEFTWDEWQLLDSTQKYLYRDVILENYHNLISVGYHGTKPDLIFKLEQGEDPWIINAKISRQSRPDGWEE

SEQ ID NO: 1455 - protein, 81 aa, Mustela putorius
FQEAVTFNDVAVVFSEEELGLLDSTQRKLYRDVMLENFRNLVSLGHSSSKPDMISQLEREEEKLCMKEIRTERGGRNPNEA

SEQ ID NO: 1456 - protein, 81 aa, Gulo gulo
SQDLVTFKDVAIDFSQEEWEWLNPAQRNLYKNMMLENYQNLVSLGLCISKPYVISLLEQGKGPWEMKTEMTRSPFPDSGSV

SEQ ID NO: 1457 - protein, 81 aa, Erinaceus europaeus
SLGMVSFEDVAVTFSREEWQQLDEAQRTLYREVMLEAYSNLKTVGCCWSKPEVIIRLEQGVEPWTVEGVTNQRFSDVLTVD

SEQ ID NO: 1458 - protein, 81 aa, Carlito syrichta
LQELLSFEDLSVDFTQKEWQLLNPYQKNLYKDVMLENYSSLVSLGYEVIKPDVIFKLEQGEEPWIRDAEMPSSPSLEVWQV

SEQ ID NO: 1459 - protein, 81 aa, Carlito syrichta
FQELVTFRDVAIDFSRQEWEYLDPNQRDLYRDVMLENYSNLVSLGHSISKPDVVDLLEQGKEPWMLLGEETQYSGSNPEPV

SEQ ID NO: 1460 - protein, 81 aa, Carlito syrichta
AHDLVVFRDVSVDFSQEEWECLNSYQRNLYRDVILENYSNLVSLGCSISKPDVITLLEQGKEPWMVVRNEKRRWNLDLESK

SEQ ID NO: 1461 - protein, 81 aa, Vicugna pacos
YQRPVSFKDVVVGFTQEEWHRLNPAQRALYRDVMLETYSNLVSVGYEGTKPYVILRLEQEEAPWICEAACPGCHCRENIWQ

SEQ ID NO: 1462 - protein, 81 aa, Odobenus rosmarus
PQEPVTFEDVAVYFTQNQWASLDPTQRALYREVMLENYASVASLVAFPFPKPDLVSQLERGEAPWSPDPWEAEVLKGTCPG

SEQ ID NO: 1463 - protein, 81 aa, Gulo gulo
FQEAVTFKDVAVVFSEEELGLLDPAQRKLYRDVMLENFRNLVSVGHSSSKPDMISQLEREEKLCVKEIHTERGGRNPNEAE

SEQ ID NO: 1464 - protein, 81 aa, Carlito syrichta
MAFMDVAVDFTQEEWRLLSPAQRTLYREVMLENYSNLVSLGIPFSKPKLITLLEQEKVTWREKRKCPLATCPAEPEPEPEL

SEQ ID NO: 1465 - protein, 81 aa, Carlito syrichta
GKALLSFEDVAMYFTREEWNHLDWAQKDLYRDVMLENYMNMVLLGFQFPKPEVICQLENWDEPWILDLPRAGNRKASSSAC

SEQ ID NO: 1466 - protein, 81 aa, Vicugna pacos
MFQVTFSDVAIDFSHEEWGWLDSAQRDLYKDVMVQNYENLVSLGLSIPKPNVIALLEEGKDPWMVERKLSTGMFPDWDSRW

SEQ ID NO: 1467 - protein, 81 aa, Odobenus rosmarus
SQSLVTFGDVAVDFSQEEWEWLNSAQRNLYRSVMLENYRNLVSLGLCVSKPDVISSLEQRKEPWMVKRKLTRGRCPDLKTV

SEQ ID NO: 1468 - protein, 81 aa, Mustela putorius
QAEVTFEDVAVLFSREEWGRLGPAQRGLYRDVMLETYRNLVSLGAGPAGPKPGVITQLERGDEPWVLDAQGAEGKERLRVS

SEQ ID NO: 1469 - protein, 81 aa, Mustela putorius
IQEPVTFKDVAVDFTQEEWGQLDSVQRTLYRDVMLETYGHLLSVGNHIAKPEVISLLEQGEEPWSVEQAYPQSTCPEWMRN

SEQ ID NO: 1470 - protein, 81 aa, Tupaia chinensis
EQVTFKDVAIEFSKTEWKRLDPAQRALYREVMLENYRNLVSVGTSPPDVTVISMLEQGEEPWTAESRVQRPEVPGGREWTQ

SEQ ID NO: 1471 - protein, 81 aa, Odobenus rosmarus
SSQELLTFRDVAIEFSQEEWRCLNHTQRELYRDVMLENYGHLLFLGLIVSKPDLVSFLEQTKDPWDGKSKKTVAFHPGRWE

SEQ ID NO: 1472 - protein, 81 aa, Colobus angolensis
YQTPVSFKDVVVGFTQEEWHWLSPAQRALYRDVMLETYSNLVSVGYEGTKPDVILRLEQEEAPWIGEAACPGCHCWGISKL

SEQ ID NO: 1473 - protein, 81 aa, Gulo gulo
QGSVTFRDVAIDFSQEEWEWLQPAQRDLYRHVMLENYGHLVSLGLNISKPYVVSLLEQGRDPWLEKDVRRDLFSESSGEIR

SEQ ID NO: 1474 - protein, 81 aa, Erinaceus europaeus
KPAAVRFADVAVYFSPEEWGCLRPAQRTLYRDVMRETYGHLGALGFPGPKPALISWMEQESEVWSPAAQDPEEGESLGGAR

SEQ ID NO: 1475 - protein, 81 aa, Erinaceus europaeus
SKAPVTFGDLAVYFTQAEWEWLSPVQKALYQDVMLENYQVLVSLGLCLRRPNLISLLEKGKAPWVAEPVRRRRGPDSASKF

SEQ ID NO: 1476 - protein, 81 aa, Odobenus rosmarus
ARGLVTFEDVAVYFSREEWGLLNLTQRSLYRDVMLENFALIGSLGFAPSRSHVVAQLESEEELWVPSMVDLTLGSRAEARR

SEQ ID NO: 1477 - protein, 81 aa, Vicugna pacos
MFQVTFSDVAIDFSHEEWGWLDSAQRDLYKDVMVQNYENLVSLGLSIPKPNVIALLEEGKDPWMVERKLSTDWDSRWENKE

SEQ ID NO: 1478 - protein, 81 aa, Carlito syrichta
VSFEDVAVYFTQEEWTLLDSAQRDLYRDVMLETCENLASIGNLLNHSVMYWLEGEENLGTVQEGDPQEWRLKTKGSTLRPD

SEQ ID NO: 1479 - protein, 81 aa, Delphinapterus leucas
QPQEAVTFKDVEVTFSQDEWGWLDASQRNLYRDVMLENYGNVTSLVGPFTKPALISWLEAREPWGLNVQGAHPKGSPSAAP

SEQ ID NO: 1480 - protein, 81 aa, Carlito syrichta
MTFSDVAVDFSQQEWECLDPVQKTLYRDVMMENYGNLVSLGHSISKPDVIALLEQGKEPWVVTKEETRRCCTDLESRYEII

SEQ ID NO: 1481 - protein, 81 aa, Tupaia chinensis
MAFEDVAVYFSREEWELLDTAQRALYRHVMLENFALVASLGFSPSRPCVVIQLESGKEPWLHSGMDTTMSRHAHKRPSSGS

SEQ ID NO: 1482 - protein, 81 aa, Vicugna pacos
AHGSVMFSDVSIVFSQEEWEYLDLKQRDLYRDVMLENYSNLVSLGCFISKPDVISLLEQGKEPWKVMRKGRGRYPDLETRY

SEQ ID NO: 1483 - protein, 81 aa, Carlito syrichta
AHRSVMFNDVSIDFSREEWEYLNLEQRDLYRDVMLENYSNLVSLGYFISKPDVISLLEQGEEPWKVVRKGRRRYPDLKTNY

SEQ ID NO: 1484 - protein, 81 aa, Gulo gulo
AQELVTFKDIAIDFTQEEWALLDTSQRQLYRDVMLENISHLVSVGYHLCKSDVISQLEQGVELWRDGREFLQGLNPDRKSG

SEQ ID NO: 1485 - protein, 81 aa, Carlito syrichta
AHDLVVFRDVSVDFSQEEWECLNSYQRNLYRDVILENYSNLVSLAGCSISKPDVITLLEQGKEPWMVVRNEKRRWNLDLES

SEQ ID NO: 1486 - protein, 81 aa, Colobus angolensis
EMGLLTFRDIAIEFSLAEWQCLDHAQRNLYRDVMLENYRNLVSLGVAVSKPDLITCLEHNKEPRNIKRNEMVSKHPVTCSH

SEQ ID NO: 1487 - protein, 81 aa, Myotis brandtii
MVFEDVAVYFSREEWGLLDSAQRALYRQVMLENFALVASLGLSASRPRIILQLERGEEPWVLSGLDVALARDAQRRPSPAQ

SEQ ID NO: 1488 - protein, 81 aa, Odobenus rosmarus
AWAPLSFEDVAVGFSWEEWQLLAPSQKDLYRDVMLENYRNLVSVGYQASKPDSVFQLEQGEPPWIVEGAAQSQTCQEEIWE

SEQ ID NO: 1489 - protein, 81 aa, Colobus angolensis
SQGRVTFEDVTVNFTKGEWQRLNPEQRNLYRDVMLENYSNLVSVGREETTKPNVILRLEQGKEPWLVEEEVLGSGRPEKNG

SEQ ID NO: 1490 - protein, 81 aa, Odobenus rosmarus
MPVTFEDVAVTFTQEEWGQLDPAQRTLYQEVMLETCGLLVSLGCPLPKPELFYPLDHSPELHTLKRGLSPNSCPGDSTKPG

SEQ ID NO: 1491 - protein, 81 aa, Gulo gulo
SQSLVTFGDVAVDFSREEWEWLSSAQRNLYRTVMLENYRNLVSLGLCISKPEMISSLEQRKEPWMAKRRLTRGRCPDLKIV

SEQ ID NO: 1492 - protein, 81 aa, Erinaceus europaeus
SLGMVSFDDVMVTFSLEEWQLLSTSQRTLYRTVMLDTYSSLAALGHCAVKPGVIIKLEQGAEPWMGAQAPPRSLSDPCGPS

SEQ ID NO: 1493 - protein, 81 aa, Mustela putorius
RPELVTFEDVAVYFSENEWTSLAPTQRVLYRDVMLENYGAVASLAVPFPKPALISQLERGEAPWCKAPQGALDGEGPRGIS

SEQ ID NO: 1494 - protein, 81 aa, Colobus angolensis
ELVMFRDVAIDVSQEEWECLNPAQRNLYKEVMLENYSNLVSLGLSVSKPAVISSLEQGKEPWMFVREETGRWCSDLASRDE

SEQ ID NO: 1495 - protein, 81 aa, Mustela putorius
FQGSVTFRDVAIDFSQEEWEWLQPAQRDLYRHVMLENYGHLVSLGLNISKPHVVSLLEQGRDPWPDNGAVGGGLFSESKGE

SEQ ID NO: 1496 - protein, 81 aa, Mustela putorius
LQGQLTFRDVAIEFSEEEWRCLTHTQRQLYRDMMLENYRHLLFLGLIVSKPDLVSFLEQKKDPWDVKRKKTVVFDPGRWEW

SEQ ID NO: 1497 - protein, 81 aa, Odobenus rosmarus
FQGSVTFRDVAIDFSQEEWEWLQPAQRDLYRHVMLENYGHLVSLGLDISKPYVVSLLEQGREPWLVKGDVRRDPFSVSESN

SEQ ID NO: 1498 - protein, 81 aa, Gulo gulo
AHGSVMFNDVSIVFSQEEWEYLDLEQRDLYRDVMLENYSNLVSLGCFISKPDVISLLEQGKEPWKVVRKGRRQYPDLETRY

SEQ ID NO: 1499 - protein, 81 aa, Homo sapiens
AHALVTFRDVAIDFSQKEWECLDTTQRKLYRDVMLENYNNLVSLAGYSGSKPDVITLLEQGKEPCVVARDVTGRQCPGLLS

SEQ ID NO: 1500 - protein, 81 aa, Muntiacus reevesi
AQGSVMFTDVSIDFSQEEWEFLNPDQRDLYKDVMLENYSNLVSMGLYIPKPQVISLLEQGKEPWMIGRELTRGLCSALESM

SEQ ID NO: 1501 - protein, 81 aa, Balaenoptera acutorostrata
SQESVSFEDVAVYFTQNQWASLASAQRTLYREVMLENYANVTSLAAFPFPKPDLIFQLERGEAPGGLDPWTSIRREVRGVC

SEQ ID NO: 1502 - protein, 81 aa, Rhinolophus ferrumequinum
AHGSVMFSDVSVVFSQEEWDYLDVEQRDLYRDVMLENYNNLVSLGCFISKPDVISLLEQGKEPWKVVRKERRRYPDLETRH

SEQ ID NO: 1503 - protein, 81 aa, Ursus arctos
KPGAVSFADVAVYFSPEEWGCLRPAQRALYRDVMRETYGHLGALGFPGPKPALISWMEQESEAWSPDAQDPEEGESLGGAL

SEQ ID NO: 1504 - protein, 81 aa, Propithecus coquereli
FQEAVTFKDVAVAFTEEELGLLDSAQRKLYREVMLENFRNLVSVGHQSFKPEMISQLEREEKLWVKEIQTQMGRCRGGRNQ

SEQ ID NO: 1505 - protein, 81 aa, Propithecus coquereli
VQEPVTFKDVAVDFTQEEWGQLDLVQRTLYRDVMLETYGHLLSVGNQITKPEVISLLEQGEEPWSVEQAYPQSTCPEWMRN

SEQ ID NO: 1506 - protein, 81 aa, Myotis brandtii
FQESVTFEDVAVYFTQNQWASLDPVQRALYRDVMLENYANVAALVAFPAPKPDLISQLERGSAPWRPDPWEAEVLRGICPG

SEQ ID NO: 1507 - protein, 81 aa, Propithecus coquereli
YQTPVSFKDVVVGFTQEEWHRLSPAQRALYRDVMLETYSNLVSVGYEGTKPDVILRLEQEEAPWICEVACPGCHRWEDIWQ

SEQ ID NO: 1508 - protein, 81 aa, Vombatus ursinus
FWESVTFQDVAVDFTWEEWGHLGPAQKELYREVMLENYRNLVCLGLAVSKPDVICQLEQGGAPWWPEGGVPGSSCAVWDTR

SEQ ID NO: 1509 - protein, 81 aa, Propithecus coquereli
SLGSVSFKDVTVDFSREEWQQLDLAQKSLYRDVTLENYFNLISVGCQVPKPEVIFNLEQGGELCVLDGGLSCQNCSDGDIG

SEQ ID NO: 1510 - protein, 81 aa, Pteropus alecto
KQVSISFEDVTVDFSREEWQHLDPAQRCLYRDVTLENYSHLLSVGYQVPKPEIIFQLEQGEGPWMLERETPHQSCSDEDIG

SEQ ID NO: 1511 - protein, 81 aa, Muntiacus reevesi
SQSPLTFGDVAVEFSGDEWAWLDSAQRSLHRSVMLENYRNLASLGLCMSKPEMISSLEQSKEPWAVKAKSTRGRCPGLEAI

SEQ ID NO: 1512 - protein, 81 aa, Ursus arctos
VTFEDVAVYFSWEEWGLLDEAQRCLYQDVMLENLALINSLGLRHGAEDEDAPEHRVSVQAASQVGTRKAVVSPQKAHPREV

SEQ ID NO: 1513 - protein, 81 aa, Muntiacus reevesi
QAEVTFEDVAVLLSQEEWGLLGPSQKGLYREVMLETYRNLLSLGVGLADPKPEVIVQLERGDELWVLDMHGAEQPSVDGSA

SEQ ID NO: 1514 - protein, 81 aa, Propithecus coquereli
PKAPVTFGDVAIYFSKEEWECLSPNQKDLYEDVMMENYQNLASIGFSCRRPNVITLLEKGEAPWMAEPLRRRQGPDSGSKK

SEQ ID NO: 1515 - protein, 81 aa, Myotis brandtii
LDAPVTFEDVAVYFSENEWTCLTCPQRALYRDVMLENYGAVASLAFLFPKPALISRLERGEAPWCSAPQGALDGEGWKGVS

SEQ ID NO: 1516 - protein, 81 aa, Macaca nemestrina
GRVTFRDVAVEFSLAEWKCLNPVQRALYREVMLENYRNLEFVDSSLKSMMEFSSHEHSNTGEGFHTGTLERHKSYHIGDFW

SEQ ID NO: 1517 - protein, 81 aa, Propithecus coquereli
SLGSELFRDVAIVFSQEEWQWLAPAQRDLYRDVMLETYSNLVSLGLAISKPDVISFLEQGKEPWMVERVATGDLCPVLESG

SEQ ID NO: 1518 - protein, 81 aa, Propithecus coquereli
SQGLVSFKDVAVDFTQDEWQQLDPAQRTLYRDVMLENYSHLVSMGYPVSKPDVISKLEQGEDPWIIKRDISNWIYPDENQA

SEQ ID NO: 1519 - protein, 81 aa, Balaenoptera acutorostrata
LQEAVTFEDVAVNFSNEEWQCLTHAQRHLYKDVMLENYGNVVSLGFPFPKPPLISHLEQEAELCAQDRQDREFLSCSYPVS

SEQ ID NO: 1520 - protein, 81 aa, Ursus americanus
RPGAVSFADVAVYFSPEEWGCLRPAQRALYREVMRETYGHLGALGFPGPKPALISWMEQESEAWSPDAQDPEEGESLGGAL

SEQ ID NO: 1521 - protein, 81 aa, Balaenoptera acutorostrata
SQSLVTFGDVAVEFSPEEWAWLDSAQRSLYRSVMLENYRSLVSLGLCVSKPKMISSLEQRKEPWAAKRTLTRGGCPDSRAL

SEQ ID NO: 1522 - protein, 81 aa, Balaenoptera acutorostrata
KPAAVSFADVAVYFSVEEWGCLRPAQRALYRDVMRETYGHLGALGFPGPKPALISWMEQESEAWSPAAQDPEEGESLGGAL

SEQ ID NO: 1523 - protein, 81 aa, Ursus americanus
VLGLVTFGDVAIDFSREEWEWLNSAQRTLHRDVMLENYRNLVSLGLCVSKPDMISSLEQRKEPWMVKRKLTRGRCPDLKTM

SEQ ID NO: 1524 - protein, 81 aa, Saimiri boliviensis
PQKSVTFEDVAVYFTQAEWDGLSPAQRTLYRDVMLENYGNVASLGFPLLKPAVISQLEGGGELGGPSPLAAGTGLRGLWTV

SEQ ID NO: 1525 - protein, 81 aa, Balaenoptera acutorostrata
PLESVTFEDVAINFTQEEWALLDTSQRNLFRNVMLENISHLVSIGYQISKSDVISQLKQGKELRKSTVSKQCGKSLSQGSF

SEQ ID NO: 1526 - protein, 81 aa, Ursus americanus
QCGLLTFGDVAIEFSQEEWRCLSHTQRELYRDVMLENYGHLLFLGLIVSKPDLVSLLEQSKEPWDVRRKKTQRPSVLMGHV

SEQ ID NO: 1527 - protein, 81 aa, Cervus elaphus
PQDLMTFEDVAVEFTWWEWGQLDPAQKDLYREVMLENFKNLASLGFPVSKPYMICQLEEGEEPCILEREISTGVHSDWERR

SEQ ID NO: 1528 - protein, 81 aa, Colobus angolensis
TEGLVMFEDVAVYFSREEWGLLNVTQKGLYQDVMLENFALVSSLGLAPLRSPVFSQLENDEQLWVPSWVDETPVSRAEARR

SEQ ID NO: 1529 - protein, 81 aa, Cervus elaphus
TPQTLKPRAPGACSRARSPGPGIQDSDAVGSVTFEDVAVYFSWEEWALLDEAQRCLYHDVMLENFALTSSLGGPTGGGRVV

SEQ ID NO: 1530 - protein, 81 aa, Lynx pardinus
SKVPVTFGDLAIYFSQEEWEWLSPIQKDLYEDVMLENYQNLVSLGLSFRRPNVITLLEKGRAPWMVEPVRKRRVLDSRSKY

SEQ ID NO: 1531 - protein, 81 aa, Muntiacus reevesi
CNMSLSFSDVAVDLSQEEWECMSPAQRALYRDVMLENYSNLVSLGCSTPKPDMITLLEQEKEPWMILREGTGSWFTDLESE

SEQ ID NO: 1532 - protein, 81 aa, Ursus arctos
RPGAVSFADVAVYFSPEEWGCLRPAQRALYRNVMRETYGHLGALGFAGPKPALISWLERKKEVWSPEAEDPEAGARHPGSG

SEQ ID NO: 1533 - protein, 81 aa, Myotis brandtii
FQEVVTFEDVAVHFTQAEWAGLSSAQRALHRSVMLENYGNLTSLGYTVPNSALISLLEGRDLPWGLEAQNDPPAERSTHVC

SEQ ID NO: 1534 - protein, 81 aa, Vombatus ursinus
FQESVTFKDVAVDFTQEEWAQLDPPQRNLYRDVMLENYEHFVFLGLPVAKPEVISQLERGEVPLFPEQPEFSTSICPDSLN

SEQ ID NO: 1535 - protein, 81 aa, Vombatus ursinus
FQESVTFKDVAVEFTGEEWRQLDRAQRSLFRDVMLENYRNLVSLGLTVAKPNLIFLLERGEAPWTLQRQIPGGTSSDCPCW

SEQ ID NO: 1536 - protein, 81 aa, Pteropus alecto
FQASVSFKDVTVELTQEEWQQMGPLQRTLYRDVMLENYNNLVSVGSCIYKPELIFKLEQGEEPWLLEEEFSNQSYQVLEHY

SEQ ID NO: 1537 - protein, 81 aa, Nomascus leucogenys
TQEHVTFRDVAVFFSQDEWLHLDSAQRALYREVMLENYSSLVSLGIPFSMPKLIHQLQQGEDPCMVEREVSADTCLGFKTW

SEQ ID NO: 1538 - protein, 81 aa, Ailuropoda melanoleuca
EMEPHSHAVPCQPSMSFKDVAVTFTQEEWGQLNLAQRRLYRNVTLETWSHLVSLGLLLSKPDVISWLEQGQDPWRAEQGPP

SEQ ID NO: 1539 - protein, 81 aa, Phascolarctos cinereus
PQEQVTFSDVAVDFTVEEWGRLAPAQKELYRSVMLENYRNLVCLGLAASSPDVIGQLERGEGPWRVEGKVRKGLCADQKTS

SEQ ID NO: 1540 - protein, 81 aa, Ursus maritimus
ASCGLLTFRDVAIEFSQEEWRCLSHTQRELYRDVMLENYGHLLFLGLIVSKPDLVSFLELRKDPWDVKRRKTAGFDPGRWQ

SEQ ID NO: 1541 - protein, 81 aa, Muntiacus muntjak
RPRAVKFGDVALYFSREEWGCLRPAQRALYRDVMQETYGHLGALGCAGPKPALISWLERNTDDWEPAALDPQQCPKGVAVQ

SEQ ID NO: 1542 - protein, 81 aa, Oryctolagus cuniculus
KPAAVSFADVAVYFSPEEWGCLRPAQRALYREVMRETYGLLGALGGGGTKPALICWVERDAELWGPDAQDPAAAAARGYGT

SEQ ID NO: 1543 - protein, 81 aa, Oryctolagus cuniculus
SLGPVSFKDVAVGFTQEEWRQLEPAQRRTYREVMLENYSHLVAVGCHFIKPDVITKLERGEEPWIEGGFLPQGCAGDEVWQ

SEQ ID NO: 1544 - protein, 81 aa, Pteropus alecto
LFESVSFKDVTIDFSWEEWQQLDFAQKSLYRDVMLENYFNLISVGCQVPKPEVIFNLEQVENPCMLHRKISRQSCLDGDIG

SEQ ID NO: 1545 - protein, 81 aa, Ailuropoda melanoleuca
PQVLVSFEDVAVFLSREEWGCLGPAQRGLYRDVMLETYRNLISLGFQDSKPDVISKLEKGEEPWAPYSPRIEEGWIWSHGS

SEQ ID NO: 1546 - protein, 81 aa, Phascolarctos cinereus
SHESVTFKDVAVDFTWEEWGYLDTSQKELYWEVMLENYRNLVSLGLADSNVDMISQLESGEAHGIPVDSVLRSCWPDGDTR

SEQ ID NO: 1547 - protein, 81 aa, Sapajus apella
TQGQVTFRDVAIEFSQEEWTCLDPAQRSLYRDVMLENYRNLASLGISCFDLSIISMLEQRKEPFTLESQVQIAGNPDGWEW

SEQ ID NO: 1548 - protein, 81 aa, Phascolarctos cinereus
VQESVTFRDLAVDFDMEEWGYLCPSQKELYREVMLENYRHLVSLGLLEAKPDLISRLEQEEPQVWEVQEGASGSVCACTGG

SEQ ID NO: 1549 - protein, 81 aa, Phascolarctos cinereus
SQESLTFKDVAVDFTQEEWGKLDSGQRYLYRDVMLENYRNLVSLGHQGSKPYVISQLEQGQEPWIVEREISRGNCKDWGTR

SEQ ID NO: 1550 - protein, 81 aa, Canis lupus
AQGQVNFEDVAVYFSPEEWGLLDEAQRLLYRDVMLENLALMASLGYESSMSHGFASLELGSKPWGSDWADVTPARTRDTQG

SEQ ID NO: 1551 - protein, 81 aa, Puma concolor
HQISVTFDDVALDFTQEEWILLDLSQRNLYRNVMLENYQNLVTVEYQLSKPKLIAWLEQQELRAVEQGILQEWETGLQTKG

SEQ ID NO: 1552 - protein, 81 aa, Sapajus apella
DSVAFEDVAINFTCEEWALLGPSQKSLYRDVMQETIRNLDCIGMKWQNLDIEEDEYKNPGRNLRCFMVERSCEIKDNSQCG

SEQ ID NO: 1553 - protein, 81 aa, Sapajus apella
LQEPLEFMDVAIEFSLEEWHCLDTAQRNLYRDVMLENYRNLVFLGIVVSKPDLITWLEQGKKPLTVKRRGMIAAPPGMSSH

SEQ ID NO: 1554 - protein, 81 aa, Macaca nemestrina
MVSFEDVAVLLSQEEWDCLIPAQRGLYRDVMLETYGNLVSLGLQASKPDVISRLEQGDKPWTPHILRTQRSWSWRHKRECY

SEQ ID NO: 1555 - protein, 81 aa, Muntiacus reevesi
LSTQLTVEDVDIKFTPEEWECLDPAQRTLYRDVMEETYRNLLSVGIGPRLPDCSSCIHMTKKLQAKENSGKGEILQRVMCG

SEQ ID NO: 1556 - protein, 81 aa, Myotis brandtii
DKTIIAFGDVAVAFTEREWKLLSPAQRTLYRDVMLETYSHLVSLGIAFSKPKFITQLEQGDEPWREESECLLELCPEPRTE

SEQ ID NO: 1557 - protein, 81 aa, Macaca nemestrina
SQEPVTFADVAVVFTPEEWVFLDSTQRSLYRDVMLENYRNLASVADQLCKPNASSYLEQRGEQWTTDRGILADTCAEPQLQ

SEQ ID NO: 1558 - protein, 81 aa, Panthera pardus
AHRSLMFSDVSIVFSQEEWEYLDLEQRDLYRDVMLENYSNLVSLGCFISKPDVISLLEQGKEPWKVVRKGRRRYAAPMSIA

SEQ ID NO: 1559 - protein, 81 aa, Saimiri boliviensis
PQVSLTFEDVAVLFTRDEWRKLAPSQRNLYRDVMLENYRNLVSLGLPFTKPKVISLLQQGEDPWKVEKDSSGGCSPGCKSN

SEQ ID NO: 1560 - protein, 81 aa, Oryctolagus cuniculus
LPGLMAFEDVAVYFSQEEWGLLDAVQRALYRHVMLENFALVASLGLSASPPHVVIQLQRGEEPWVPSGLDMTSARNGHRRP

SEQ ID NO: 1561 - protein, 81 aa, Phascolarctos cinereus
IQELVTFKDVAVDFTQEEWGLLNNPQKELYKEVMLENAQNMLSLGLPVPREDLFSYFEEREAPWLLEQEGLRSCCAEREIR

SEQ ID NO: 1562 - protein, 81 aa, Rhinolophus ferrumequinum
DHELVTFRDVIINFSQDEWEYLNSAQRDLYWDVMMENYSNLVSLGCFISKPDVISLLEQGKEPWKVVRKERRRYPDLETRH

SEQ ID NO: 1563 - protein, 81 aa, Ursus maritimus
SQEPVTFEDVAVYFTQNQWASLDPTQRALYREVMLENYANITSLAFPFPKPDLILQLERGEARWGLDPWIAIEGEALGGVH

SEQ ID NO: 1564 - protein, 81 aa, Lynx canadensis
FQELVTFRDVAIDFSRQEWEYLDSVQRDLYRDVMLENYRNLVSLGHSISKPDVVDLLEQGKEPWMILREETQRQYTDLDLH

SEQ ID NO: 1565 - protein, 81 aa, Puma concolor
SYGSLSFEDVTVGFSQEEWQHLDPAQRTLYRDVMLENYSHLVAVGCCVPKPDVIFRLEQGQQPWLIEEESLDQSCPEVCRV

SEQ ID NO: 1566 - protein, 81 aa, Muntiacus reevesi
QAGSDLFRDVAIVFSQEEWEQLAPTQRDLYRDVMLETYSNLVSLGLAVSKPDVIAFLEQGREPWTVEGVATGGLCPVLKSR

SEQ ID NO: 1567 - protein, 80 aa, Ursus maritimus
LQGLLTFGDVAIEFSQEEWRCLSHTQRELYRDVMLENYGHLLFLGLTVSKPDLVSFLEQRKEPWDEKRNKTAGFDASRWE

SEQ ID NO: 1568 - protein, 81 aa, Panthera pardus
SSQTLLTFRDVAIEFSQEEWGCLNHSQRELYRDVMLETYGHLLFLGLVSKPDLVIVLEQKKELWGVKRKETVASHPAVSSQ

SEQ ID NO: 1569 - protein, 81 aa, Muntiacus reevesi
RKRGSLTLEDVAVDFTWEEWQLLAPAQKALYQEVMLENYGNLVFVGYQASKPAALSRLERGEPWPVEDEVHSQLCPEMRKD

SEQ ID NO: 1570 - protein, 81 aa, Muntiacus reevesi
LPLTFEDVAVYFSEQEWQNLEAWQKELYKQVMRANYEILLSLDNGLPKPELISWIEQGKELFKKWGESQQSRSIICSSADL

SEQ ID NO: 1571 - protein, 81 aa, Ursus maritimus
RPGAVSFADVAVYFSPEEWGCLRPAQRALYRDVMRETYGHLGALGFAGPKPALISWLERKKEVWSPEAEDPEAGARHPGSG

SEQ ID NO: 1572 - protein, 81 aa, Rhinopithecus bieti
PLESVTFKDVAIDFTLEEWRLMDPTQRNLHKDVMLENYRNLVSLGLAVSKPDMISHLENGKGPWVTMRGISRIPYPDIEPK

SEQ ID NO: 1573 - protein, 81 aa, Ursus arctos
AQESVMFSDVSIDFSQEEWECLNDDQRDLYRDVMLENYSHLVSMGHSVSKPDVISFLEQGKEPWLVDRELTRDHWPVLESR

SEQ ID NO: 1574 - protein, 81 aa, Pteropus alecto
LWLPLTFEDIAIYFSEQEWQNLEAWQKDLYRNVMRANYEILVSLDDGLPKPELISHIEQGKELFWNLGETQKSGNIICSSA

SEQ ID NO: 1575 - protein, 81 aa, Muntiacus reevesi
GLLSFEDVALYFTREEWDTLDWAQKALYRDVMLDNYRHIVSLGFPFPKPEVICQLEQWEEPWTLDLPRAGTRKASGSACPD

SEQ ID NO: 1576 - protein, 81 aa, Rhinopithecus bieti
PRLPLTFEDVAIYFSEQEWQDLEAWQKELYKHVMRSNYETLVSLDDGLPKPELISWIEHGGEPFRNWRESQKSRNIICSSS

SEQ ID NO: 1577 - protein, 81 aa, Panthera pardus
PRVSLTFEDVAVLFTRDEWRKLGPSERNLYQDVMLENYSNLVSLGLLFSKPKVISLLQQGEDPWKVEKESPGGPSLGYKSS

SEQ ID NO: 1578 - protein, 81 aa, Pteropus alecto
SQGLVTFEDVAVYFSLEEWQRLDAAQRDLYKEVMQENYGILVSLGYPIPKPDLIFRLEQGEEPWVPDSPSPEEGDIVTGVY

SEQ ID NO: 1579 - protein, 81 aa, Sapajus apella
FQESVAFEDVAVYFTQNQWGSLDPAQRALYSEVMLENYANVASLAFPFPKPALISHLEKGEAPWGPDPWDAEIPSGINQGG

SEQ ID NO: 1580 - protein, 81 aa, Rhinopithecus bieti
EKGPLTFRDVAIEFSLEEWQCLDTAQQDLYRRVMLENYRNLVFLGIAVSNPDLITCLEQGKEPWNMKRHAMADEPPVMYSH

SEQ ID NO: 1581 - protein, 81 aa, Puma concolor
AQAPLSFEDVAVSFSREEWRLLVPAQKDLYRDVMLENYRNLVSVGYQASEPDSLFRLEHGGPLWVVEGAAPRPPCPGEYVA

SEQ ID NO: 1582 - protein, 81 aa, Rhinolophus ferrumequinum
MLTFRDVFIEFSQEEWECLDPAQRKLYMDVMLESYRNLVSLGHSISKPDVITLLEQGKDPCMVVREETRRWCTGKNKSGRR

SEQ ID NO: 1583 - protein, 81 aa, Ursus maritimus
MFSDVSVDFSQEEWECLDPGQRDLYRDVMLENYSNLLSMGLYIPKPQVISLLEQGKEPWMVGRELTRGLCSDLESMCETKL

SEQ ID NO: 1584 - protein, 81 aa, Balaenoptera acutorostrata
AHMSLSFRDVAIDLSQEEWECLDPVQRALYRDVMLENYSNLVSLGCSSPKPDVITLLEQEREPWTVMREGTRSWYTDLESK

SEQ ID NO: 1585 - protein, 81 aa, Vombatus ursinus
FQDSVTFQDVAVTFTPEEWGRLAAPQKELYREVMLENFGHLACLGLALSKPDVICQLERGEAPWMPRGDVPQRPSAAPSGD

SEQ ID NO: 1586 - protein, 81 aa, Vombatus ursinus
FQESVTFKDVSVDFTQGEWGQLDPAQKNLYRDVMLENYRTLVSLGLQVFKPEVIYRLERGEAPWILEREISRGPCPDWPET

SEQ ID NO: 1587 - protein, 81 aa, Geotrypetes seraphini
QMRLRFEDISVSFSQEEWAYLDEEQKELYREVMRDNYQTLISLGVGFSSVTPDIISRIEQGEEPYVRDEPGSEERETGRSS

SEQ ID NO: 1588 - protein, 81 aa, Geotrypetes seraphini
ARAPVSFEEVAVYFSPEEWQTLQGWQKEMYRGVMRENYEIMLSLGYQFSKPEILLMMERGEEPCVEDCQRRIPVTFREKHL

SEQ ID NO: 1589 - protein, 81 aa, Geotrypetes seraphini
QMPVKFEDIAVSFSQEEWEYLNEEQKELYREVMEENYQTLISLGTGSPPITPDIISHIERGEEPYIREEPGSEERGPVRSS

SEQ ID NO: 1590 - protein, 81 aa, Geotrypetes seraphini
QMWVTFEDVAVSFSQEEWVYLDEGQKELYREVMKENYETVMSLAGEEFSRGKEKEGSIEQQSLKTEVHEMNKRVKLFKCSE

SEQ ID NO: 1591 - protein, 81 aa, Geotrypetes seraphini
QMQVKFEDIAISFSQEEWEYLNEEQKELYREVMEENYQTLLSLATDSPTFTPKIISYIKRGEEPYIRGEPDSEERESGKSS

SEQ ID NO: 1592 - protein, 81 aa, Geotrypetes seraphini
QMRLRFEDISVSFSQEEWAYLDEEQKELYREVMRDNYQTLISLGIGSPPVTPDIISCIEQGEEPYIRDEPGSEERKTGRSS

SEQ ID NO: 1593 - protein, 81 aa, Geotrypetes seraphini
EMRVMFEEITVSFSQEEWEYLDEGQKELYQEVMKENHETLIFLETNLQFVNPDMLSKIRRDSRMSRKRKATRSYAADDEAK

SEQ ID NO: 1594 - protein, 81 aa, Geotrypetes seraphini
QMRVTFEDISVSFSQEEWGYLNEEQKELYREVMKENYQTLISLATDSPIIDPDIISRIERGEEPYVRDEPASEERETGRSN

SEQ ID NO: 1595 - protein, 81 aa, Geotrypetes seraphini
AQMPVKFEDIAVSFSQEEWEYLNEEQKELYREVMEENYQTLISLGSPPVTPDIISHIERGEEPYIREEPGSEEREPGRSSC

SEQ ID NO: 1596 - protein, 81 aa, Geotrypetes seraphini
AQVPVTFEDIAIYFSQEEWEYLDEGQKALYREVMKENYETLLLLGCPGLKPVIISSIEQGEEPCVRKLQERAELYPTAGDE

SEQ ID NO: 1597 - protein, 81 aa, Geotrypetes seraphini
GMRVTFEDIAVSFSQEEWEYLGEGQKELYREVMKENYETLISLGTDSSALTPEIISRIERGEEPCIRDKPGSEERETGKSS

SEQ ID NO: 1598 - protein, 81 aa, Geotrypetes seraphini
ASAQVTFEDIAVSFCHEEWRYLDEGQKELYKEVMKENYETLISLGFLCEKPSLISKIEQEEDPCVRDQQNSRERRRRLKNF

SEQ ID NO: 1599 - protein, 81 aa, Geotrypetes seraphini
QMPVKFEDIAVSFSQEEWEYLNEEQKELYREVMEENYQTLISLGIGSPSVTPDIISHIEGGEEPYIREEPGSEEREPGRSS

SEQ ID NO: 1600 - protein, 81 aa, Geotrypetes seraphini
QVPVTFEDIAVYFSQEEWEDLEEQQRELYKDVMKENYETLSSLGTGPPAVTPDIISHIERGEEPYIRFESGPEEREIGKSS

SEQ ID NO: 1601 - protein, 81 aa, Pelodiscus sinensis
VVELLTFEEVAVYFSKEEWALLDPGQRALYRDVMQENYEAVSWLGFPVSKTDVISWVEREEEFWVPDPRSCEEGVIISNTH

SEQ ID NO: 1602 - protein, 81 aa, Colinus virginianus
SQEPVSFEEVAVYFSREEWALLDPAQRALYRDVMLETYECVASLAPLPAPKPMVISLLEEGEEPWIPDVGSPEAVAGDVSP

SEQ ID NO: 1603 - protein, 81 aa, Pelodiscus sinensis
VSEPVTFEEVALYFSEEEWALLDAGQRALYRDVMKENYEAVRWLDNGRLNENHDKSLQNEGPEQMAPCGMMLGISEGHVSQ

SEQ ID NO: 1604 - protein, 81 aa, Geotrypetes seraphini
KLKPVKFQDVAVYFSEEEWQLLENQQKELYRSVMKENYENLTSLGFTTTKPNILKRMEQGRPLWVSTRRKVIKHSFREGEP

SEQ ID NO: 1605 - protein, 81 aa, Geotrypetes seraphini
VARMQTRVTFDDIAVSFSQEEWEYLDEGQKELYREVMEENLELLTSLGSLVAQPEQMEELYMMDHHDMGLRGTLLSLCTED

SEQ ID NO: 1606 - protein, 81 aa, Geotrypetes seraphini
QMQVTFEEVAISFSQEEWEYLDEEQKELYREVMKENYQTLISLATGSPTVTPKIIAHIERGEEPYIRGEPGSEERETGNSS

SEQ ID NO: 1607 - protein, 81 aa, Geotrypetes seraphini
QIPVIFEDIVIYFSQEEWKDLEEWQKELYKDVMKENYQTLISLGTGFPTPPPDIISHIERGEEPYIRDELESEKRETGKRG

SEQ ID NO: 1608 - protein, 81 aa, Geotrypetes seraphini
QQMQVTFEDVAVSFSQEEWEYLDEGQKELYREVMKENYETVVSLGSPASTPKIISCIECGEEAYIRGEPGSEGRETGKSSC

SEQ ID NO: 1609 - protein, 81 aa, Geotrypetes seraphini
QMPIKFEDIAVSFSQEEWEYLNEEQKELYREVMKENYQTLISLGTGSPPVTPDIISHIERGEEPYIREEPGSEEREPGRSS

SEQ ID NO: 1610 - protein, 81 aa, Colinus virginianus
EPVSFEEVAVYFSREEWALLDPAQRALYRDVMLETYECVASLAPLPGPKPMVISLLEEGEEPWIPDVGSPEAVAGDVSPGE

SEQ ID NO: 1611 - protein, 81 aa, Pelodiscus sinensis
AQGLVPFEEVAVYFTRTEWALLDPAQRALYRAVMQENYENVTSLGFAVSKPDVISQLERGEEPWVPELQGSEHREILGGTG

SEQ ID NO: 1612 - protein, 81 aa, Pelodiscus sinensis
VEPVSFEEVAVYFSEEEWALLDPGQRALYWDVMQENYEAVSWLVRGRGVSKAHVISWVERGEELWIPDRQGCEEGESISDI

SEQ ID NO: 1613 - protein, 81 aa, Pseudonaja textilis
FLPQVTFEDVAIYFSREEWDELSEWQRELYQAVMMENYEAVLSLGKNDFIAQCTWGLREGEKRASGKSEKARNRPVSNLWR

SEQ ID NO: 1614 - protein, 81 aa, Colinus virginianus
PSVPVTFRDVFVQFSRDEWALLDDEQKELHQSVMQSNYEMLMSLYCDLAKPEVSLQMERGEPCLPAEPDLQGTAVSLNPAA

SEQ ID NO: 1615 - protein, 81 aa, Pelodiscus sinensis
FQGPVTFDEVAVYFTKEEWALLDPAQRALYRDVMQENYETVTSLGLPVSRPDVISQMEQGEEPWASALQGSEDRLILRGIC

SEQ ID NO: 1616 - protein, 81 aa, Pelodiscus sinensis
FLMPVTFEEVAVYFTPGQGALLDPAQRALYRDVMQENYETVASLGFSIPKPDLIAQLEQGEEPWVPDLQPSKEMVILRGIC

SEQ ID NO: 1617 - protein, 81 aa, Pelodiscus sinensis
VVEPVSFEEVAVYFSEEEWALLDPGQRALYWAVMQENYEAVSWLGFSIPKPDLITQLDRGEEPWVPDLQPSKKLEILRGTR

SEQ ID NO: 1618 - protein, 81 aa, Pelodiscus sinensis
AQVPVTFEEVAVYFTQGQGALLGPAQRALYRDVMRENYEMVTSLGFPVPKPDLVARLERGEEPWVSDCLASEEGGTRRGRG

SEQ ID NO: 1619 - protein, 81 aa, Pelodiscus sinensis
AQVPVTFEEVAVYFTAGQGALLGPNQRALYRDVMQENYETVASLGFSIPKPDLITQLERGEEPWVPDLQPSKEMEFLRGTC

SEQ ID NO: 1620 - protein, 81 aa, Pelodiscus sinensis
VAGPVTFEEVAVYFSEEEWALLDPGQRALYRDVMQENYEAVSWLGFPVSKPGETSWLERAGKLQEWESRSHANTARPRGNQ

SEQ ID NO: 1621 - protein, 81 aa, Pelodiscus sinensis
SEMRVTFEEVAVYFTKGQGALLDARQKALYRDVMLENYEAVTSLGFPVPKPELIARLERGEEPWVPDLQAGEEREILRGTR

SEQ ID NO: 1622 - protein, 81 aa, Pelodiscus sinensis
DSMRVTFEEVAVYFTPGQGALLGPAQRALYRDVMQENYEAVTSLGFPVPKPELIARLERGEEPWVPDLQAREEREIPRGTC

SEQ ID NO: 1623 - protein, 81 aa, Pelodiscus sinensis
VTFEEVAVYFSAEEWALLGPAQRALYREVMRENYEAVTSLAWAGLPISKPDLISCMERGEEPWVAHLQSQRRRELPRGRNS

SEQ ID NO: 1624 - protein, 81 aa, Geotrypetes seraphini
QMPVKFEDIAVSFSQEEWEYLDEEQKELYREVMKENYQTLISLGTGSPSITPDIISHIERGEEPYIREEPGSEEREPGRSS

SEQ ID NO: 1625 - protein, 81 aa, Geotrypetes seraphini
AQVPVTFEDIAVYFSQEEWEDLEEQQRELYKDVMKENYETLSSLGPPAVTPDIISHIERGEEPYIRFESGPEEREIGKSSC

SEQ ID NO: 1626 - protein, 81 aa, Geotrypetes seraphini
AQMRVTFEDIAVSFSPEEWEYLDQGQKELYREVMKENYEILISLGCPNLTPEIISRIERGEEPYIRGEPGSEERETGKSSC

SEQ ID NO: 1627 - protein, 81 aa, Geotrypetes seraphini
QQVPVTFEDVAVSFSQEEWKYLDEAQKNLYWEVMKENYETLISLDSEVHQEEEREKNQEEYPMLWGLISRQSRKNHEKVYW

SEQ ID NO: 1628 - protein, 81 aa, Gopherus agassizii
FQGPVTFEEVAVYFTSEEWALLDPTQRALYWDVMQENYENVTSLGFPVSKPHIISQLEQGAEPWVPDLQGSEEILSKHQRI

SEQ ID NO: 1629 - protein, 81 aa, Gopherus agassizii
FPMPVTFEEVAVYFTQGQGALLDPAQRALYRDVMQENYKMVTSLAGFPIPKPDLIAQLERGEEPWVPDLQADEERESPRGT

SEQ ID NO: 1630 - protein, 81 aa, Phasianus colchicus
CQEPVSFAQVAVYFSREEWALLDPAQRALYRDVMLETYQCVASLAPLPAPKPVLISQLEGEEDPCISDVRSPEAVPGDLSP

SEQ ID NO: 1631 - protein, 81 aa, Paroedura picta
MLSPVTFEDVAVYFTEGQGALLDPNQRALYREVMMENYENMASLGFLFIKPALISQLEQGEELWAPESQGLDAAEISDTSD

SEQ ID NO: 1632 - protein, 81 aa, Meleagris gallopavo
EEPVSFAEVAVYFSREEWALLDPAQRALYRDVMLETYQCVASMESLLPAPKPIVISLLEGGEDLWIPDMQSPEDVAGDLRP

SEQ ID NO: 1633 - protein, 81 aa, Meleagris gallopavo
EPVSFAEVAVYFSREEWALLDPAQRALYRDVMLETYQCVASLVTETPVPAPKPVLISLLEGRKEPWIPDMRSPEAMPGDLS

SEQ ID NO: 1634 - protein, 81 aa, Meleagris gallopavo
SQEPVSFAEVAVYFSREEWALLDPAQRALYRDVMLETYQCVASLAPLPAPKPMLISLLEGGEEPWIPDVRSPEAVPGDLSP

SEQ ID NO: 1635 - protein, 81 aa, Meleagris gallopavo
SQEPVSFADVAVYFSREEWALLDPAQRVLYRDVMLETYECIASLACPAPKPAVISMLEGEEDPWIPEDMAGDLGPGEPVRE

SEQ ID NO: 1636 - protein, 81 aa, Aquila chrysaetos
GKMPVTFEDVAVYFSPEEWAELAGWQRRLYREVMLENYQAVASLGWPAVKPEIICKMEREEMPCMPAPPRARWRHRTPVPA

SEQ ID NO: 1637 - protein, 81 aa, Mus musculus
MNAVTYEDVHVNFTQEEWALLDPSQKKLYKDVMVETYRNLNAIGFNWEAHNIEEYCQSSRRHRRCERSQSAEKPSEYTQCG

SEQ ID NO: 1638 - protein, 81 aa, Mus musculus
SVEMLSFRDVAIDFSAGELECLEPAQWDLYRDVMLENFSHLVFLGFSFSKPLLVRFLEKNQELRNVKRKAATVPRGKKPYK

SEQ ID NO: 1639 - protein, 81 aa, Homo sapiens
QLQETMTFKDVEVTFSQDEWGWLDSAQRNLYRDVMLENYRNMASLVGPFTKPALISWLEAREPWGLNMQAAQPKGNPVAAP

SEQ ID NO: 1640 - protein, 81 aa, Alligator sinensis
PETVVSFEDVAVRFSPDEWHLLDDGQRRLYRDVLRENYSHVRSLGFPVPDLAVIFRMERGEEPWPPGLPAGTKSDDQEEER

SEQ ID NO: 1641 - protein, 81 aa, Xenopus laevis
AQDPVTFDDISVYFSRDEWALLDAGQKQLYREVMAENYRALVSVGYVMEEPGLVSHIEHEQQGSPIRSRSSLHAGRHCGFI

SEQ ID NO: 1642 - protein, 81 aa, Alligator mississippiensis
PETVVSFEDVAVRFSPDEWHLLDDGQRRLYRDVLRENYSHVRSLGFPVPDLAVIFRMERGEEPWPPGLPAGEWPWGQGQAP

SEQ ID NO: 1643 - protein, 81 aa, Peromyscus maniculatus
YQEALTFQDVKVTFSQEEWGCLDSAQRNLYRDVMLENYGNVVSVVGSSPKPALISWLEARKPSTVNICKVQPKRDSGTAPE

SEQ ID NO: 1644 - protein, 81 aa, Sus scrofa
QPQEALTFKDVEVTFSQDEWGWLDASQRNLYRDVMLENYGNIASLMGPFTKPALISWLETREPWVLNVQGAQPEGNPGADV

SEQ ID NO: 1645 - protein, 81 aa, Suricata suricatta
LLTFEDVAVYFTEEEWALLDPNQKILYNDVMQENYENVICLGLKLKNDTGNDQPTSVSTLEIQASGCKVLRKARIKVAQKT

SEQ ID NO: 1646 - protein, 81 aa, Muntiacus muntjak
QPQGTVTFKDVEVTFSQDEWGLLDASQRNLYRDVMLENYGNMASVVGPFTKPALISWLEAREPWGLNVQGVQFKGNPGAAP

SEQ ID NO: 1647 - protein, 81 aa, Muntiacus muntjak
QLTFEDVALSFSKEEWQIMDPNQKTLYIDVMREIYETVTSLGLKLKNDTGNDQPVSLSTSEIQPSGCKVLRKARMKVAQTT

SEQ ID NO: 1648 - protein, 81 aa, Muntiacus muntjak
SQELLTFKDISVDFTQEEWGQLAPAHRNLYREVMLENYGNLVSVAGCQLSKPSVISQLEKGEEPWMTEKEGPGDPSSDLKS

SEQ ID NO: 1649 - protein, 81 aa, Canis lupus
LLTFEDVAVFFSEEEWKLLNPTQKILYSDVMQENYETVISLGLKLKNDTGNDQPISLSTLELQASGCKVLRKARVKVAQKT

SEQ ID NO: 1650 - protein, 81 aa, Macaca fascicularis
QTDLVTFDSVAVEFTQEEWTLLDPTQRNLYRDVMLENYKNLSSVGYQLFKPSLISWLEEEEELSTLPRVLQEWKMCLKTKG

SEQ ID NO: 1651 - protein, 81 aa, Puma concolor
LLTFEDVAVSFSEEEWKLLDPAQKILYNDVMQENYETVISLGLKLKNDTGNDQPISVSALEIQASGRKVLRKARMKVAQKT

SEQ ID NO: 1652 - protein, 81 aa, Myotis lucifugus
AAQELVTFQDVFVDFSQEELNSLSAAQRRLHREVTLENYRSLVSLGYRFPKPDIIAQLEEEESRAMEEDGDTKTGPDWETG

SEQ ID NO: 1653 - protein, 81 aa, Phascolarctos cinereus
AQDALTFQDVAVDFTWEEWGQLDPAQQNLYRDVMLENYQNLISLGFPVSKPEVISQLEQGEVPWALKRAVAEGSCPDWEAR

SEQ ID NO: 1654 - protein, 81 aa, Bos taurus
AEELVTFEDVAVHFSPEELPYLSASQRNLYREVMLENYRNLVSLGYQFPKPDIISQLEEEESHAREEDGSTVTCQDWEEQS

SEQ ID NO: 1655 - protein, 81 aa, Callithrix jacchus
SQTLVTFKDVFVDFTREEWKLLDTAQQIVYRNVMLENYKNLVSLGYQLTKPDVILRLEKGEEPWVVERGIHQETHPDSETA

SEQ ID NO: 1656 - protein, 81 aa, Odocoileus virginianus
PQEPVTFADVAVLFTPEEWLFLDSAQKSLYRDVMLENYRNLASVGDQLCKTRMSSHMEQREELCVTERGVFPGAQLGPHLQ

SEQ ID NO: 1657 - protein, 81 aa, Ovis aries
SYRSKTMAQGSLTFSDVAIGFSQQEWECLDPVQKTLYRDVMMENYGNLVSLGHSISKPNVITLLEQGKEPWIVVREETRSW

SEQ ID NO: 1658 - protein, 81 aa, Cebus imitator
AELPVVFEDVAVYFTREEWGMLDKRQKELYRDVMRMNYELMASLGPAAAKPDLISKLERRAAPWIKDPNGPKWGKGRPPGN

SEQ ID NO: 1659 - protein, 81 aa, Vulpes vulpes
SQELLTFKDIFVDFTQEEWGQLAPAHRNLYREVMLENYGNLVSVGYQLSKPGVISQLEKGEEPWLIEREISGSPSSDLENK

SEQ ID NO: 1660 - protein, 81 aa, Callithrix jacchus
EELPVVFEDVAVYFTREEWGMLDKRQKELYRDVMRMNYELLASLGPAAAKPDLISKLERRAAPWIKHPNGPKWGKGRPPGN

SEQ ID NO: 1661 - protein, 81 aa, Pongo sp.
SQEPVTFADVAVVFTPEEWVFLDSTQRSLYRDVMLENYRNLASVADQLCKPNALSYLEERGEQWTTDRGILSDTCAEPQCQ

SEQ ID NO: 1662 - protein, 81 aa, Bison bison
PQEPVTFADVAVLFTPEEWLFLDSAQKSLYRDVMLENYRNLASVGDQLCKTRMSSHLEQREELCVTERGIFPGAHLGPHFQ

SEQ ID NO: 1663 - protein, 81 aa, Vulpes vulpes
SQELLTFKDVSVDFTQEEWGQLSLAHRNLYREVMLENYGNLVSVAGYQLSKPSVISQLEKGQEPWMTEKKGPGDPSPDLKN

SEQ ID NO: 1664 - protein, 81 aa, Camelus dromedarius
LLTFEDVALSFTEEEWQLLDPTQKILYNDVMQENYETVISLGLKLKNDTGNDQPISLSTLEIQGSGCKVLRKARVKVAQKT

SEQ ID NO: 1665 - protein, 81 aa, Neomonachus schauinslandi
SQGLLTFKDISVDFTQEEWGQLAPAHRNLYREVMLENYGNLVSVAGYQLSKPSVISQLEKGQEPWMTEKEGPGDSSSDLKN

SEQ ID NO: 1666 - protein, 81 aa, Enhydra lutris
LLTFEDVAVSFSEEEWRLLDPTQKSLYNDVMQENYETVVSLGLKLKNDTGNDQPISLSALEIQASGCRVLRKARMKVAQKT

SEQ ID NO: 1667 - protein, 81 aa, Enhydra lutris
SQELLTFKDISVDFTQEEWGQLPLAHRNLYREVMLENYGNLVSVAGYQLSKPSVISQLEKGQEPWMTEKEVPEDPSSDLRT

SEQ ID NO: 1668 - protein, 81 aa, Physeter macrocephalus
LLTFEDVALFFTEEEWQLLDPAQKILYYNVMQENYETVTSLGLKLKNDTGNDQPISLSTLEIQASGCKVLRKARMKVAQKT

SEQ ID NO: 1669 - protein, 81 aa, Aotus trivirgatus
EELPVVFEDVAVYFTREEWGMLDKRQKELYRDVMRMNYELLASLGPAAAKPDLISKLERRAAPWIRDPNGPKWGKGRPSGN

SEQ ID NO: 1670 - protein, 81 aa, Odocoileus virginianus
QLTFEDVALSFSKEEWQIMDPNQKTLYIDVMQEIYETVTSLGLKLKNDTGNDQPVSLSTSEIQPSGCKVLRKARMKVAQTT

SEQ ID NO: 1671 - protein, 81 aa, Callithrix jacchus
QLQETMTFKDVEVTFSQDEWGLLDSAQRNLYRDVMLENYRNMAFLVGPFTKPALISWLEAREPWGLNVQVAQPKRNPGAAP

SEQ ID NO: 1672 - protein, 81 aa, Capra hircus
QPQGTVTFKDVEVTFSQDEWGLLDASQRNLYRDVMLENYGNMASVVGPFTKPALISWLEAREPWGLNVQGVQLKGNPGAAP

SEQ ID NO: 1673 - protein, 81 aa, Pteropus vampyrus
AEVPVAFEDVAVYFTQEEWGSLDKRQKELYRDVMWMNYELLASLGPAAAKPDLISKLERRAAPWIKDTRGPKWGKGKRKTV

SEQ ID NO: 1674 - protein, 81 aa, Pan paniscus
EELPVVFEDVAVYFTREEWGMLDKRQKELYRDVMRMNYELLASLGPAAAKPDLISKLERRAAPWIKDPNGAKSGGKGRPPG

SEQ ID NO: 1675 - protein, 81 aa, Homo sapiens
SQEPVTFADVAVVFTPEEWVFLDSTQRSLYRDVMLENYRNLASVADQLCKPNALSYLEERGEQWTTDRGVLPDTCAEPQCQ

SEQ ID NO: 1676 - protein, 81 aa, Gulo gulo
LLTFEDVAVSFSEEEWRLLDPAQKSLYNDVMQENYETIVSLGLKLKNDTGNDQPISLSALEIQASGCRVLRKARMKVAQKT

SEQ ID NO: 1677 - protein, 81 aa, Erinaceus europaeus
FQELVTFEDVCVDFTSEELSCLSTSQRTLYREVMLENYRNLVSLGHQFSKPELISRLEEEEFQAMAADSSAVAGDSGAVAG

SEQ ID NO: 1678 - protein, 81 aa, Muntiacus reevesi
EALPVVFEDVAVYFTREEWGALDKRQKEMYRDVMRMNYELLASLGPAAAKPDLISKLERRAAPWIKDPHGLKWGKGRPPGK

SEQ ID NO: 1679 - protein, 81 aa, Propithecus coquereli
QPQEAMTFKDVEVTFSQDEWGSLDSAQRNLYRDVMLENYRNMVSLVGPFTKPALISWLEAREPWGLNVQAAQPKGNPGAAP

SEQ ID NO: 1680 - protein, 81 aa, Propithecus coquereli
EELPAVFEDVAVYFTREEWGMLDKRQKELYRDVMRLNYELLASLGPAAAKPDLISKLERRAAPWIKDPNGPKWGKGGPPGK

SEQ ID NO: 1681 - protein, 81 aa, Rhinolophus ferrumequinum
EELPVAFEDVAVYFTREEWGMLDKRRKELYRDVMRRNYELLASLGPAAAKPDLISKLERGAAPWIKDPNGPKWGKGKKKMV

SEQ ID NO: 1682 - protein, 81 aa, Rhinolophus ferrumequinum
MAEGLKFKDVAIYFSQNEWECLHSAQKDLYRDIMLENYNNLISLGLSESKPDVISLLEQRKEPWMVERKETKEWFPDWESR

SEQ ID NO: 1683 - protein, 81 aa, Microcaecilia unicolor
QVPVTFEDITVYFSREQWEYLDEGQKELYREVMKENYETLISLGTGPEGFNPEVLARIKLEEESHVWDPKEPGQKEVTRSY

SEQ ID NO: 1684 - protein, 81 aa, Camelus ferus
EELPVVFEDVAVYFTREEWGVLDKRQKELYRDVMRMNYELLASLGPAAAKPDLISKLERRAAPWIKDPNGPKWGKGRVPAC

SEQ ID NO: 1685 - protein, 84 aa, Mus musculus
LTYDDVYVNFTQEEWALLNPSQKSLYKDVMLETYRNLIAVGYNWEDHNIEEHCQSSRRHGRNERILTGENPYEGIQCGEAFVHH

SEQ ID NO: 1686 - protein, 92 aa, Xenopus tropicalis
VKFDEVAVVFSEDEWNLLTDQQRGLYMEVMKENYEHLIYLGFEVPVILSLLQDGGGIGSDTVTQSKSQQVAGAEESKSSVTLEGPIPETLPS

SEQ ID NO: 1687 - protein, 93 aa, Chelonia mydas
VTFQEVAVCFTEEEWALLDPGQRALYRVVMQENYEAVTSLVAKGNKNSLCQTFCLCWGSPSSMLFCSPSLLQGLQKPQDCRGLYGGAPQCQTV

SEQ ID NO: 1688 - protein, 84 aa, Peromyscus maniculatus
VTYNDVHIDFTWEEWTLLDLSQKNLYKDVMLETYWNLLTIGYSWEDHNIEEHCQSSRRYERHERSQAGEKPSIYTQCIKAFEHL

SEQ ID NO: 1689 - protein, 83 aa, Mesocricetus auratus
VTYDDVCIDFTWEEWTLLDPSQKKLYKDVMLETYRNLTAIGYNWENHHVEEYYQSSRRNARNEKSQTAEKPSVNTQCVKAFTH

SEQ ID NO: 1690 - protein, 84 aa, Mesocricetus auratus
VSFEDVAVHFTQEEWALLDPSQKSLYRDVMLETCRNLAAIGYIWEEQTIEDDCKNFGRYQRHTISHSEYTPYEHEECGNMPCDP

SEQ ID NO: 1691 - protein, 84 aa, Mus caroli
VTYEDVHVNFSHEEWALLDSSQKSLYRDVMLETCRNLMAIGYRLEDHNIEEHCQSSRRPGRYNICNCGYKPCENEDHGKKQCTF

SEQ ID NO: 1692 - protein, 83 aa, Mus caroli
MTYDDVHVNFTGEEWALLSPSQKRLYKDVMLETYRNLTAIGYNWEDHNSEHFQHSRRHGRHERRHTGEKPSVYTQCGKVFAYH

SEQ ID NO: 1693 - protein, 93 aa, Mus caroli
VTYEDVHVNFTQEEWALLDPSQKKLYKDVMLETYRNLNAIGFSWEAQNIEEHCQSFGRHRRCERSQRAEKPSEYTQPDKGFALRAHSHAQRHE

SEQ ID NO: 1694 - protein, 84 aa, Cricetulus griseus
LTYDDVQINFTSEEWSLLDTSQKNLYKDVMLETYKNLTDIGYTWEDCSIEEHCASSKRKERPKRSQTGEKPSAYTQCAKDFAYS

SEQ ID NO: 1695 - protein, 84 aa, Peromyscus maniculatus
ITYDDVHVNFTWEEWTLLDPFQKNLYKDVMLETYRNLTTIGYSWEDSNIEVHCQSSGRHERHERSHTGEKPSVYTQCVETFAHH

SEQ ID NO: 1696 - protein, 84 aa, Peromyscus maniculatus
VTYDDVHIDFTWEEWTLLDPSQKNLYKDVMLETYRNLTTVGYSWEDHLIEEHCKSSRKHERHERIPTGEQPSESTQSFRAFAHH

SEQ ID NO: 1697 - protein, 82 aa, Mesocricetus auratus
VTFEDVAVNFTSGEWALLDSSQKKLYRDVMKETFLNLISIEKGLEPNIEEHYKDFCRNLRTQLVEKDWGYEYNRQWDDNLQT

SEQ ID NO: 1698 - protein, 92 aa, Erinaceus europaeus
VTYEDVTVTFTQEEWALLNPSEKKLYRDVMWENLRNIFSTGKIQGDNYNEEQHNHQGSKQSCRVVKISGGQKRSQNDEKQRMQSEGKSYECE

SEQ ID NO: 1699 - protein, 87 aa, Nomascus leucogenys
VAFEDVAVNFTQEEWALLNSSQKNLYREVMQETCRNLASVGSKWKDQNIEDHFEKPGKNIRKHMVQKLCESKEGSQYGEVVSQIPNL

SEQ ID NO: 1700 - protein, 87 aa, Rhinopithecus roxellana
VAFEDVAVNFTQEEWALLDPSQKNLYREVMQETLRNLASIGKKWNNQYIEDEHQNPRRNLRRLIKERLSESKESHQHGEFLTQVPDD

SEQ ID NO: 1701 - protein, 89 aa, Bison bison
VVFEDVAVNFTLEEWALLDSSQKELYRDVMLETFRNLASVDGETQYKANGSVSQQDIYRNKISKEHKISKFTGNDSWPFVLGKIWEELS

SEQ ID NO: 1702 - protein, 114 aa, Callithrix jacchus
VTFEDIAVYFSREEWGLLDEAQRCLYHDVMLENFSLMTSVGCLHGIGAEEAPSEQIVSVETVSQARTPKPSSSIPNAHSCEMCILVMKDILYLTEHQGTLPWQKPYTSAASGKW

SEQ ID NO: 1703 - protein, 84 aa, Macaca mulatta
LTFEDVAVYFSEEEWQLLDPPEKTLYNDVMQDIYETVISLGLKLKNDTGNDHPISVSTSEIQTSGCKVSKKTRMKIAQKTMGRE

SEQ ID NO: 1704 - protein, 83 aa, Pan troglodytes
VTFKDVAVIFTEEELGLLDPAQRKLYRDVMLENFRNLLSVGHQPFHGDTFHFLREEKFWVMGTTSQREGNLGGKIQTEMETVP

SEQ ID NO: 1705 - protein, 87 aa, Vicugna pacos
VTFEDVAVNFSLEEWALLDLSQKKLYRDVMQETFRNLASVGEKWDNHNIEDWNKTQGRKLRSHMVEKLSESKEGGQHGETASQIPNL

SEQ ID NO: 1706 - protein, 84 aa, Homo sapiens
LTFEDVAVYFSEEEWQLLNPLEKTLYNDVMQDIYETVISLGLKLKNDTGNDHPISVSTSEIQTSGCEVSKKTRMKIAQKTMGRE

SEQ ID NO: 1707 - protein, 91 aa, Propithecus coquereli
VTFEDVAVNFTPQEWALLDPSQKNLYRDVMQETLRNLASVGKKWKDQNMEDECKTPRRNLRSVVGERLFTSKEGSQCGETLNLDSHHMLKK

SEQ ID NO: 1708 - protein, 92 aa, Balaenoptera acutorostrata
VVFEDVAVYFSQEEWGLLDEAQRHLYHAVMTENFALVTSLGCWHGAQDEEAPSEQSISVGMSEVGTPKPDPSTKKGQPYEMCEPLSKDLLHL

SEQ ID NO: 1709 - protein, 93 aa, Notechis scutatus
VSFEEVAVHFSEEEWSQLDPAQKALHGEVMLENSRNLASLGYNEHGNKNCKEQCQPVDPNEQNRNFADQMQTKIDETNQSQSEVEKTFHSTHH

SEQ ID NO: 1710 - protein, 97 aa, Rhinolophus ferrumequinum
EKIEDMAVSLIREEWLLDPSQKDLRRDNRTENYRNMFSLGGETRSENRELASKQVASAGVQPHGETAARCNGDVTGALEHGEARDLLGSRVERQRAN

SEQ ID NO: 1711 - protein, 80 aa, Homo sapiens
AFEDVAVYFSQEEWGLLDTAQRALYRRVMLDNFALVASLGLSTSRPRVVIQLERGEEPWVPSGTDTTLSRTTYRRRNPGS

SEQ ID NO: 1712 - protein, 80 aa, Homo sapiens
RESLEDEVTPGLPTAESQELLTFKDISIDFTQEEWGQLAPAHQNLYREVMLENYSNLVSVGYQLSKPSVISQLEKGEEPW

SEQ ID NO: 1713 - protein, 80 aa, Homo sapiens
ALRSVMFSDVSIDFSPEEWEYLDLEQKDLYRDVMLENYSNLVSLGCFISKPDVISSLEQGKEPWKVVRKGRRQYPDLETK

SEQ ID NO: 1714 - protein, 80 aa, Homo sapiens
DSVAFEDVAVNFTQEEWALLSPSQKNLYRDVTLETFRNLASVGIQWKDQDIENLYQNLGIKLRSLVERLCGRKEGNEHRE

SEQ ID NO: 1715 - protein, 80 aa, Homo sapiens
SQVTFSDVAIDFSHEEWACLDSAQRDLYKDVMVQNYENLVSVGLSVTKPYVIMLLEDGKEPWMMEKKLSKAYPFPLSHSV

SEQ ID NO: 1716 - protein, 80 aa, Homo sapiens
GPQGARRQAFLAFGDVTVDFTQKEWRLLSPAQRALYREVTLENYSHLVSLGILHSKPELIRRLEQGEVPWGEERRRRPGP

SEQ ID NO: 1717 - protein, 80 aa, Homo sapiens
NVEVVKVMPQDLVTFKDVAIDFSQEEWQWMNPAQKRLYRSMMLENYQSLVSLGLCISKPYVISLLEQGREPWEMTSEMTR

SEQ ID NO: 1718 - protein, 80 aa, Homo sapiens
EETQGELTSSCGSKTMANVSLAFRDVSIDLSQEEWECLDAVQRDLYKDVMLENYSNLVSLGYTIPKPDVITLLEQEKEPW

SEQ ID NO: 1719 - protein, 80 aa, Homo sapiens
DTVVFEDVVVDFTLEEWALLNPAQRKLYRDVMLETFKHLASVDNEAQLKASGSISQQDTSGEKLSLKQKIEKFTRKNIWA

SEQ ID NO: 1720 - protein, 80 aa, Homo sapiens
GSLEEGRRATGLPAAQVQEPVTFKDVAVDFTQEEWGQLDLVQRTLYRDVMLETYGHLLSVGNQIAKPEVISLLEQGEEPW

SEQ ID NO: 1721 - protein, 80 aa, Homo sapiens
TQPDEDLHLQAEETQLVKESVTFKDVAIDFTLEEWRLMDPTQRNLHKDVMLENYRNLVSLGLAVSKPDMISHLENGKGPW

SEQ ID NO: 1722 - protein, 80 aa, Homo sapiens
NMSQASVSFQDVTVEFTREEWQHLGPVERTLYRDVMLENYSHLISVGYCITKPKVISKLEKGEEPWSLEDEFLNQRYPGY

SEQ ID NO: 1723 - protein, 80 aa, Homo sapiens
EPLKFRDVAIEFSLEEWQCLDTIQQNLYRNVMLENYRNLVFLGIVVSKPDLITCLEQEKEPWTRKRHRMVAEPPVICSHF

SEQ ID NO: 1724 - protein, 80 aa, Homo sapiens
RVLTFRDVAVEFSPEEWECLDSAQQRLYRDVMLENYGNLFSLGLAIFKPDLITYLEQRKEPWNARRQKTVAKHPAGSLHF

SEQ ID NO: 1725 - protein, 80 aa, Homo sapiens
NMEGLVMFQDLSIDFSQEEWECLDAAQKDLYRDVMMENYSSLVSLGLSIPKPDVISLLEQGKEPWMVSRDVLGGWCRDSE

SEQ ID NO: 1726 - protein, 80 aa, Homo sapiens
QDPSAEGLSEEVPVVFEELPVVFEDVAVYFTREEWGMLDKRQKELYRDVMRMNYELLASLGPAAAKPDLISKLERRAAPW

SEQ ID NO: 1727 - protein, 10 aa, synthetic construct
  VARIANT 2: note = K or R
  VARIANT 3: note = A, D, E, G, N, S, or T
  VARIANT 7: note = D, E, or S
  VARIANT 10: note = L or R
QXXLYRXVMX

SEQ ID NO: 1728 - protein, 15 aa, synthetic construct
  VARIANT 1: note = A, L, P, or S
  VARIANT 2: note = L or V
  VARIANT 3: note = S or T
  VARIANT 5: note = A, E, G, K, or R
  VARIANT 8: note = A or T
  VARIANT 9: note = I or V
  VARIANT 10: note = D, E, N, or Y
  VARIANT 12: note = S or T
  VARIANT 13: note = E, P, Q, R, or W
  VARIANT 14: note = E or N
  VARIANT 15: note = E or Q
XXXFXDVXXXFXXXX

SEQ ID NO: 1729 - protein, 15 aa, synthetic construct
  VARIANT 3: note = K or R
  VARIANT 4: note = D or E
  VARIANT 7: note = L, Q or R
  VARIANT 9: note = N or T
  VARIANT 10: note = F or Y
  VARIANT 11: note = A, E, G, Q, R or S
  VARIANT 12: note = H, L, or N
  VARIANT 13: note = L or V
  VARIANT 14: note = A, G, I, L, T or V
  VARIANT 15: note = A, F, or S
LYXXVMXEXXXXXXX

SEQ ID NO: 1730 - protein, 14 aa, synthetic construct
  VARIANT 2: note = A, E, G, K or R
  VARIANT 5: note = A, S or T
  VARIANT 6: note = I or V
  VARIANT 7: note = D, E, N or Y
  VARIANT 9: note = S or T
  VARIANT 10: note = E, L, P, Q, R or W
  VARIANT 11: note = D or E
  VARIANT 14: note = A, E, G, Q or R
FXDVXXXFXXXEWX

SEQ ID NO: 1731 - RNA, 108 nt, synthetic construct
  source 1..108: mol_type = other RNA
acatctggcgcgtttattccattactttggagccagtcccagcgactatgtcgtatggacgaagcgcttatttatcggagagaaaccgataagtaaaacgcatcaaag

SEQ ID NO: 1732 - RNA, 108 nt, synthetic construct
  source 1..108: mol_type = other RNA
tactggcgcttttatctcattactttgagagccatcaccagcgactatgtcgtatgggtaaagcgcttatttatcggagagaaatccgataaataagaagcatcaaag

SEQ ID NO: 1733 - RNA, 81 nt, synthetic construct
  source 1..81: mol_type = other RNA
acatctggcgcgtttattccattactttggagccagtcccagcgactatgtcgtatggacgaagcgcttatttatcggaga

SEQ ID NO: 1734 - RNA, 78 nt, synthetic construct
  source 1..78: mol_type = other RNA
acatctggcgcgtttattccattactttggagccagtcccagcgactatgtcgtatggacgaagcgcttatttatcgg

SEQ ID NO: 1735 - RNA, 80 nt, synthetic construct
  source 1..80: mol_type = other RNA
tactggcgcttttatctcattactttgagagccatcaccagcgactatgtcgtatgggtaaagcgcttatttatcggaga

SEQ ID NO: 1736 - RNA, 77 nt, synthetic construct
  source 1..77: mol_type = other RNA
tactggcgcttttatctcattactttgagagccatcaccagcgactatgtcgtatgggtaaagcgcttatttatcgg

SEQ ID NO: 1737 - RNA, 25 nt, synthetic construct
  source 1..25: mol_type = other RNA
gtttacacactccctctcatagggt

SEQ ID NO: 1738 - RNA, 25 nt, synthetic construct
  source 1..25: mol_type = other RNA
gtttacacactccctctcatgaggt

SEQ ID NO: 1739 - RNA, 25 nt, synthetic construct
  source 1..25: mol_type = other RNA
ttttacataccccctctcatgggat

SEQ ID NO: 1740 - RNA, 25 nt, synthetic construct
  source 1..25: mol_type = other RNA
gtttacacactccctctcatggggg

SEQ ID NO: 1741 - RNA, 20 nt, synthetic construct
  source 1..20: mol_type = other RNA
ccagcgactatgtcgtatgg

SEQ ID NO: 1742 - RNA, 39 nt, synthetic construct
  source 1..39: mol_type = other RNA
gcgcttatttatcggagagaaatccgataaataagaagc

SEQ ID NO: 1743 - RNA, 74 nt, synthetic construct
  source 1..74: mol_type = other RNA
ggcgcttttatctcattactttgagagccatcaccagcgactatgtcgtatgggtaaagcgcttatttatcgga

SEQ ID NO: 1744 - RNA, 89 nt, synthetic construct
  source 1..89: mol_type = other RNA
actggcgcttttatctgattactttgagagccatcaccagcgactatgtcgtagtgggtaaagctccctcttcggagggagcatcaaag

SEQ ID NO: 1745 - RNA, 99 nt, synthetic construct
  source 1..99: mol_type = other RNA
actggcgcttctatctgattactctgagcgccatcaccagcgactatgtcgtagtgggtaaagccgcttacggacttcggtccgtaagaggcatcagag

SEQ ID NO: 1746 - RNA, 89 nt, synthetic construct
  source 1..89: mol_type = other RNA
actggcgcttctatctgattactctgagcgccatcaccagcgactatgtcgtagtgggtaaagctccctcttcggagggagcatcagag

SEQ ID NO: 1747 - RNA, 97 nt, synthetic construct
  source 1..97: mol_type = other RNA
actggcgcctttatctcattactttgagagccatcaccagcgactatgtcgtatgggtaaagcgcttacggacttcggtccgtaagaagcatcaaag

SEQ ID NO: 1748 - RNA, 89 nt, synthetic construct
  source 1..89: mol_type = other RNA
gctggcgcttttatctgattactttgagagccatcaccagcgactatgtcgtagtgggtaaagctccctcttcggagggagcatcaaag

SEQ ID NO: 1749 - RNA, 88 nt, synthetic construct
  source 1..88: mol_type = other RNA
actggcgcttttatctgattactttgagagccatcaccagcgactatgtcgtatgggtaaagctccctcttcggagggagcatcaaag

SEQ ID NO: 1750 - RNA, 151 nt, synthetic construct
  source 1..151: mol_type = other RNA
actggcgcttttatctgattactttgagagccatcaccagcgactatgtcgtagtgggtaaataggagctgcactatgggcgcagtgtcattgacgctgacggtacaggccagacaattattgtctggtatagtgcagctcctaatcaaag

SEQ ID NO: 1751 - RNA, 97 nt, synthetic construct
  source 1..97: mol_type = other RNA
actggcgcctttatctgattactttgagagccatcaccagcgactatgtcgtatgggtaaagcgcttacggacttcggtccgtaagaagcatcaaag

SEQ ID NO: 1752 - RNA, 97 nt, synthetic construct
  source 1..97: mol_type = other RNA
actggcgcttttatctgattactttgagagccatcaccagcgactatgtcgtatgggtaaagcgcttacggacttcggtccgtaagaagcatcaaag

SEQ ID NO: 1753 - RNA, 98 nt, synthetic construct
  source 1..98: mol_type = other RNA
actggcgcttttatctgattactttgagagccatcaccagcgactatgtcgtagtgggtaaagcgcttacggacttcggtccgtaagaagcatcaaag

SEQ ID NO: 1754 - RNA, 89 nt, synthetic construct
  source 1..89: mol_type = other RNA
actggcgcttttatctgattactttgagagccatcaccagcgactatgtcgtattgggtaaagctccctcttcggagggagcatcaaag

SEQ ID NO: 1755 - RNA, 98 nt, synthetic construct
  source 1..98: mol_type = other RNA
actggcgcttttatctgattactttgagagccatcaccagcgactatgtcgtattgggtaaagcgcttacggacttcggtccgtaagaagcatcaaag

SEQ ID NO: 1756 - RNA, 98 nt, synthetic construct
  source 1..98: mol_type = other RNA
actggcgcctttatcatcattactttgagagccatcaccagcgactatgtcgtatgggtaaagcgcttacggacttcggtccgtaagaagcatcaaag

SEQ ID NO: 1757 - RNA, 90 nt, synthetic construct
  source 1..90: mol_type = other RNA
actggcgcttttatctgattactttgagagccatcaccagcgactatgtcgtagtgggtaaagcgccctcttcggagggaagcatcaaag

SEQ ID NO: 1758 - RNA, 89 nt, synthetic construct
  source 1..89: mol_type = other RNA
actggcacttttacctgattactttgagagccaacaccagcgactatgtcgtagtgggtaaagctccctcttcggagggagcatcaaag

SEQ ID NO: 1759 - RNA, 89 nt, synthetic construct
  source 1..89: mol_type = other RNA
actggcacttttatctgattactttgagagccatcaccagcgactatgtcgtagtgggtaaagctccctcttcggagggagcatcaaag

SEQ ID NO: 1760 - RNA, 89 nt, synthetic construct
  source 1..89: mol_type = other RNA
actggcccttttatctgattactttgagagccatcaccagcgactatgtcgtagtgggtaaagctccctcttcggagggagcatcaaag

SEQ ID NO: 1761 - RNA, 89 nt, synthetic construct
  source 1..89: mol_type = other RNA
actggcgcttttacctgattactttgagagccatcaccagcgactatgtcgtagtgggtaaagctccctcttcggagggagcatcaaag

SEQ ID NO: 1762 - RNA, 89 nt, synthetic construct
  source 1..89: mol_type = other RNA
actggcgcttttatctgattactttgagagccaacaccagcgactatgtcgtagtgggtaaagctccctcttcggagggagcatcaaag

SEQ ID NO: 1763 - RNA, 97 nt, synthetic construct
  source 1..97: mol_type = other RNA
actggcacctttacctgattactttgagagccaacaccagcgactatgtcgtatgggtaaagcgcttacggacttcggtccgtaagaagcatcaaag

SEQ ID NO: 1764 - RNA, 97 nt, synthetic construct
  source 1..97: mol_type = other RNA
actggcacctttatctgattactttgagagccatcaccagcgactatgtcgtatgggtaaagcgcttacggacttcggtccgtaagaagcatcaaag

SEQ ID NO: 1765 - RNA, 97 nt, synthetic construct
  source 1..97: mol_type = other RNA
actggcccctttatctgattactttgagagccatcaccagcgactatgtcgtatgggtaaagcgcttacggacttcggtccgtaagaagcatcaaag

SEQ ID NO: 1766 - RNA, 97 nt, synthetic construct
  source 1..97: mol_type = other RNA
actggcgcctttatctgattactttgagagccaacaccagcgactatgtcgtatgggtaaagcgcttacggacttcggtccgtaagaagcatcaaag

SEQ ID NO: 1767 - RNA, 90 nt, synthetic construct
  source 1..90: mol_type = other RNA
gactggcgcttttatctgattactttgagagccatcaccagcgactatgtcgtagtgggtaaagctccctcttcggagggagcatcaaag

SEQ ID NO: 1768 - RNA, 90 nt, synthetic construct
  source 1..90: mol_type = other RNA
actggcgcctttatctgattactttggagagccatcaccagcgactatgtcgtagtgggtaaagctccctcttcggagggagcatcaaag

SEQ ID NO: 1769 - RNA, 89 nt, synthetic construct
  source 1..89: mol_type = other RNA
actggcgcatttatctgattactttgtgagccatcaccagcgactatgtcgtagtgggtaaagctccctcttcggagggagcatcaaag

SEQ ID NO: 1770 - RNA, 89 nt, synthetic construct
  source 1..89: mol_type = other RNA
actggcgcctttatctgattactttgagagccatcaccagcgactatgtcgtagtgggtaaagctccctcttcggagggagcatcaaag

SEQ ID NO: 1771 - RNA, 90 nt, synthetic construct
  source 1..90: mol_type = other RNA
actggcgcttttatctgattactttggagagccatcaccagcgactatgtcgtagtgggtaaagctccctcttcggagggagcatcaaag

SEQ ID NO: 1772 - RNA, 89 nt, synthetic construct
  source 1..89: mol_type = other RNA
actggcgcatttatctgattactttgagagccatcaccagcgactatgtcgtagtgggtaaagctccctcttcggagggagcatcaaag

SEQ ID NO: 1773 - RNA, 89 nt, synthetic construct
  source 1..89: mol_type = other RNA
actggcgcttttatctgattactttgtgagccatcaccagcgactatgtcgtagtgggtaaagctccctcttcggagggagcatcaaag

SEQ ID NO: 1774 - RNA, 90 nt, synthetic construct
  source 1..90: mol_type = other RNA
actggcgcttttattctgattactttgagagccatcaccagcgactatgtcgtagtgggtaaagctccctcttcggagggagcatcaaag

SEQ ID NO: 1775 - RNA, 88 nt, synthetic construct
  source 1..88: mol_type = other RNA
acggcgcttttatctgattactttgagagccatcaccagcgactatgtcgtagtgggtaaagctccctcttcggagggagcatcaaag

SEQ ID NO: 1776 - RNA, 89 nt, synthetic construct
  source 1..89: mol_type = other RNA
actggcgcttttatatgattactttgagagccatcaccagcgactatgtcgtagtgggtaaagctccctcttcggagggagcatcaaag

SEQ ID NO: 1777 - RNA, 90 nt, synthetic construct
  source 1..90: mol_type = other RNA
actggcgcttttatcttgattactttgagagccatcaccagcgactatgtcgtagtgggtaaagctccctcttcggagggagcatcaaag

SEQ ID NO: 1778 - RNA, 89 nt, synthetic construct
  source 1..89: mol_type = other RNA
actggcgcttttatctgattactttgagagccagcaccagcgactatgtcgtagtgggtaaagctccctcttcggagggagcatcaaag

SEQ ID NO: 1779 - RNA, 89 nt, synthetic construct
  source 1..89: mol_type = other RNA
actggcgctgttatctgattacttcgagagccatcaccagcgactatgtcgtagtgggtaaagctccctcttcggagggagcatcgaag

SEQ ID NO: 1780 - RNA, 89 nt, synthetic construct
  source 1..89: mol_type = other RNA
actggcgctcttatctgattacttcgagagccatcaccagcgactatgtcgtagtgggtaaagctccctcttcggagggagcatcgaag

SEQ ID NO: 1781 - RNA, 89 nt, synthetic construct
  source 1..89: mol_type = other RNA
actggcgcttgtatctgattactctgagagccatcaccagcgactatgtcgtagtgggtaaagctccctcttcggagggagcatcagag

SEQ ID NO: 1782 - RNA, 89 nt, synthetic construct
  source 1..89: mol_type = other RNA
actggcgcttctatctgattactctgagagccatcaccagcgactatgtcgtagtgggtaaagctccctcttcggagggagcatcagag

SEQ ID NO: 1783 - RNA, 89 nt, synthetic construct
  source 1..89: mol_type = other RNA
actggcgctttgatctgattaccttgagagccatcaccagcgactatgtcgtagtgggtaaagctccctcttcggagggagcatcaagg

SEQ ID NO: 1784 - RNA, 89 nt, synthetic construct
  source 1..89: mol_type = other RNA
actggcgctttcatctgattaccttgagagccatcaccagcgactatgtcgtagtgggtaaagctccctcttcggagggagcatcaagg

SEQ ID NO: 1785 - RNA, 89 nt, synthetic construct
  source 1..89: mol_type = other RNA
actggcgctgttatctgattactttgagagccatcaccagcgactatgtcgtagtgggtaaagctccctcttcggagggagcatcaaag

SEQ ID NO: 1786 - RNA, 89 nt, synthetic construct
  source 1..89: mol_type = other RNA
actggcgcttttatctgattactttgagagccatcaccagcgactatgtcgtagtgggtaaagctccctcttcggagggagcatcgaag

SEQ ID NO: 1787 - RNA, 89 nt, synthetic construct
  source 1..89: mol_type = other RNA
actggcgcttttatctgattacttcgagagccatcaccagcgactatgtcgtagtgggtaaagctccctcttcggagggagcatcaaag

SEQ ID NO: 1788 - RNA, 98 nt, synthetic construct
  source 1..98: mol_type = other RNA
actggcacttctatctgattactctgagagccatcaccagcgactatgtcgtatgggtaaagccgcttacggacttcggtccgtaagaggcatcagag

SEQ ID NO: 1789 - RNA, 89 nt, synthetic construct
  source 1..89: mol_type = other RNA
actggcacttctatctgattactctgagagccatcaccagcgactatgtcgtagtgggtaaagctccctcttcggagggagcatcagag

SEQ ID NO: 1790 - RNA, 98 nt, synthetic construct
  source 1..98: mol_type = other RNA
actggcacctttatctgattactttgagagccatcaccagcgactatgtcgtatgggtaaagccgcttacggacttcggtccgtaagaggcatcaaag

SEQ ID NO: 1791 - RNA, 98 nt, synthetic construct
  source 1..98: mol_type = other RNA
actggcacttgtatctgattactctgagagccatcaccagcgactatgtcgtatgggtaaagccgcttacggacttcggtccgtaagaggcatcagag

SEQ ID NO: 1792 - RNA, 89 nt, synthetic construct
  source 1..89: mol_type = other RNA
actggcacttgtatctgattactctgagagccatcaccagcgactatgtcgtagtgggtaaagctccctcttcggagggagcatcagag

SEQ ID NO: 1793 - RNA, 97 nt, synthetic construct
  source 1..97: mol_type = other RNA
actggcacttctatctgattactctgagagccatcaccagcgactatgtcgtatgggtaaagcgcttacggacttcggtccgtaagaagcatcagag

SEQ ID NO: 1794 - RNA, 98 nt, synthetic construct
  source 1..98: mol_type = other RNA
actggcgcttctatctgattactctgagagccatcaccagcgactatgtcgtatgggtaaagccgcttacggacttcggtccgtaagaggcatcagag

SEQ ID NO: 1795 - RNA, 98 nt, synthetic construct
  source 1..98: mol_type = other RNA
actggcacttctatctgattactctgagcgccatcaccagcgactatgtcgtatgggtaaagccgcttacggacttcggtccgtaagaggcatcagag

SEQ ID NO: 1796 - RNA, 98 nt, synthetic construct
  source 1..98: mol_type = other RNA
actggcgcttctatctgattactctgagcgccatcaccagcgactatgtcgtatgggtaaagccgcttacggacttcggtccgtaagaggcatcagag

SEQ ID NO: 1797 - RNA, 98 nt, synthetic construct
  source 1..98: mol_type = other RNA
actggcgcttctatctgattactctgagcgccatcaccagcgactatgtcgtatgggtaaagcgccttacggacttcggtccgtaaggagcatcagag

SEQ ID NO: 1798 - RNA, 98 nt, synthetic construct
  source 1..98: mol_type = other RNA
acgggactttctatctgattactctgaagtccctcaccagcgactatgtcgtatgggtaaagccgcttacggacttcggtccgtaagaggcatcagag

SEQ ID NO: 1799 - RNA, 98 nt, synthetic construct
  source 1..98: mol_type = other RNA
acctgtagttctatctgattactctgactacagtcaccagcgactatgtcgtatgggtaaagccgcttacggacttcggtccgtaagaggcatcagag

SEQ ID NO: 1800 - RNA, 99 nt, synthetic construct
  source 1..99: mol_type = other RNA
actgggccttctatctgattactctgaggcccatcaccagcgactatgtcgtagtgggtaaagccgcttagggacttcggtccctaagaggcatcagag

SEQ ID NO: 1801 - RNA, 97 nt, synthetic construct
  source 1..97: mol_type = other RNA
actgggccttctatctgattactctgaggcccatcaccagcgactatgtcgtagtgggtaaagcccttagggacttcggtccctaagggcatcagag

SEQ ID NO: 1802 - RNA, 99 nt, synthetic construct
  source 1..99: mol_type = other RNA
actgggccttctatctgattactctgaggcccatcaccagcgactatgtcgtagtgggtaaagcctcttagggacttcggtccctaagaggcatcagag

SEQ ID NO: 1803 - RNA, 89 nt, synthetic construct
  source 1..89: mol_type = other RNA
actgggccttctatctgattactctgaggcccatcaccagcgactatgtcgtagtgggtaaagctccctcttcggagggagcatcagag

SEQ ID NO: 1804 - RNA, 97 nt, synthetic construct
  source 1..97: mol_type = other RNA
actgggccttctatctgattactctgaggcccatcaccagcgactatgtcgtagtgggtaaagcccttagggaccttggtccctaagggcatcagag

SEQ ID NO: 1805 - RNA, 99 nt, synthetic construct
  source 1..99: mol_type = other RNA
actgggccttctatctgattactctgaggcccatcaccagcgactatgtcgtagtgggtaaagcctcttagggaccttggtccctaagaggcatcagag

SEQ ID NO: 1806 - RNA, 89 nt, synthetic construct
  source 1..89: mol_type = other RNA
actgggccttctatctgattactctgaggcccatcaccagcgactatgtcgtagtgggtaaagctccctccttggagggagcatcagag

SEQ ID NO: 1807 - RNA, 97 nt, synthetic construct
  source 1..97: mol_type = other RNA
actgggccttctatctgattactctgaggcccatcaccagcgactatgtcgtagtgggtaaagcccttagggaggaaactccctaagggcatcagag

SEQ ID NO: 1808 - RNA, 99 nt, synthetic construct
  source 1..99: mol_type = other RNA
actgggccttctatctgattactctgaggcccatcaccagcgactatgtcgtagtgggtaaagcctcttagggaggaaactccctaagaggcatcagag

SEQ ID NO: 1809 - RNA, 89 nt, synthetic construct
  source 1..89: mol_type = other RNA
actgggccttctatctgattactctgaggcccatcaccagcgactatgtcgtagtgggtaaagctccctggaaacagggagcatcagag

SEQ ID NO: 1810 - RNA, 98 nt, synthetic construct
  source 1..98: mol_type = other RNA
actgggccttctatctgattactctgaggcccatcaccagcgactatgtcgtagtgggtaaagcccttagggacttcaggtccctaagggcatcagag

SEQ ID NO: 1811 - RNA, 100 nt, synthetic construct
  source 1..100: mol_type = other RNA
actgggccttctatctgattactctgaggcccatcaccagcgactatgtcgtagtgggtaaagcctcttagggacttcaggtccctaagaggcatcagag

SEQ ID NO: 1812 - RNA, 90 nt, synthetic construct
  source 1..90: mol_type = other RNA
actgggccttctatctgattactctgaggcccatcaccagcgactatgtcgtagtgggtaaagctccctcttcaggagggagcatcagag

SEQ ID NO: 1813 - RNA, 97 nt, synthetic construct
  source 1..97: mol_type = other RNA
actgggccttctatctgattactctgaggcccatcaccaggcactatgtgctagtgggtaaagcccttagggaccttggtccctaagggcatcagag

SEQ ID NO: 1814 - RNA, 99 nt, synthetic construct
  source 1..99: mol_type = other RNA
actgggccttctatctgattactctgaggcccatcaccaggcactatgtgctagtgggtaaagcctcttagggaccttggtccctaagaggcatcagag

SEQ ID NO: 1815 - RNA, 89 nt, synthetic construct
  source 1..89: mol_type = other RNA
actgggccttctatctgattactctgaggcccatcaccaggcactatgtgctagtgggtaaagctccctccttggagggagcatcagag

SEQ ID NO: 1816 - RNA, 97 nt, synthetic construct
  source 1..97: mol_type = other RNA
actgggccttctatctgattactctgaggcccatcaccaggcactatgtgctagtgggtaaagcccttagggaggaaactccctaagggcatcagag

SEQ ID NO: 1817 - RNA, 99 nt, synthetic construct
  source 1..99: mol_type = other RNA
actgggccttctatctgattactctgaggcccatcaccaggcactatgtgctagtgggtaaagcctcttagggaggaaactccctaagaggcatcagag

SEQ ID NO: 1818 - RNA, 89 nt, synthetic construct
  source 1..89: mol_type = other RNA
actgggccttctatctgattactctgaggcccatcaccaggcactatgtgctagtgggtaaagctccctggaaacagggagcatcagag

SEQ ID NO: 1819 - RNA, 98 nt, synthetic construct
  source 1..98: mol_type = other RNA
actgggccttctatctgattactctgaggcccatcaccaggcactatgtgctagtgggtaaagcccttagggacttcaggtccctaagggcatcagag

SEQ ID NO: 1820 - RNA, 100 nt, synthetic construct
  source 1..100: mol_type = other RNA
actgggccttctatctgattactctgaggcccatcaccaggcactatgtgctagtgggtaaagcctcttagggacttcaggtccctaagaggcatcagag

SEQ ID NO: 1821 - RNA, 90 nt, synthetic construct
  source 1..90: mol_type = other RNA
actgggccttctatctgattactctgaggcccatcaccaggcactatgtgctagtgggtaaagctccctcttcaggagggagcatcagag

SEQ ID NO: 1822 - RNA, 21 nt, synthetic construct
  source 1..21: mol_type = other RNA
ccagcgactatgtcgtagtgg

SEQ ID NO: 1823 - protein, 21 aa, synthetic construct
ASAAAPAAASAAASAPSAAAA

SEQ ID NO: 1824 - protein, 16 aa, synthetic construct
AASPAAPSAPPAAASP

SEQ ID NO: 1825 - protein, 25 aa, synthetic construct
PPTPSPSPVPSTPPTNSSSTPPTPS

SEQ ID NO: 1826 - protein, 28 aa, synthetic construct
GSGGSGGSGGSPVPSTPPTPSPSTPPTP

SEQ ID NO: 1827 - protein, 21 aa, synthetic construct
ASPAAPAPASPAAPAPSAPAA

SEQ ID NO: 1828 - protein, 4 aa, synthetic construct
PPTP

SEQ ID NO: 1829 - protein, 11 aa, synthetic construct
GSGNSSGSGGS

SEQ ID NO: 1830 - protein, 9 aa, synthetic construct
ASAAAPAAA

SEQ ID NO: 1831 - protein, 9 aa, synthetic construct
AFPAAPAPA

SEQ ID NO: 1832 - protein, 6 aa, synthetic construct
IRAHGD

SEQ ID NO: 1833 - protein, 17 aa, synthetic construct
LQPVPPQALKREQVSQQ

SEQ ID NO: 1834 - protein, 8 aa, synthetic construct
GGGSGGGS

SEQ ID NO: 1835 - protein, 16 aa, synthetic construct
PGTSTEPSEGSAPGSP

SEQ ID NO: 1836 - protein, 7 aa, synthetic construct
HIGGINS

SEQ ID NO: 1837 - protein, 8 aa, synthetic construct
ASPAAPSP

SEQ ID NO: 1838 - protein, 10 aa, synthetic construct
GSGNSSGSGG

SEQ ID NO: 1839 - protein, 8 aa, synthetic construct
EAAKEAAK

SEQ ID NO: 1840 - protein, 10 aa, synthetic construct
LRTRYEADLA

SEQ ID NO: 1841 - protein, 16 aa, synthetic construct
EAAKEAAKEAAKEAAK

SEQ ID NO: 1842 - protein, 16 aa, synthetic construct
SGSETPGTSESATPES

SEQ ID NO: 1843 - protein, 20 aa, synthetic construct
PPTPSPSPVSSTPPTPPTPS

SEQ ID NO: 1844 - protein, 16 aa, synthetic construct
STEEGTSTEPSEGSAP

SEQ ID NO: 1845 - protein, 20 aa, synthetic construct
PPTPSPSPVPSTPPTPPTPS

SEQ ID NO: 1846 - protein, 24 aa, synthetic construct
GGGSGGGSGGGSEAAKEAAKEAAK

SEQ ID NO: 1847 - protein, 9 aa, synthetic construct
ASPAAPAPA

SEQ ID NO: 1848 - protein, 16 aa, synthetic construct
GGGSGGGSEAAKEAAK

SEQ ID NO: 1849 - protein, 16 aa, synthetic construct
GGGSGGGSGGGSGGGS

SEQ ID NO: 1850 - protein, 12 aa, synthetic construct
GGGSGGGSGGGS

SEQ ID NO: 1851 - protein, 4 aa, synthetic construct
GGGS

SEQ ID NO: 1852 - protein, 4 aa, synthetic construct
EAAK

SEQ ID NO: 1853 - protein, 16 aa, synthetic construct
VQQKYKVSDTAATVTG

SEQ ID NO: 1854 - protein, 12 aa, synthetic construct
GGGSGGGSGGVS

SEQ ID NO: 1855 - protein, 16 aa, synthetic construct
EAAKEAVKEAAKEAAK

SEQ ID NO: 1856 - protein, 10 aa, synthetic construct
PPTPSPSPVP

SEQ ID NO: 1857 - protein, 12 aa, synthetic construct
ITHKASSRMTFA

SEQ ID NO: 1858 - protein, 9 aa, synthetic construct
ASSAAPAPA

SEQ ID NO: 1859 - protein, 16 aa, synthetic construct
EAAKEAAKGGGSGGGS

SEQ ID NO: 1860 - protein, 16 aa, synthetic construct
AASPAAPSAPPASASP

SEQ ID NO: 1861 - protein, 18 aa, synthetic construct
SPAGSPTSTEEGTSESAT

SEQ ID NO: 1862 - protein, 6 aa, synthetic construct
ILGELT

SEQ ID NO: 1863 - protein, 9 aa, synthetic construct
SWRVRYMVA

SEQ ID NO: 1864 - protein, 6 aa, synthetic construct
YGAHLM

SEQ ID NO: 1865 - protein, 23 aa, synthetic construct
GSGNSSGSGGSGGSGNSSGSGGS

SEQ ID NO: 1866 - protein, 12 aa, synthetic construct
AYVVSADEREGG

SEQ ID NO: 1867 - protein, 4 aa, synthetic construct
MIGP

SEQ ID NO: 1868 - protein, 16 aa, synthetic construct
EAAKEAVKGGGSGGGS

SEQ ID NO: 1869 - protein, 6 aa, synthetic construct
LMPYEL

SEQ ID NO: 1870 - protein, 4 aa, synthetic construct
SPTP

SEQ ID NO: 1871 - protein, 20 aa, synthetic construct
GGGSGGGSGGGSGGGSGGGS

SEQ ID NO: 1872 - protein, 4 aa, synthetic construct
GCGS

SEQ ID NO: 1873 - protein, 8 aa, synthetic construct
NKQNIWQA

SEQ ID NO: 1874 - protein, 10 aa, synthetic construct
PPMPSPSPVP

SEQ ID NO: 1875 - RNA, 5885 nt, synthetic construct
  source 1..5885: mol_type = other RNA
aaataagagagaaaagaagagtaagaagaaatataagagccaccatggcccctaagaagaagcgtaaagtgagccggatggaacgcctcgtctacgaggtgcggcagaagtgcagaaacatcgaggacatctgcatctcctgcggatctctgaacgtgaccctggagcacccactgttcatcggcggcatgtgccagaactgtaaaaactgttttctggagtgtgcctatcaatacgacgatgacggctaccagagctactgcaccatctgttgcggcggaagagaggtgctgatgtgtggaaataacaactgctgccggtgcttctgcgtggaatgcgtggacctgctggtgggccccggcgccgcccaggccgctattaaggaagatccttggaactgctacatgtgcggccacaagggcacatacggcctgctgagacggagagaggactggcctagcagactgcagatgttcttcgccaataaccacgaccaggagttcgacccccctaaggtgtaccctcccgtccccgccgagaagagaaagcccatccgggtcctgagcctgttcgatggcatcgccaccggtctgctggtgctgaaggacctgggcatccaggtggataggtacattgcctccgaggtgtgcgaggactccatcaccgtgggaatggtgcgtcatcagggcaagatcatgtacgtgggcgacgtgcggagcgtgacacagaagcatatccaggagtggggccctttcgacctggtgatcggcggcagcccttgcaatgacctgagcatcgtgaacccagcccggaagggcctgtacgagggaaccggcagactgttcttcgagttttacagactgctgcacgacgcccggcctaaggaaggcgacgaccggcccttcttttggctgttcgagaatgtggtggccatgggagtcagcgacaagcgggatattagccggttcctggagagcaaccccgtgatgatcgatgccaaggaagtgagcgccgcccaccgggccagatacttctggggcaatctgcctggcatgaacagacccctggccagcaccgtgaacgacaagctggagctgcaggagtgcctggagcacggccggatcgccaagttcagcaaggtgagaaccatcaccacccgaagcaacagcatcaaacaaggcaaggaccagcactttcctgtgttcatgaacgagaaggaggacatcctgtggtgtaccgagatggagagagtgttcgggttcccagtccactacacagatgtcagcaacatgtctagactggccagacagagactgctgggaagaagctggtccgtccctgtgatcagacacctgttcgcccctctgaaggagtacttcgcctgcgtgagcagcggcaacagcaacgccaacagccggggccccagcttctctagcggcctggtgccactgtccctgagagggagccacatgggccccatggagatctacaaaaccgtgagcgcctggaagcggcagcctgtgcgcgtgctgagcctgtttcggaatatcgataaagtcctgaaaagcctgggattcctggagagcggctctggctccggcggtggcaccctgaagtacgtggaggatgtgacaaacgtggtcagacgggatgtggagaagtggggccccttcgatctggtgtacggcagcacccaacccctgggcagctcttgtgaccggtgccctggctggtacatgtttcagttccaccggatcctgcagtacgccctgccgagacaggagtcccagcggccattcttttggattttcatggacaacttgctgctgaccgaggatgaccaggaaactaccactcggttcctgcagaccgaagccgtgaccctgcaggacgtgagaggccgggactaccagaacgccatgcgggtgtggtccaacatccctggactgaaaagcaagcacgcacctctgacccctaaagaagaggagtacctgcaggcccaggtgcggagcagaagcaagctggacgcccctaaggtggatctgctggtgaagaattgcctcctgcccctgagagagtacttcaagtatttcagccagaatagtctgcccctgggaggcagcggcggcggcatgaacaactcccagggcagagtgaccttcgaggacgtgaccgtgaattttacacagggagagtggcagagactgaaccccgagcagagaaacctgtaccgggatgtgatgctggaaaactacagcaatctggtgtccgtgggccagggcgagaccacaaagcctgacgtgatcctgcgtctggagcagggcaaggaaccctggctggaggaggaggaggtgctgggaagcggacgggccgagaagaacggcgacatcggcggacagatctggaagcctaaggacgtgaaagaaagcctgggcggcccaagcagcggcgcccctcctcccagcggcggcagcccagccggctccccaacctctaccgaggagggcacctctgagtccgccacccccgagagcggccctggcacctccaccgagcccagcgagggcagcgcacccggcagccctgccggcagccccacctccacagaggagggaaccagcaccgagcccagcgaaggcagcgccccaggcaccagcaccgagcctagtgagcaggagattaaacggatcaacaagatcagaagaagacttgtgaaagacagcaacaccaagaaggccggcaagacaggccccatgaaaaccctgctggttagagtgatgacacccgatctgagagagcggctggaaaacctgagaaagaagcctgaaaatatcccccagcccatcagcaatacatctagagccaacctgaataagctgctgaccgattacaccgaaatgaagaaggcgatcctgcatgtgtactgggaagagttccagaaggaccctgtgggcctgatgagccgggtggcccagcctgccagcaagaagatcgatcagaacaagctgaaacctgagatggacgagaagggcaacctgaccaccgccggctttgcctgctctcagtgtggccagcccctgttcgtgtacaagctggagcaggtgtctgagaagggcaaggcttacaccaactacttcggacggtgcaatgtggccgagcacgaaaagctgatcctgctggcccagctgaagcccgagaaggatagcgacgaagccgtgacatatagcctgggaaagtttgggcagagggccctggatttctacagcattcatgtgaccaaggagtccacccaccccgtgaagcccctggcccagatcgccggaaacagatacgcctccggacctgtgggaaaggccctgagcgacgcatgtatgggcacaatcgcctccttcctgtctaagtaccaggacatcatcatcgaacaccagaaggtggtgaagggcaaccagaagagactggagagcctgcgggagctggccggcaaggaaaacctggaataccctagcgtgaccctgccacctcagcctcacaccaaggagggcgttgatgcctacaacgaagtgatcgcccgggtgcgaatgtgggtgaacctgaacctgtggcagaagctgaagctaagcagagatgatgccaagcctctgctgagactgaagggattcccttcctttcctctggtcgagagacaggccaacgaagtggactggtgggacatggtgtgtaacgtgaagaagctgatcaacgagaaaaaggaggatggcaaggtgttttggcagaatctggctggctacaagagacaggaagccctgagaccatacctgagcagcgaggaagatcggaagaagggaaagaaattcgctcggtaccagctgggcgacctgctgctgcacctggaaaagaagcacggcgaggactggggaaaggtgtacgacgaggcctgggagcggattgacaagaaagtggaaggcctgagcaagcacatcaagctggaagaggaacggagaagcgaggacgcccagagcaaggccgccctgaccgactggctgcgggctaaggccagcttcgtgatcgagggcctgaaggaggccgacaaggacgagttctgcagatgcgagctgaagctgcagaagtggtacggggacctgcggggaaagcccttcgccatcgaagccgagaacagcatcctggacatcagcggcttcagcaagcagtacaactgtgccttcatctggcagaaggacggcgtgaagaagctgaacctgtacctgatcatcaactacttcaagggcggcaagctgcggttcaagaagatcaaacctgaagccttcgaagccaacagattctacaccgtgatcaacaaaaagagcggcgagatcgtgcccatggaggtgaacttcaacttcgacgaccccaacctgatcatcctgcctctggcctttggcaagagacagggcagagaattcatctggaacgacctgctgtccctggaaaccggcagcctgaagctggccaacggaagagtgatcgagaagacactgtacaacagaagaacccggcaggatgagcctgccctgttcgtggccctgaccttcgagcggcgggaggtcctggactcctccaatatcaaaccaatgaacctgatcggcgtggcaagaggcgaaaacatccccgccgtgatcgccctgaccgaccccgagggctgcccactgagccggtttaaggatagcctgggaaacccaacccacatcctgagaatcggcgagagctataaggagaagcagcggaccatccaggccaagaaggaggtggagcagcggagagccggcggctacagccggaagtacgccagcaaagccaagaatctggcagacgatatggtgagaaacaccgctagagatctgctgtactacgccgtgacccaggatgccatgctgatcttcgccaacctgagccggggcttcggccggcagggcaagcggaccttcatggccgagagacagtacacacggatggaggactggctgaccgccaagctggcctacgagggcctgagcaagacctacctgtccaagacactggcccagtacacctccaagacatgcagcaactgtgggtttaccatcaccagcgccgactacgacagggtgctggagaagctgaagaagacagcaacaggctggatgaccacaattaacggcaaggagctgaaggtggagggccagattacctactacaacagatacaagagacagaacgtagtcaaggacctgtccgtcgagctggatagactgagcgaagaatctgtgaacaacgacatctcctcctggacaaagggcagaagcggagaagctctgagcctcctgaagaaaagattctcccatagacccgtgcaggagaagttcgtgtgcctgaactgcggcttcgagacacacgcagccgagcaagccgccctgaacatcgccagatcctggctgttcctgcggagccaggagtacaagaaataccagacaaacaagacaaccggcaacaccgataagagagccttcgtcgagacctggcagtccttttaccggaagaagcttaaggaggtgtggaaacctgccgtgcggtctggcggatctggcggaggctccaccagccccaagaaaaagagaaaagtctaagctgccttctgcggggcttgccttctggccatgcccttcttctctcccttgcacctgtacctcttggtctttgaataaagcctgagtaggaaggctagcaaaaaaaaaaaaaaaaaaaaaaaaaaaaaaaaaaaaaaaaaaaaaaaaaaaaaaaaaaaagcatgcaaaaaaaaaaaaaaaaaaaaaaaaaaaaaaaaaaaaaaaaaaaaaaaaaaaaaaaaaaaa

SEQ ID NO: 1876 - RNA, 5825 nt, synthetic construct
  source 1..5825: mol_type = other RNA
aaataagagagaaaagaagagtaagaagaaatataagagccaccatggcccctaagaagaagcgtaaagtgagccggatggaacgcctcgtctacgaggtgcggcagaagtgcagaaacatcgaggacatctgcatctcctgcggatctctgaacgtgaccctggagcacccactgttcatcggcggcatgtgccagaactgtaaaaactgttttctggagtgtgcctatcaatacgacgatgacggctaccagagctactgcaccatctgttgcggcggaagagaggtgctgatgtgtggaaataacaactgctgccggtgcttctgcgtggaatgcgtggacctgctggtgggccccggcgccgcccaggccgctattaaggaagatccttggaactgctacatgtgcggccacaagggcacatacggcctgctgagacggagagaggactggcctagcagactgcagatgttcttcgccaataaccacgaccaggagttcgacccccctaaggtgtaccctcccgtccccgccgagaagagaaagcccatccgggtcctgagcctgttcgatggcatcgccaccggtctgctggtgctgaaggacctgggcatccaggtggataggtacattgcctccgaggtgtgcgaggactccatcaccgtgggaatggtgcgtcatcagggcaagatcatgtacgtgggcgacgtgcggagcgtgacacagaagcatatccaggagtggggccctttcgacctggtgatcggcggcagcccttgcaatgacctgagcatcgtgaacccagcccggaagggcctgtacgagggaaccggcagactgttcttcgagttttacagactgctgcacgacgcccggcctaaggaaggcgacgaccggcccttcttttggctgttcgagaatgtggtggccatgggagtcagcgacaagcgggatattagccggttcctggagagcaaccccgtgatgatcgatgccaaggaagtgagcgccgcccaccgggccagatacttctggggcaatctgcctggcatgaacagacccctggccagcaccgtgaacgacaagctggagctgcaggagtgcctggagcacggccggatcgccaagttcagcaaggtgagaaccatcaccacccgaagcaacagcatcaaacaaggcaaggaccagcactttcctgtgttcatgaacgagaaggaggacatcctgtggtgtaccgagatggagagagtgttcgggttcccagtccactacacagatgtcagcaacatgtctagactggccagacagagactgctgggaagaagctggtccgtccctgtgatcagacacctgttcgcccctctgaaggagtacttcgcctgcgtgagcagcggcaacagcaacgccaacagccggggccccagcttctctagcggcctggtgccactgtccctgagagggagccacatgggccccatggagatctacaaaaccgtgagcgcctggaagcggcagcctgtgcgcgtgctgagcctgtttcggaatatcgataaagtcctgaaaagcctgggattcctggagagcggctctggctccggcggtggcaccctgaagtacgtggaggatgtgacaaacgtggtcagacgggatgtggagaagtggggccccttcgatctggtgtacggcagcacccaacccctgggcagctcttgtgaccggtgccctggctggtacatgtttcagttccaccggatcctgcagtacgccctgccgagacaggagtcccagcggccattcttttggattttcatggacaacttgctgctgaccgaggatgaccaggaaactaccactcggttcctgcagaccgaagccgtgaccctgcaggacgtgagaggccgggactaccagaacgccatgcgggtgtggtccaacatccctggactgaaaagcaagcacgcacctctgacccctaaagaagaggagtacctgcaggcccaggtgcggagcagaagcaagctggacgcccctaaggtggatctgctggtgaagaattgcctcctgcccctgagagagtacttcaagtatttcagccagaatagtctgcccctgggaggcagcggcggcggctctacacctgtgaccttcgaggatgtggtggtctacttcaccgccgctgagtgggtgcacctgacaaactggcaaagagatttttatcaggccgtgatgatggaaacctacgagctggtggccagcgtggctggcgacggcgttccaatggccgaggacgaggaaggcggagtggaaagacccgtgtggcagtacatccccagaggcaagcggcggagaaagacccctcagcctcgcgccgacggcggcccaagcagcggcgcccctcctcccagcggcggcagcccagccggctccccaacctctaccgaggagggcacctctgagtccgccacccccgagagcggccctggcacctccaccgagcccagcgagggcagcgcacccggcagccctgccggcagccccacctccacagaggagggaaccagcaccgagcccagcgaaggcagcgccccaggcaccagcaccgagcctagtgagcaggagattaaacggatcaacaagatcagaagaagacttgtgaaagacagcaacaccaagaaggccggcaagacaggccccatgaaaaccctgctggttagagtgatgacacccgatctgagagagcggctggaaaacctgagaaagaagcctgaaaatatcccccagcccatcagcaatacatctagagccaacctgaataagctgctgaccgattacaccgaaatgaagaaggcgatcctgcatgtgtactgggaagagttccagaaggaccctgtgggcctgatgagccgggtggcccagcctgccagcaagaagatcgatcagaacaagctgaaacctgagatggacgagaagggcaacctgaccaccgccggctttgcctgctctcagtgtggccagcccctgttcgtgtacaagctggagcaggtgtctgagaagggcaaggcttacaccaactacttcggacggtgcaatgtggccgagcacgaaaagctgatcctgctggcccagctgaagcccgagaaggatagcgacgaagccgtgacatatagcctgggaaagtttgggcagagggccctggatttctacagcattcatgtgaccaaggagtccacccaccccgtgaagcccctggcccagatcgccggaaacagatacgcctccggacctgtgggaaaggccctgagcgacgcatgtatgggcacaatcgcctccttcctgtctaagtaccaggacatcatcatcgaacaccagaaggtggtgaagggcaaccagaagagactggagagcctgcgggagctggccggcaaggaaaacctggaataccctagcgtgaccctgccacctcagcctcacaccaaggagggcgttgatgcctacaacgaagtgatcgcccgggtgcgaatgtgggtgaacctgaacctgtggcagaagctgaagctaagcagagatgatgccaagcctctgctgagactgaagggattcccttcctttcctctggtcgagagacaggccaacgaagtggactggtgggacatggtgtgtaacgtgaagaagctgatcaacgagaaaaaggaggatggcaaggtgttttggcagaatctggctggctacaagagacaggaagccctgagaccatacctgagcagcgaggaagatcggaagaagggaaagaaattcgctcggtaccagctgggcgacctgctgctgcacctggaaaagaagcacggcgaggactggggaaaggtgtacgacgaggcctgggagcggattgacaagaaagtggaaggcctgagcaagcacatcaagctggaagaggaacggagaagcgaggacgcccagagcaaggccgccctgaccgactggctgcgggctaaggccagcttcgtgatcgagggcctgaaggaggccgacaaggacgagttctgcagatgcgagctgaagctgcagaagtggtacggggacctgcggggaaagcccttcgccatcgaagccgagaacagcatcctggacatcagcggcttcagcaagcagtacaactgtgccttcatctggcagaaggacggcgtgaagaagctgaacctgtacctgatcatcaactacttcaagggcggcaagctgcggttcaagaagatcaaacctgaagccttcgaagccaacagattctacaccgtgatcaacaaaaagagcggcgagatcgtgcccatggaggtgaacttcaacttcgacgaccccaacctgatcatcctgcctctggcctttggcaagagacagggcagagaattcatctggaacgacctgctgtccctggaaaccggcagcctgaagctggccaacggaagagtgatcgagaagacactgtacaacagaagaacccggcaggatgagcctgccctgttcgtggccctgaccttcgagcggcgggaggtcctggactcctccaatatcaaaccaatgaacctgatcggcgtggcaagaggcgaaaacatccccgccgtgatcgccctgaccgaccccgagggctgcccactgagccggtttaaggatagcctgggaaacccaacccacatcctgagaatcggcgagagctataaggagaagcagcggaccatccaggccaagaaggaggtggagcagcggagagccggcggctacagccggaagtacgccagcaaagccaagaatctggcagacgatatggtgagaaacaccgctagagatctgctgtactacgccgtgacccaggatgccatgctgatcttcgccaacctgagccggggcttcggccggcagggcaagcggaccttcatggccgagagacagtacacacggatggaggactggctgaccgccaagctggcctacgagggcctgagcaagacctacctgtccaagacactggcccagtacacctccaagacatgcagcaactgtgggtttaccatcaccagcgccgactacgacagggtgctggagaagctgaagaagacagcaacaggctggatgaccacaattaacggcaaggagctgaaggtggagggccagattacctactacaacagatacaagagacagaacgtagtcaaggacctgtccgtcgagctggatagactgagcgaagaatctgtgaacaacgacatctcctcctggacaaagggcagaagcggagaagctctgagcctcctgaagaaaagattctcccatagacccgtgcaggagaagttcgtgtgcctgaactgcggcttcgagacacacgcagccgagcaagccgccctgaacatcgccagatcctggctgttcctgcggagccaggagtacaagaaataccagacaaacaagacaaccggcaacaccgataagagagccttcgtcgagacctggcagtccttttaccggaagaagcttaaggaggtgtggaaacctgccgtgcggtctggcggatctggcggaggctccaccagccccaagaaaaagagaaaagtctaagctgccttctgcggggcttgccttctggccatgcccttcttctctcccttgcacctgtacctcttggtctttgaataaagcctgagtaggaaggctagcaaaaaaaaaaaaaaaaaaaaaaaaaaaaaaaaaaaaaaaaaaaaaaaaaaaaaaaaaaaagcatgcaaaaaaaaaaaaaaaaaaaaaaaaaaaaaaaaaaaaaaaaaaaaaaaaaaaaaaaaa

SEQ ID NO: 1877 - RNA, 5825 nt, synthetic construct
  source 1..5825: mol_type = other RNA
aaataagagagaaaagaagagtaagaagaaatataagagccaccatggcccctaagaagaagcgtaaagtgagccggatggaacgcctcgtctacgaggtgcggcagaagtgcagaaacatcgaggacatctgcatctcctgcggatctctgaacgtgaccctggagcacccactgttcatcggcggcatgtgccagaactgtaaaaactgttttctggagtgtgcctatcaatacgacgatgacggctaccagagctactgcaccatctgttgcggcggaagagaggtgctgatgtgtggaaataacaactgctgccggtgcttctgcgtggaatgcgtggacctgctggtgggccccggcgccgcccaggccgctattaaggaagatccttggaactgctacatgtgcggccacaagggcacatacggcctgctgagacggagagaggactggcctagcagactgcagatgttcttcgccaataaccacgaccaggagttcgacccccctaaggtgtaccctcccgtccccgccgagaagagaaagcccatccgggtcctgagcctgttcgatggcatcgccaccggtctgctggtgctgaaggacctgggcatccaggtggataggtacattgcctccgaggtgtgcgaggactccatcaccgtgggaatggtgcgtcatcagggcaagatcatgtacgtgggcgacgtgcggagcgtgacacagaagcatatccaggagtggggccctttcgacctggtgatcggcggcagcccttgcaatgacctgagcatcgtgaacccagcccggaagggcctgtacgagggaaccggcagactgttcttcgagttttacagactgctgcacgacgcccggcctaaggaaggcgacgaccggcccttcttttggctgttcgagaatgtggtggccatgggagtcagcgacaagcgggatattagccggttcctggagagcaaccccgtgatgatcgatgccaaggaagtgagcgccgcccaccgggccagatacttctggggcaatctgcctggcatgaacagacccctggccagcaccgtgaacgacaagctggagctgcaggagtgcctggagcacggccggatcgccaagttcagcaaggtgagaaccatcaccacccgaagcaacagcatcaaacaaggcaaggaccagcactttcctgtgttcatgaacgagaaggaggacatcctgtggtgtaccgagatggagagagtgttcgggttcccagtccactacacagatgtcagcaacatgtctagactggccagacagagactgctgggaagaagctggtccgtccctgtgatcagacacctgttcgcccctctgaaggagtacttcgcctgcgtgagcagcggcaacagcaacgccaacagccggggccccagcttctctagcggcctggtgccactgtccctgagagggagccacatgggccccatggagatctacaaaaccgtgagcgcctggaagcggcagcctgtgcgcgtgctgagcctgtttcggaatatcgataaagtcctgaaaagcctgggattcctggagagcggctctggctccggcggtggcaccctgaagtacgtggaggatgtgacaaacgtggtcagacgggatgtggagaagtggggccccttcgatctggtgtacggcagcacccaacccctgggcagctcttgtgaccggtgccctggctggtacatgtttcagttccaccggatcctgcagtacgccctgccgagacaggagtcccagcggccattcttttggattttcatggacaacttgctgctgaccgaggatgaccaggaaactaccactcggttcctgcagaccgaagccgtgaccctgcaggacgtgagaggccgggactaccagaacgccatgcgggtgtggtccaacatccctggactgaaaagcaagcacgcacctctgacccctaaagaagaggagtacctgcaggcccaggtgcggagcagaagcaagctggacgcccctaaggtggatctgctggtgaagaattgcctcctgcccctgagagagtacttcaagtatttcagccagaatagtctgcccctgggaggcagcggcggcggcgccctggtgacatttgaggacgtcgccgtgcggttcacccaggaggaatgggctctgctggatccttctcagaaaatcctgtaccgggacgtgatgagagagacataccggaatctgacctccgtgggcatcaactgggaatgttgggaccttgaagcctgcttcagaagcctgggaagaaacctgagagtgcaggtggtgaagagaaagtgcgagctgaccaacagcggcccctgcgccgagggcggcccaagcagcggcgcccctcctcccagcggcggcagcccagccggctccccaacctctaccgaggagggcacctctgagtccgccacccccgagagcggccctggcacctccaccgagcccagcgagggcagcgcacccggcagccctgccggcagccccacctccacagaggagggaaccagcaccgagcccagcgaaggcagcgccccaggcaccagcaccgagcctagtgagcaggagattaaacggatcaacaagatcagaagaagacttgtgaaagacagcaacaccaagaaggccggcaagacaggccccatgaaaaccctgctggttagagtgatgacacccgatctgagagagcggctggaaaacctgagaaagaagcctgaaaatatcccccagcccatcagcaatacatctagagccaacctgaataagctgctgaccgattacaccgaaatgaagaaggcgatcctgcatgtgtactgggaagagttccagaaggaccctgtgggcctgatgagccgggtggcccagcctgccagcaagaagatcgatcagaacaagctgaaacctgagatggacgagaagggcaacctgaccaccgccggctttgcctgctctcagtgtggccagcccctgttcgtgtacaagctggagcaggtgtctgagaagggcaaggcttacaccaactacttcggacggtgcaatgtggccgagcacgaaaagctgatcctgctggcccagctgaagcccgagaaggatagcgacgaagccgtgacatatagcctgggaaagtttgggcagagggccctggatttctacagcattcatgtgaccaaggagtccacccaccccgtgaagcccctggcccagatcgccggaaacagatacgcctccggacctgtgggaaaggccctgagcgacgcatgtatgggcacaatcgcctccttcctgtctaagtaccaggacatcatcatcgaacaccagaaggtggtgaagggcaaccagaagagactggagagcctgcgggagctggccggcaaggaaaacctggaataccctagcgtgaccctgccacctcagcctcacaccaaggagggcgttgatgcctacaacgaagtgatcgcccgggtgcgaatgtgggtgaacctgaacctgtggcagaagctgaagctaagcagagatgatgccaagcctctgctgagactgaagggattcccttcctttcctctggtcgagagacaggccaacgaagtggactggtgggacatggtgtgtaacgtgaagaagctgatcaacgagaaaaaggaggatggcaaggtgttttggcagaatctggctggctacaagagacaggaagccctgagaccatacctgagcagcgaggaagatcggaagaagggaaagaaattcgctcggtaccagctgggcgacctgctgctgcacctggaaaagaagcacggcgaggactggggaaaggtgtacgacgaggcctgggagcggattgacaagaaagtggaaggcctgagcaagcacatcaagctggaagaggaacggagaagcgaggacgcccagagcaaggccgccctgaccgactggctgcgggctaaggccagcttcgtgatcgagggcctgaaggaggccgacaaggacgagttctgcagatgcgagctgaagctgcagaagtggtacggggacctgcggggaaagcccttcgccatcgaagccgagaacagcatcctggacatcagcggcttcagcaagcagtacaactgtgccttcatctggcagaaggacggcgtgaagaagctgaacctgtacctgatcatcaactacttcaagggcggcaagctgcggttcaagaagatcaaacctgaagccttcgaagccaacagattctacaccgtgatcaacaaaaagagcggcgagatcgtgcccatggaggtgaacttcaacttcgacgaccccaacctgatcatcctgcctctggcctttggcaagagacagggcagagaattcatctggaacgacctgctgtccctggaaaccggcagcctgaagctggccaacggaagagtgatcgagaagacactgtacaacagaagaacccggcaggatgagcctgccctgttcgtggccctgaccttcgagcggcgggaggtcctggactcctccaatatcaaaccaatgaacctgatcggcgtggcaagaggcgaaaacatccccgccgtgatcgccctgaccgaccccgagggctgcccactgagccggtttaaggatagcctgggaaacccaacccacatcctgagaatcggcgagagctataaggagaagcagcggaccatccaggccaagaaggaggtggagcagcggagagccggcggctacagccggaagtacgccagcaaagccaagaatctggcagacgatatggtgagaaacaccgctagagatctgctgtactacgccgtgacccaggatgccatgctgatcttcgccaacctgagccggggcttcggccggcagggcaagcggaccttcatggccgagagacagtacacacggatggaggactggctgaccgccaagctggcctacgagggcctgagcaagacctacctgtccaagacactggcccagtacacctccaagacatgcagcaactgtgggtttaccatcaccagcgccgactacgacagggtgctggagaagctgaagaagacagcaacaggctggatgaccacaattaacggcaaggagctgaaggtggagggccagattacctactacaacagatacaagagacagaacgtagtcaaggacctgtccgtcgagctggatagactgagcgaagaatctgtgaacaacgacatctcctcctggacaaagggcagaagcggagaagctctgagcctcctgaagaaaagattctcccatagacccgtgcaggagaagttcgtgtgcctgaactgcggcttcgagacacacgcagccgagcaagccgccctgaacatcgccagatcctggctgttcctgcggagccaggagtacaagaaataccagacaaacaagacaaccggcaacaccgataagagagccttcgtcgagacctggcagtccttttaccggaagaagcttaaggaggtgtggaaacctgccgtgcggtctggcggatctggcggaggctccaccagccccaagaaaaagagaaaagtctaagctgccttctgcggggcttgccttctggccatgcccttcttctctcccttgcacctgtacctcttggtctttgaataaagcctgagtaggaaggctagcaaaaaaaaaaaaaaaaaaaaaaaaaaaaaaaaaaaaaaaaaaaaaaaaaaaaaaaaaaaagcatgcaaaaaaaaaaaaaaaaaaaaaaaaaaaaaaaaaaaaaaaaaaaaaaaaaaaaaaaaa

SEQ ID NO: 1878 - RNA, 5648 nt, synthetic construct
  source 1..5648: mol_type = other RNA
aaataagagagaaaagaagagtaagaagaaatataagagccaccatggcccctaagaagaagcgtaaagtgagccggatggaacgcctcgtctacgaggtgcggcagaagtgcagaaacatcgaggacatctgcatctcctgcggatctctgaacgtgaccctggagcacccactgttcatcggcggcatgtgccagaactgtaaaaactgttttctggagtgtgcctatcaatacgacgatgacggctaccagagctactgcaccatctgttgcggcggaagagaggtgctgatgtgtggaaataacaactgctgccggtgcttctgcgtggaatgcgtggacctgctggtgggccccggcgccgcccaggccgctattaaggaagatccttggaactgctacatgtgcggccacaagggcacatacggcctgctgagacggagagaggactggcctagcagactgcagatgttcttcgccaataaccacgaccaggagttcgacccccctaaggtgtaccctcccgtccccgccgagaagagaaagcccatccgggtcctgagcctgttcgatggcatcgccaccggtctgctggtgctgaaggacctgggcatccaggtggataggtacattgcctccgaggtgtgcgaggactccatcaccgtgggaatggtgcgtcatcagggcaagatcatgtacgtgggcgacgtgcggagcgtgacacagaagcatatccaggagtggggccctttcgacctggtgatcggcggcagcccttgcaatgacctgagcatcgtgaacccagcccggaagggcctgtacgagggaaccggcagactgttcttcgagttttacagactgctgcacgacgcccggcctaaggaaggcgacgaccggcccttcttttggctgttcgagaatgtggtggccatgggagtcagcgacaagcgggatattagccggttcctggagagcaaccccgtgatgatcgatgccaaggaagtgagcgccgcccaccgggccagatacttctggggcaatctgcctggcatgaacagacccctggccagcaccgtgaacgacaagctggagctgcaggagtgcctggagcacggccggatcgccaagttcagcaaggtgagaaccatcaccacccgaagcaacagcatcaaacaaggcaaggaccagcactttcctgtgttcatgaacgagaaggaggacatcctgtggtgtaccgagatggagagagtgttcgggttcccagtccactacacagatgtcagcaacatgtctagactggccagacagagactgctgggaagaagctggtccgtccctgtgatcagacacctgttcgcccctctgaaggagtacttcgcctgcgtgagcagcggcaacagcaacgccaacagccggggccccagcttctctagcggcctggtgccactgtccctgagagggagccacatgggccccatggagatctacaaaaccgtgagcgcctggaagcggcagcctgtgcgcgtgctgagcctgtttcggaatatcgataaagtcctgaaaagcctgggattcctggagagcggctctggctccggcggtggcaccctgaagtacgtggaggatgtgacaaacgtggtcagacgggatgtggagaagtggggccccttcgatctggtgtacggcagcacccaacccctgggcagctcttgtgaccggtgccctggctggtacatgtttcagttccaccggatcctgcagtacgccctgccgagacaggagtcccagcggccattcttttggattttcatggacaacttgctgctgaccgaggatgaccaggaaactaccactcggttcctgcagaccgaagccgtgaccctgcaggacgtgagaggccgggactaccagaacgccatgcgggtgtggtccaacatccctggactgaaaagcaagcacgcacctctgacccctaaagaagaggagtacctgcaggcccaggtgcggagcagaagcaagctggacgcccctaaggtggatctgctggtgaagaattgcctcctgcccctgagagagtacttcaagtatttcagccagaatagtctgcccctggcctctcctgccgcccctgcccctgccagccccgccgctccagcccccagcgcccctgctgcctctacacctgtgaccttcgaggatgtggtggtctacttcaccgccgctgagtgggtgcacctgacaaactggcaaagagatttttatcaggccgtgatgatggaaacctacgagctggtggccagcgtggctggcgacggcgttccaatggccgaggacgaggaaggcggagtggaaagacccgtgtggcagtacatccccagaggcaagcggcggagaaagacccctcagcctcgcgccgacatcagagcccacggcgaccaggagattaaacggatcaacaagatcagaagaagacttgtgaaagacagcaacaccaagaaggccggcaagacaggccccatgaaaaccctgctggttagagtgatgacacccgatctgagagagcggctggaaaacctgagaaagaagcctgaaaatatcccccagcccatcagcaatacatctagagccaacctgaataagctgctgaccgattacaccgaaatgaagaaggcgatcctgcatgtgtactgggaagagttccagaaggaccctgtgggcctgatgagccgggtggcccagcctgccagcaagaagatcgatcagaacaagctgaaacctgagatggacgagaagggcaacctgaccaccgccggctttgcctgctctcagtgtggccagcccctgttcgtgtacaagctggagcaggtgtctgagaagggcaaggcttacaccaactacttcggacggtgcaatgtggccgagcacgaaaagctgatcctgctggcccagctgaagcccgagaaggatagcgacgaagccgtgacatatagcctgggaaagtttgggcagagggccctggatttctacagcattcatgtgaccaaggagtccacccaccccgtgaagcccctggcccagatcgccggaaacagatacgcctccggacctgtgggaaaggccctgagcgacgcatgtatgggcacaatcgcctccttcctgtctaagtaccaggacatcatcatcgaacaccagaaggtggtgaagggcaaccagaagagactggagagcctgcgggagctggccggcaaggaaaacctggaataccctagcgtgaccctgccacctcagcctcacaccaaggagggcgttgatgcctacaacgaagtgatcgcccgggtgcgaatgtgggtgaacctgaacctgtggcagaagctgaagctaagcagagatgatgccaagcctctgctgagactgaagggattcccttcctttcctctggtcgagagacaggccaacgaagtggactggtgggacatggtgtgtaacgtgaagaagctgatcaacgagaaaaaggaggatggcaaggtgttttggcagaatctggctggctacaagagacaggaagccctgagaccatacctgagcagcgaggaagatcggaagaagggaaagaaattcgctcggtaccagctgggcgacctgctgctgcacctggaaaagaagcacggcgaggactggggaaaggtgtacgacgaggcctgggagcggattgacaagaaagtggaaggcctgagcaagcacatcaagctggaagaggaacggagaagcgaggacgcccagagcaaggccgccctgaccgactggctgcgggctaaggccagcttcgtgatcgagggcctgaaggaggccgacaaggacgagttctgcagatgcgagctgaagctgcagaagtggtacggggacctgcggggaaagcccttcgccatcgaagccgagaacagcatcctggacatcagcggcttcagcaagcagtacaactgtgccttcatctggcagaaggacggcgtgaagaagctgaacctgtacctgatcatcaactacttcaagggcggcaagctgcggttcaagaagatcaaacctgaagccttcgaagccaacagattctacaccgtgatcaacaaaaagagcggcgagatcgtgcccatggaggtgaacttcaacttcgacgaccccaacctgatcatcctgcctctggcctttggcaagagacagggcagagaattcatctggaacgacctgctgtccctggaaaccggcagcctgaagctggccaacggaagagtgatcgagaagacactgtacaacagaagaacccggcaggatgagcctgccctgttcgtggccctgaccttcgagcggcgggaggtcctggactcctccaatatcaaaccaatgaacctgatcggcgtggcaagaggcgaaaacatccccgccgtgatcgccctgaccgaccccgagggctgcccactgagccggtttaaggatagcctgggaaacccaacccacatcctgagaatcggcgagagctataaggagaagcagcggaccatccaggccaagaaggaggtggagcagcggagagccggcggctacagccggaagtacgccagcaaagccaagaatctggcagacgatatggtgagaaacaccgctagagatctgctgtactacgccgtgacccaggatgccatgctgatcttcgccaacctgagccggggcttcggccggcagggcaagcggaccttcatggccgagagacagtacacacggatggaggactggctgaccgccaagctggcctacgagggcctgagcaagacctacctgtccaagacactggcccagtacacctccaagacatgcagcaactgtgggtttaccatcaccagcgccgactacgacagggtgctggagaagctgaagaagacagcaacaggctggatgaccacaattaacggcaaggagctgaaggtggagggccagattacctactacaacagatacaagagacagaacgtagtcaaggacctgtccgtcgagctggatagactgagcgaagaatctgtgaacaacgacatctcctcctggacaaagggcagaagcggagaagctctgagcctcctgaagaaaagattctcccatagacccgtgcaggagaagttcgtgtgcctgaactgcggcttcgagacacacgcagccgagcaagccgccctgaacatcgccagatcctggctgttcctgcggagccaggagtacaagaaataccagacaaacaagacaaccggcaacaccgataagagagccttcgtcgagacctggcagtccttttaccggaagaagcttaaggaggtgtggaaacctgccgtgcggtctggcggatctggcggaggctccaccagccccaagaaaaagagaaaagtctaagctgccttctgcggggcttgccttctggccatgcccttcttctctcccttgcacctgtacctcttggtctttgaataaagcctgagtaggaaggctagcaaaaaaaaaaaaaaaaaaaaaaaaaaaaaaaaaaaaaaaaaaaaaaaaaaaaaaaaaaaagcatgcaaaaaaaaaaaaaaaaaaaaaaaaaaaaaaaaaaaaaaaaaaaaaaaaaaaaaaaaa

SEQ ID NO: 1879 - RNA, 5678 nt, synthetic construct
  source 1..5678: mol_type = other RNA
aaataagagagaaaagaagagtaagaagaaatataagagccaccatggcccctaagaagaagcgtaaagtgagccggatggaacgcctcgtctacgaggtgcggcagaagtgcagaaacatcgaggacatctgcatctcctgcggatctctgaacgtgaccctggagcacccactgttcatcggcggcatgtgccagaactgtaaaaactgttttctggagtgtgcctatcaatacgacgatgacggctaccagagctactgcaccatctgttgcggcggaagagaggtgctgatgtgtggaaataacaactgctgccggtgcttctgcgtggaatgcgtggacctgctggtgggccccggcgccgcccaggccgctattaaggaagatccttggaactgctacatgtgcggccacaagggcacatacggcctgctgagacggagagaggactggcctagcagactgcagatgttcttcgccaataaccacgaccaggagttcgacccccctaaggtgtaccctcccgtccccgccgagaagagaaagcccatccgggtcctgagcctgttcgatggcatcgccaccggtctgctggtgctgaaggacctgggcatccaggtggataggtacattgcctccgaggtgtgcgaggactccatcaccgtgggaatggtgcgtcatcagggcaagatcatgtacgtgggcgacgtgcggagcgtgacacagaagcatatccaggagtggggccctttcgacctggtgatcggcggcagcccttgcaatgacctgagcatcgtgaacccagcccggaagggcctgtacgagggaaccggcagactgttcttcgagttttacagactgctgcacgacgcccggcctaaggaaggcgacgaccggcccttcttttggctgttcgagaatgtggtggccatgggagtcagcgacaagcgggatattagccggttcctggagagcaaccccgtgatgatcgatgccaaggaagtgagcgccgcccaccgggccagatacttctggggcaatctgcctggcatgaacagacccctggccagcaccgtgaacgacaagctggagctgcaggagtgcctggagcacggccggatcgccaagttcagcaaggtgagaaccatcaccacccgaagcaacagcatcaaacaaggcaaggaccagcactttcctgtgttcatgaacgagaaggaggacatcctgtggtgtaccgagatggagagagtgttcgggttcccagtccactacacagatgtcagcaacatgtctagactggccagacagagactgctgggaagaagctggtccgtccctgtgatcagacacctgttcgcccctctgaaggagtacttcgcctgcgtgagcagcggcaacagcaacgccaacagccggggccccagcttctctagcggcctggtgccactgtccctgagagggagccacatgggccccatggagatctacaaaaccgtgagcgcctggaagcggcagcctgtgcgcgtgctgagcctgtttcggaatatcgataaagtcctgaaaagcctgggattcctggagagcggctctggctccggcggtggcaccctgaagtacgtggaggatgtgacaaacgtggtcagacgggatgtggagaagtggggccccttcgatctggtgtacggcagcacccaacccctgggcagctcttgtgaccggtgccctggctggtacatgtttcagttccaccggatcctgcagtacgccctgccgagacaggagtcccagcggccattcttttggattttcatggacaacttgctgctgaccgaggatgaccaggaaactaccactcggttcctgcagaccgaagccgtgaccctgcaggacgtgagaggccgggactaccagaacgccatgcgggtgtggtccaacatccctggactgaaaagcaagcacgcacctctgacccctaaagaagaggagtacctgcaggcccaggtgcggagcagaagcaagctggacgcccctaaggtggatctgctggtgaagaattgcctcctgcccctgagagagtacttcaagtatttcagccagaatagtctgcccctgggaagcggcggatctggcggcagcggcggctcccctgtgcccagcaccccacctacccctagccctagcacaccccccaccccttctacacctgtgaccttcgaggatgtggtggtctacttcaccgccgctgagtgggtgcacctgacaaactggcaaagagatttttatcaggccgtgatgatggaaacctacgagctggtggccagcgtggctggcgacggcgttccaatggccgaggacgaggaaggcggagtggaaagacccgtgtggcagtacatccccagaggcaagcggcggagaaagacccctcagcctcgcgccgacgccttccccgccgcccctgctcctgcccaggagattaaacggatcaacaagatcagaagaagacttgtgaaagacagcaacaccaagaaggccggcaagacaggccccatgaaaaccctgctggttagagtgatgacacccgatctgagagagcggctggaaaacctgagaaagaagcctgaaaatatcccccagcccatcagcaatacatctagagccaacctgaataagctgctgaccgattacaccgaaatgaagaaggcgatcctgcatgtgtactgggaagagttccagaaggaccctgtgggcctgatgagccgggtggcccagcctgccagcaagaagatcgatcagaacaagctgaaacctgagatggacgagaagggcaacctgaccaccgccggctttgcctgctctcagtgtggccagcccctgttcgtgtacaagctggagcaggtgtctgagaagggcaaggcttacaccaactacttcggacggtgcaatgtggccgagcacgaaaagctgatcctgctggcccagctgaagcccgagaaggatagcgacgaagccgtgacatatagcctgggaaagtttgggcagagggccctggatttctacagcattcatgtgaccaaggagtccacccaccccgtgaagcccctggcccagatcgccggaaacagatacgcctccggacctgtgggaaaggccctgagcgacgcatgtatgggcacaatcgcctccttcctgtctaagtaccaggacatcatcatcgaacaccagaaggtggtgaagggcaaccagaagagactggagagcctgcgggagctggccggcaaggaaaacctggaataccctagcgtgaccctgccacctcagcctcacaccaaggagggcgttgatgcctacaacgaagtgatcgcccgggtgcgaatgtgggtgaacctgaacctgtggcagaagctgaagctaagcagagatgatgccaagcctctgctgagactgaagggattcccttcctttcctctggtcgagagacaggccaacgaagtggactggtgggacatggtgtgtaacgtgaagaagctgatcaacgagaaaaaggaggatggcaaggtgttttggcagaatctggctggctacaagagacaggaagccctgagaccatacctgagcagcgaggaagatcggaagaagggaaagaaattcgctcggtaccagctgggcgacctgctgctgcacctggaaaagaagcacggcgaggactggggaaaggtgtacgacgaggcctgggagcggattgacaagaaagtggaaggcctgagcaagcacatcaagctggaagaggaacggagaagcgaggacgcccagagcaaggccgccctgaccgactggctgcgggctaaggccagcttcgtgatcgagggcctgaaggaggccgacaaggacgagttctgcagatgcgagctgaagctgcagaagtggtacggggacctgcggggaaagcccttcgccatcgaagccgagaacagcatcctggacatcagcggcttcagcaagcagtacaactgtgccttcatctggcagaaggacggcgtgaagaagctgaacctgtacctgatcatcaactacttcaagggcggcaagctgcggttcaagaagatcaaacctgaagccttcgaagccaacagattctacaccgtgatcaacaaaaagagcggcgagatcgtgcccatggaggtgaacttcaacttcgacgaccccaacctgatcatcctgcctctggcctttggcaagagacagggcagagaattcatctggaacgacctgctgtccctggaaaccggcagcctgaagctggccaacggaagagtgatcgagaagacactgtacaacagaagaacccggcaggatgagcctgccctgttcgtggccctgaccttcgagcggcgggaggtcctggactcctccaatatcaaaccaatgaacctgatcggcgtggcaagaggcgaaaacatccccgccgtgatcgccctgaccgaccccgagggctgcccactgagccggtttaaggatagcctgggaaacccaacccacatcctgagaatcggcgagagctataaggagaagcagcggaccatccaggccaagaaggaggtggagcagcggagagccggcggctacagccggaagtacgccagcaaagccaagaatctggcagacgatatggtgagaaacaccgctagagatctgctgtactacgccgtgacccaggatgccatgctgatcttcgccaacctgagccggggcttcggccggcagggcaagcggaccttcatggccgagagacagtacacacggatggaggactggctgaccgccaagctggcctacgagggcctgagcaagacctacctgtccaagacactggcccagtacacctccaagacatgcagcaactgtgggtttaccatcaccagcgccgactacgacagggtgctggagaagctgaagaagacagcaacaggctggatgaccacaattaacggcaaggagctgaaggtggagggccagattacctactacaacagatacaagagacagaacgtagtcaaggacctgtccgtcgagctggatagactgagcgaagaatctgtgaacaacgacatctcctcctggacaaagggcagaagcggagaagctctgagcctcctgaagaaaagattctcccatagacccgtgcaggagaagttcgtgtgcctgaactgcggcttcgagacacacgcagccgagcaagccgccctgaacatcgccagatcctggctgttcctgcggagccaggagtacaagaaataccagacaaacaagacaaccggcaacaccgataagagagccttcgtcgagacctggcagtccttttaccggaagaagcttaaggaggtgtggaaacctgccgtgcggtctggcggatctggcggaggctccaccagccccaagaaaaagagaaaagtctaagctgccttctgcggggcttgccttctggccatgcccttcttctctcccttgcacctgtacctcttggtctttgaataaagcctgagtaggaaggctagcaaaaaaaaaaaaaaaaaaaaaaaaaaaaaaaaaaaaaaaaaaaaaaaaaaaaaaaaaaaagcatgcaaaaaaaaaaaaaaaaaaaaaaaaaaaaaaaaaaaaaaaaaaaaaaaaaaaaaaaaa

SEQ ID NO: 1880 - RNA, 6083 nt, synthetic construct
  source 1..6083: mol_type = other RNA
aaataagagagaaaagaagagtaagaagaaatataagagccaccatggcccctaagaagaagcgtaaagtgagccggatggaacgcctcgtctacgaggtgcggcagaagtgcagaaacatcgaggacatctgcatctcctgcggatctctgaacgtgaccctggagcacccactgttcatcggcggcatgtgccagaactgtaaaaactgttttctggagtgtgcctatcaatacgacgatgacggctaccagagctactgcaccatctgttgcggcggaagagaggtgctgatgtgtggaaataacaactgctgccggtgcttctgcgtggaatgcgtggacctgctggtgggccccggcgccgcccaggccgctattaaggaagatccttggaactgctacatgtgcggccacaagggcacatacggcctgctgagacggagagaggactggcctagcagactgcagatgttcttcgccaataaccacgaccaggagttcgacccccctaaggtgtaccctcccgtccccgccgagaagagaaagcccatccgggtcctgagcctgttcgatggcatcgccaccggtctgctggtgctgaaggacctgggcatccaggtggataggtacattgcctccgaggtgtgcgaggactccatcaccgtgggaatggtgcgtcatcagggcaagatcatgtacgtgggcgacgtgcggagcgtgacacagaagcatatccaggagtggggccctttcgacctggtgatcggcggcagcccttgcaatgacctgagcatcgtgaacccagcccggaagggcctgtacgagggaaccggcagactgttcttcgagttttacagactgctgcacgacgcccggcctaaggaaggcgacgaccggcccttcttttggctgttcgagaatgtggtggccatgggagtcagcgacaagcgggatattagccggttcctggagagcaaccccgtgatgatcgatgccaaggaagtgagcgccgcccaccgggccagatacttctggggcaatctgcctggcatgaacagacccctggccagcaccgtgaacgacaagctggagctgcaggagtgcctggagcacggccggatcgccaagttcagcaaggtgagaaccatcaccacccgaagcaacagcatcaaacaaggcaaggaccagcactttcctgtgttcatgaacgagaaggaggacatcctgtggtgtaccgagatggagagagtgttcgggttcccagtccactacacagatgtcagcaacatgtctagactggccagacagagactgctgggaagaagctggtccgtccctgtgatcagacacctgttcgcccctctgaaggagtacttcgcctgcgtgagcagcggcaacagcaacgccaacagccggggccccagcttctctagcggcctggtgccactgtccctgagagggagccacatgggccccatggagatctacaaaaccgtgagcgcctggaagcggcagcctgtgcgcgtgctgagcctgtttcggaatatcgataaagtcctgaaaagcctgggattcctggagagcggctctggctccggcggtggcaccctgaagtacgtggaggatgtgacaaacgtggtcagacgggatgtggagaagtggggccccttcgatctggtgtacggcagcacccaacccctgggcagctcttgtgaccggtgccctggctggtacatgtttcagttccaccggatcctgcagtacgccctgccgagacaggagtcccagcggccattcttttggattttcatggacaacttgctgctgaccgaggatgaccaggaaactaccactcggttcctgcagaccgaagccgtgaccctgcaggacgtgagaggccgggactaccagaacgccatgcgggtgtggtccaacatccctggactgaaaagcaagcacgcacctctgacccctaaagaagaggagtacctgcaggcccaggtgcggagcagaagcaagctggacgcccctaaggtggatctgctggtgaagaattgcctcctgcccctgagagagtacttcaagtatttcagccagaatagtctgcccctgggaggcagcggcggcggctctacacctgtgaccttcgaggatgtggtggtctacttcaccgccgctgagtgggtgcacctgacaaactggcaaagagatttttatcaggccgtgatgatggaaacctacgagctggtggccagcgtggctggcgacggcgttccaatggccgaggacgaggaaggcggagtggaaagacccgtgtggcagtacatccccagaggcaagcggcggagaaagacccctcagcctcgcgccgacggcggcccaagcagcggcgcccctcctcccagcggcggcagcccagccggctccccaacctctaccgaggagggcacctctgagtccgccacccccgagagcggccctggcacctccaccgagcccagcgagggcagcgcacccggcagccctgccggcagccccacctccacagaggagggaaccagcaccgagcccagcgaaggcagcgccccaggcaccagcaccgagcctagtgagcaggagattaaacggatcaacaagatcagaagaagacttgtgaaagacagcaacaccaagaaggccggcaagacaggccccatgaaaaccctgctggttagagtgatgacacccgatctgagagagcggctggaaaacctgagaaagaagcctgaaaatatcccccagcccatcagcaatacatctagagccaacctgaataagctgctgaccgattacaccgaaatgaagaaggcgatcctgcatgtgtactgggaagagttccagaaggaccctgtgggcctgatgagccgggtggcccagcctgccagcaagaagatcgatcagaacaagctgaaacctgagatggacgagaagggcaacctgaccaccgccggctttgcctgctctcagtgtggccagcccctgttcgtgtacaagctggagcaggtgtctgagaagggcaaggcttacaccaactacttcggacggtgcaatgtggccgagcacgaaaagctgatcctgctggcccagctgaagcccgagaaggatagcgacgaagccgtgacatatagcctgggaaagtttgggcagagggccctggatttctacagcattcatgtgaccaaggagtccacccaccccgtgaagcccctggcccagatcgccggaaacagatacgcctccggacctgtgggaaaggccctgagcgacgcatgtatgggcacaatcgcctccttcctgtctaagtaccaggacatcatcatcgaacaccagaaggtggtgaagggcaaccagaagagactggagagcctgcgggagctggccggcaaggaaaacctggaataccctagcgtgaccctgccacctcagcctcacaccaaggagggcgttgatgcctacaacgaagtgatcgcccgggtgcgaatgtgggtgaacctgaacctgtggcagaagctgaagctaagcagagatgatgccaagcctctgctgagactgaagggattcccttcctttcctctggtcgagagacaggccaacgaagtggactggtgggacatggtgtgtaacgtgaagaagctgatcaacgagaaaaaggaggatggcaaggtgttttggcagaatctggctggctacaagagacaggaagccctgagaccatacctgagcagcgaggaagatcggaagaagggaaagaaattcgctcggtaccagctgggcgacctgctgctgcacctggaaaagaagcacggcgaggactggggaaaggtgtacgacgaggcctgggagcggattgacaagaaagtggaaggcctgagcaagcacatcaagctggaagaggaacggagaagcgaggacgcccagagcaaggccgccctgaccgactggctgcgggctaaggccagcttcgtgatcgagggcctgaaggaggccgacaaggacgagttctgcagatgcgagctgaagctgcagaagtggtacggggacctgcggggaaagcccttcgccatcgaagccgagaacagcatcctggacatcagcggcttcagcaagcagtacaactgtgccttcatctggcagaaggacggcgtgaagaagctgaacctgtacctgatcatcaactacttcaagggcggcaagctgcggttcaagaagatcaaacctgaagccttcgaagccaacagattctacaccgtgatcaacaaaaagagcggcgagatcgtgcccatggaggtgaacttcaacttcgacgaccccaacctgatcatcctgcctctggcctttggcaagagacagggcagagaattcatctggaacgacctgctgtccctggaaaccggcagcctgaagctggccaacggaagagtgatcgagaagacactgtacaacagaagaacccggcaggatgagcctgccctgttcgtggccctgaccttcgagcggcgggaggtcctggactcctccaatatcaaaccaatgaacctgatcggcgtggcaagaggcgaaaacatccccgccgtgatcgccctgaccgaccccgagggctgcccactgagccggtttaaggatagcctgggaaacccaacccacatcctgagaatcggcgagagctataaggagaagcagcggaccatccaggccaagaaggaggtggagcagcggagagccggcggctacagccggaagtacgccagcaaagccaagaatctggcagacgatatggtgagaaacaccgctagagatctgctgtactacgccgtgacccaggatgccatgctgatcttcgccaacctgagccggggcttcggccggcagggcaagcggaccttcatggccgagagacagtacacacggatggaggactggctgaccgccaagctggcctacgagggcctgagcaagacctacctgtccaagacactggcccagtacacctccaagacatgcagcaactgtgggtttaccatcaccagcgccgactacgacagggtgctggagaagctgaagaagacagcaacaggctggatgaccacaattaacggcaaggagctgaaggtggagggccagattacctactacaacagatacaagagacagaacgtagtcaaggacctgtccgtcgagctggatagactgagcgaagaatctgtgaacaacgacatctcctcctggacaaagggcagaagcggagaagctctgagcctcctgaagaaaagattctcccatagacccgtgcaggagaagttcgtgtgcctgaactgcggcttcgagacacacgcagccgagcaagccgccctgaacatcgccagatcctggctgttcctgcggagccaggagtacaagaaataccagacaaacaagacaaccggcaacaccgataagagagccttcgtcgagacctggcagtccttttaccggaagaagcttaaggaggtgtggaaacctgccgtgcggtctggcggatctggcggaggctcctctacacctgtgaccttcgaggatgtggtggtctacttcaccgccgctgagtgggtgcacctgacaaactggcaaagagatttttatcaggccgtgatgatggaaacctacgagctggtggccagcgtggctggcgacggcgttccaatggccgaggacgaggaaggcggagtggaaagacccgtgtggcagtacatccccagaggcaagcggcggagaaagacccctcagcctcgcgccgacggatctggctccggcagcggccccaagaaaaagagaaaagtctaagctgccttctgcggggcttgccttctggccatgcccttcttctctcccttgcacctgtacctcttggtctttgaataaagcctgagtaggaaggctagcaaaaaaaaaaaaaaaaaaaaaaaaaaaaaaaaaaaaaaaaaaaaaaaaaaaaaaaaaaaagcatgcaaaaaaaaaaaaaaaaaaaaaaaaaaaaaaaaaaaaaaaaaaaaaaaaaaaaaaaaa

SEQ ID NO: 1881 - RNA, 6083 nt, synthetic construct
  source 1..6083: mol_type = other RNA
aaataagagagaaaagaagagtaagaagaaatataagagccaccatggcccctaagaagaagcgtaaagtgagccggatggaacgcctcgtctacgaggtgcggcagaagtgcagaaacatcgaggacatctgcatctcctgcggatctctgaacgtgaccctggagcacccactgttcatcggcggcatgtgccagaactgtaaaaactgttttctggagtgtgcctatcaatacgacgatgacggctaccagagctactgcaccatctgttgcggcggaagagaggtgctgatgtgtggaaataacaactgctgccggtgcttctgcgtggaatgcgtggacctgctggtgggccccggcgccgcccaggccgctattaaggaagatccttggaactgctacatgtgcggccacaagggcacatacggcctgctgagacggagagaggactggcctagcagactgcagatgttcttcgccaataaccacgaccaggagttcgacccccctaaggtgtaccctcccgtccccgccgagaagagaaagcccatccgggtcctgagcctgttcgatggcatcgccaccggtctgctggtgctgaaggacctgggcatccaggtggataggtacattgcctccgaggtgtgcgaggactccatcaccgtgggaatggtgcgtcatcagggcaagatcatgtacgtgggcgacgtgcggagcgtgacacagaagcatatccaggagtggggccctttcgacctggtgatcggcggcagcccttgcaatgacctgagcatcgtgaacccagcccggaagggcctgtacgagggaaccggcagactgttcttcgagttttacagactgctgcacgacgcccggcctaaggaaggcgacgaccggcccttcttttggctgttcgagaatgtggtggccatgggagtcagcgacaagcgggatattagccggttcctggagagcaaccccgtgatgatcgatgccaaggaagtgagcgccgcccaccgggccagatacttctggggcaatctgcctggcatgaacagacccctggccagcaccgtgaacgacaagctggagctgcaggagtgcctggagcacggccggatcgccaagttcagcaaggtgagaaccatcaccacccgaagcaacagcatcaaacaaggcaaggaccagcactttcctgtgttcatgaacgagaaggaggacatcctgtggtgtaccgagatggagagagtgttcgggttcccagtccactacacagatgtcagcaacatgtctagactggccagacagagactgctgggaagaagctggtccgtccctgtgatcagacacctgttcgcccctctgaaggagtacttcgcctgcgtgagcagcggcaacagcaacgccaacagccggggccccagcttctctagcggcctggtgccactgtccctgagagggagccacatgggccccatggagatctacaaaaccgtgagcgcctggaagcggcagcctgtgcgcgtgctgagcctgtttcggaatatcgataaagtcctgaaaagcctgggattcctggagagcggctctggctccggcggtggcaccctgaagtacgtggaggatgtgacaaacgtggtcagacgggatgtggagaagtggggccccttcgatctggtgtacggcagcacccaacccctgggcagctcttgtgaccggtgccctggctggtacatgtttcagttccaccggatcctgcagtacgccctgccgagacaggagtcccagcggccattcttttggattttcatggacaacttgctgctgaccgaggatgaccaggaaactaccactcggttcctgcagaccgaagccgtgaccctgcaggacgtgagaggccgggactaccagaacgccatgcgggtgtggtccaacatccctggactgaaaagcaagcacgcacctctgacccctaaagaagaggagtacctgcaggcccaggtgcggagcagaagcaagctggacgcccctaaggtggatctgctggtgaagaattgcctcctgcccctgagagagtacttcaagtatttcagccagaatagtctgcccctgggaggcagcggcggcggcgccctggtgacatttgaggacgtcgccgtgcggttcacccaggaggaatgggctctgctggatccttctcagaaaatcctgtaccgggacgtgatgagagagacataccggaatctgacctccgtgggcatcaactgggaatgttgggaccttgaagcctgcttcagaagcctgggaagaaacctgagagtgcaggtggtgaagagaaagtgcgagctgaccaacagcggcccctgcgccgagggcggcccaagcagcggcgcccctcctcccagcggcggcagcccagccggctccccaacctctaccgaggagggcacctctgagtccgccacccccgagagcggccctggcacctccaccgagcccagcgagggcagcgcacccggcagccctgccggcagccccacctccacagaggagggaaccagcaccgagcccagcgaaggcagcgccccaggcaccagcaccgagcctagtgagcaggagattaaacggatcaacaagatcagaagaagacttgtgaaagacagcaacaccaagaaggccggcaagacaggccccatgaaaaccctgctggttagagtgatgacacccgatctgagagagcggctggaaaacctgagaaagaagcctgaaaatatcccccagcccatcagcaatacatctagagccaacctgaataagctgctgaccgattacaccgaaatgaagaaggcgatcctgcatgtgtactgggaagagttccagaaggaccctgtgggcctgatgagccgggtggcccagcctgccagcaagaagatcgatcagaacaagctgaaacctgagatggacgagaagggcaacctgaccaccgccggctttgcctgctctcagtgtggccagcccctgttcgtgtacaagctggagcaggtgtctgagaagggcaaggcttacaccaactacttcggacggtgcaatgtggccgagcacgaaaagctgatcctgctggcccagctgaagcccgagaaggatagcgacgaagccgtgacatatagcctgggaaagtttgggcagagggccctggatttctacagcattcatgtgaccaaggagtccacccaccccgtgaagcccctggcccagatcgccggaaacagatacgcctccggacctgtgggaaaggccctgagcgacgcatgtatgggcacaatcgcctccttcctgtctaagtaccaggacatcatcatcgaacaccagaaggtggtgaagggcaaccagaagagactggagagcctgcgggagctggccggcaaggaaaacctggaataccctagcgtgaccctgccacctcagcctcacaccaaggagggcgttgatgcctacaacgaagtgatcgcccgggtgcgaatgtgggtgaacctgaacctgtggcagaagctgaagctaagcagagatgatgccaagcctctgctgagactgaagggattcccttcctttcctctggtcgagagacaggccaacgaagtggactggtgggacatggtgtgtaacgtgaagaagctgatcaacgagaaaaaggaggatggcaaggtgttttggcagaatctggctggctacaagagacaggaagccctgagaccatacctgagcagcgaggaagatcggaagaagggaaagaaattcgctcggtaccagctgggcgacctgctgctgcacctggaaaagaagcacggcgaggactggggaaaggtgtacgacgaggcctgggagcggattgacaagaaagtggaaggcctgagcaagcacatcaagctggaagaggaacggagaagcgaggacgcccagagcaaggccgccctgaccgactggctgcgggctaaggccagcttcgtgatcgagggcctgaaggaggccgacaaggacgagttctgcagatgcgagctgaagctgcagaagtggtacggggacctgcggggaaagcccttcgccatcgaagccgagaacagcatcctggacatcagcggcttcagcaagcagtacaactgtgccttcatctggcagaaggacggcgtgaagaagctgaacctgtacctgatcatcaactacttcaagggcggcaagctgcggttcaagaagatcaaacctgaagccttcgaagccaacagattctacaccgtgatcaacaaaaagagcggcgagatcgtgcccatggaggtgaacttcaacttcgacgaccccaacctgatcatcctgcctctggcctttggcaagagacagggcagagaattcatctggaacgacctgctgtccctggaaaccggcagcctgaagctggccaacggaagagtgatcgagaagacactgtacaacagaagaacccggcaggatgagcctgccctgttcgtggccctgaccttcgagcggcgggaggtcctggactcctccaatatcaaaccaatgaacctgatcggcgtggcaagaggcgaaaacatccccgccgtgatcgccctgaccgaccccgagggctgcccactgagccggtttaaggatagcctgggaaacccaacccacatcctgagaatcggcgagagctataaggagaagcagcggaccatccaggccaagaaggaggtggagcagcggagagccggcggctacagccggaagtacgccagcaaagccaagaatctggcagacgatatggtgagaaacaccgctagagatctgctgtactacgccgtgacccaggatgccatgctgatcttcgccaacctgagccggggcttcggccggcagggcaagcggaccttcatggccgagagacagtacacacggatggaggactggctgaccgccaagctggcctacgagggcctgagcaagacctacctgtccaagacactggcccagtacacctccaagacatgcagcaactgtgggtttaccatcaccagcgccgactacgacagggtgctggagaagctgaagaagacagcaacaggctggatgaccacaattaacggcaaggagctgaaggtggagggccagattacctactacaacagatacaagagacagaacgtagtcaaggacctgtccgtcgagctggatagactgagcgaagaatctgtgaacaacgacatctcctcctggacaaagggcagaagcggagaagctctgagcctcctgaagaaaagattctcccatagacccgtgcaggagaagttcgtgtgcctgaactgcggcttcgagacacacgcagccgagcaagccgccctgaacatcgccagatcctggctgttcctgcggagccaggagtacaagaaataccagacaaacaagacaaccggcaacaccgataagagagccttcgtcgagacctggcagtccttttaccggaagaagcttaaggaggtgtggaaacctgccgtgcggtctggcggatctggcggaggctcctctacacctgtgaccttcgaggatgtggtggtctacttcaccgccgctgagtgggtgcacctgacaaactggcaaagagatttttatcaggccgtgatgatggaaacctacgagctggtggccagcgtggctggcgacggcgttccaatggccgaggacgaggaaggcggagtggaaagacccgtgtggcagtacatccccagaggcaagcggcggagaaagacccctcagcctcgcgccgacggatctggctccggcagcggccccaagaaaaagagaaaagtctaagctgccttctgcggggcttgccttctggccatgcccttcttctctcccttgcacctgtacctcttggtctttgaataaagcctgagtaggaaggctagcaaaaaaaaaaaaaaaaaaaaaaaaaaaaaaaaaaaaaaaaaaaaaaaaaaaaaaaaaaaagcatgcaaaaaaaaaaaaaaaaaaaaaaaaaaaaaaaaaaaaaaaaaaaaaaaaaaaaaaaaa

SEQ ID NO: 1882 - RNA, 5906 nt, synthetic construct
  source 1..5906: mol_type = other RNA
aaataagagagaaaagaagagtaagaagaaatataagagccaccatggcccctaagaagaagcgtaaagtgagccggatggaacgcctcgtctacgaggtgcggcagaagtgcagaaacatcgaggacatctgcatctcctgcggatctctgaacgtgaccctggagcacccactgttcatcggcggcatgtgccagaactgtaaaaactgttttctggagtgtgcctatcaatacgacgatgacggctaccagagctactgcaccatctgttgcggcggaagagaggtgctgatgtgtggaaataacaactgctgccggtgcttctgcgtggaatgcgtggacctgctggtgggccccggcgccgcccaggccgctattaaggaagatccttggaactgctacatgtgcggccacaagggcacatacggcctgctgagacggagagaggactggcctagcagactgcagatgttcttcgccaataaccacgaccaggagttcgacccccctaaggtgtaccctcccgtccccgccgagaagagaaagcccatccgggtcctgagcctgttcgatggcatcgccaccggtctgctggtgctgaaggacctgggcatccaggtggataggtacattgcctccgaggtgtgcgaggactccatcaccgtgggaatggtgcgtcatcagggcaagatcatgtacgtgggcgacgtgcggagcgtgacacagaagcatatccaggagtggggccctttcgacctggtgatcggcggcagcccttgcaatgacctgagcatcgtgaacccagcccggaagggcctgtacgagggaaccggcagactgttcttcgagttttacagactgctgcacgacgcccggcctaaggaaggcgacgaccggcccttcttttggctgttcgagaatgtggtggccatgggagtcagcgacaagcgggatattagccggttcctggagagcaaccccgtgatgatcgatgccaaggaagtgagcgccgcccaccgggccagatacttctggggcaatctgcctggcatgaacagacccctggccagcaccgtgaacgacaagctggagctgcaggagtgcctggagcacggccggatcgccaagttcagcaaggtgagaaccatcaccacccgaagcaacagcatcaaacaaggcaaggaccagcactttcctgtgttcatgaacgagaaggaggacatcctgtggtgtaccgagatggagagagtgttcgggttcccagtccactacacagatgtcagcaacatgtctagactggccagacagagactgctgggaagaagctggtccgtccctgtgatcagacacctgttcgcccctctgaaggagtacttcgcctgcgtgagcagcggcaacagcaacgccaacagccggggccccagcttctctagcggcctggtgccactgtccctgagagggagccacatgggccccatggagatctacaaaaccgtgagcgcctggaagcggcagcctgtgcgcgtgctgagcctgtttcggaatatcgataaagtcctgaaaagcctgggattcctggagagcggctctggctccggcggtggcaccctgaagtacgtggaggatgtgacaaacgtggtcagacgggatgtggagaagtggggccccttcgatctggtgtacggcagcacccaacccctgggcagctcttgtgaccggtgccctggctggtacatgtttcagttccaccggatcctgcagtacgccctgccgagacaggagtcccagcggccattcttttggattttcatggacaacttgctgctgaccgaggatgaccaggaaactaccactcggttcctgcagaccgaagccgtgaccctgcaggacgtgagaggccgggactaccagaacgccatgcgggtgtggtccaacatccctggactgaaaagcaagcacgcacctctgacccctaaagaagaggagtacctgcaggcccaggtgcggagcagaagcaagctggacgcccctaaggtggatctgctggtgaagaattgcctcctgcccctgagagagtacttcaagtatttcagccagaatagtctgcccctggcctctcctgccgcccctgcccctgccagccccgccgctccagcccccagcgcccctgctgcctctacacctgtgaccttcgaggatgtggtggtctacttcaccgccgctgagtgggtgcacctgacaaactggcaaagagatttttatcaggccgtgatgatggaaacctacgagctggtggccagcgtggctggcgacggcgttccaatggccgaggacgaggaaggcggagtggaaagacccgtgtggcagtacatccccagaggcaagcggcggagaaagacccctcagcctcgcgccgacatcagagcccacggcgaccaggagattaaacggatcaacaagatcagaagaagacttgtgaaagacagcaacaccaagaaggccggcaagacaggccccatgaaaaccctgctggttagagtgatgacacccgatctgagagagcggctggaaaacctgagaaagaagcctgaaaatatcccccagcccatcagcaatacatctagagccaacctgaataagctgctgaccgattacaccgaaatgaagaaggcgatcctgcatgtgtactgggaagagttccagaaggaccctgtgggcctgatgagccgggtggcccagcctgccagcaagaagatcgatcagaacaagctgaaacctgagatggacgagaagggcaacctgaccaccgccggctttgcctgctctcagtgtggccagcccctgttcgtgtacaagctggagcaggtgtctgagaagggcaaggcttacaccaactacttcggacggtgcaatgtggccgagcacgaaaagctgatcctgctggcccagctgaagcccgagaaggatagcgacgaagccgtgacatatagcctgggaaagtttgggcagagggccctggatttctacagcattcatgtgaccaaggagtccacccaccccgtgaagcccctggcccagatcgccggaaacagatacgcctccggacctgtgggaaaggccctgagcgacgcatgtatgggcacaatcgcctccttcctgtctaagtaccaggacatcatcatcgaacaccagaaggtggtgaagggcaaccagaagagactggagagcctgcgggagctggccggcaaggaaaacctggaataccctagcgtgaccctgccacctcagcctcacaccaaggagggcgttgatgcctacaacgaagtgatcgcccgggtgcgaatgtgggtgaacctgaacctgtggcagaagctgaagctaagcagagatgatgccaagcctctgctgagactgaagggattcccttcctttcctctggtcgagagacaggccaacgaagtggactggtgggacatggtgtgtaacgtgaagaagctgatcaacgagaaaaaggaggatggcaaggtgttttggcagaatctggctggctacaagagacaggaagccctgagaccatacctgagcagcgaggaagatcggaagaagggaaagaaattcgctcggtaccagctgggcgacctgctgctgcacctggaaaagaagcacggcgaggactggggaaaggtgtacgacgaggcctgggagcggattgacaagaaagtggaaggcctgagcaagcacatcaagctggaagaggaacggagaagcgaggacgcccagagcaaggccgccctgaccgactggctgcgggctaaggccagcttcgtgatcgagggcctgaaggaggccgacaaggacgagttctgcagatgcgagctgaagctgcagaagtggtacggggacctgcggggaaagcccttcgccatcgaagccgagaacagcatcctggacatcagcggcttcagcaagcagtacaactgtgccttcatctggcagaaggacggcgtgaagaagctgaacctgtacctgatcatcaactacttcaagggcggcaagctgcggttcaagaagatcaaacctgaagccttcgaagccaacagattctacaccgtgatcaacaaaaagagcggcgagatcgtgcccatggaggtgaacttcaacttcgacgaccccaacctgatcatcctgcctctggcctttggcaagagacagggcagagaattcatctggaacgacctgctgtccctggaaaccggcagcctgaagctggccaacggaagagtgatcgagaagacactgtacaacagaagaacccggcaggatgagcctgccctgttcgtggccctgaccttcgagcggcgggaggtcctggactcctccaatatcaaaccaatgaacctgatcggcgtggcaagaggcgaaaacatccccgccgtgatcgccctgaccgaccccgagggctgcccactgagccggtttaaggatagcctgggaaacccaacccacatcctgagaatcggcgagagctataaggagaagcagcggaccatccaggccaagaaggaggtggagcagcggagagccggcggctacagccggaagtacgccagcaaagccaagaatctggcagacgatatggtgagaaacaccgctagagatctgctgtactacgccgtgacccaggatgccatgctgatcttcgccaacctgagccggggcttcggccggcagggcaagcggaccttcatggccgagagacagtacacacggatggaggactggctgaccgccaagctggcctacgagggcctgagcaagacctacctgtccaagacactggcccagtacacctccaagacatgcagcaactgtgggtttaccatcaccagcgccgactacgacagggtgctggagaagctgaagaagacagcaacaggctggatgaccacaattaacggcaaggagctgaaggtggagggccagattacctactacaacagatacaagagacagaacgtagtcaaggacctgtccgtcgagctggatagactgagcgaagaatctgtgaacaacgacatctcctcctggacaaagggcagaagcggagaagctctgagcctcctgaagaaaagattctcccatagacccgtgcaggagaagttcgtgtgcctgaactgcggcttcgagacacacgcagccgagcaagccgccctgaacatcgccagatcctggctgttcctgcggagccaggagtacaagaaataccagacaaacaagacaaccggcaacaccgataagagagccttcgtcgagacctggcagtccttttaccggaagaagcttaaggaggtgtggaaacctgccgtgcggtctggcggatctggcggaggctcctctacacctgtgaccttcgaggatgtggtggtctacttcaccgccgctgagtgggtgcacctgacaaactggcaaagagatttttatcaggccgtgatgatggaaacctacgagctggtggccagcgtggctggcgacggcgttccaatggccgaggacgaggaaggcggagtggaaagacccgtgtggcagtacatccccagaggcaagcggcggagaaagacccctcagcctcgcgccgacggatctggctccggcagcggccccaagaaaaagagaaaagtctaagctgccttctgcggggcttgccttctggccatgcccttcttctctcccttgcacctgtacctcttggtctttgaataaagcctgagtaggaaggctagcaaaaaaaaaaaaaaaaaaaaaaaaaaaaaaaaaaaaaaaaaaaaaaaaaaaaaaaaaaaagcatgcaaaaaaaaaaaaaaaaaaaaaaaaaaaaaaaaaaaaaaaaaaaaaaaaaaaaaaaaa

SEQ ID NO: 1883 - protein, 1871 aa, synthetic construct
MAPKKKRKVSRMERLVYEVRQKCRNIEDICISCGSLNVTLEHPLFIGGMCQNCKNCFLECAYQYDDDGYQSYCTICCGGREVLMCGNNNCCRCFCVECVDLLVGPGAAQAAIKEDPWNCYMCGHKGTYGLLRRREDWPSRLQMFFANNHDQEFDPPKVYPPVPAEKRKPIRVLSLFDGIATGLLVLKDLGIQVDRYIASEVCEDSITVGMVRHQGKIMYVGDVRSVTQKHIQEWGPFDLVIGGSPCNDLSIVNPARKGLYEGTGRLFFEFYRLLHDARPKEGDDRPFFWLFENVVAMGVSDKRDISRFLESNPVMIDAKEVSAAHRARYFWGNLPGMNRPLASTVNDKLELQECLEHGRIAKFSKVRTITTRSNSIKQGKDQHFPVFMNEKEDILWCTEMERVFGFPVHYTDVSNMSRLARQRLLGRSWSVPVIRHLFAPLKEYFACVSSGNSNANSRGPSFSSGLVPLSLRGSHMGPMEIYKTVSAWKRQPVRVLSLFRNIDKVLKSLGFLESGSGSGGGTLKYVEDVTNVVRRDVEKWGPFDLVYGSTQPLGSSCDRCPGWYMFQFHRILQYALPRQESQRPFFWIFMDNLLLTEDDQETTTRFLQTEAVTLQDVRGRDYQNAMRVWSNIPGLKSKHAPLTPKEEEYLQAQVRSRSKLDAPKVDLLVKNCLLPLREYFKYFSQNSLPLGGSGGGMNNSQGRVTFEDVTVNFTQGEWQRLNPEQRNLYRDVMLENYSNLVSVGQGETTKPDVILRLEQGKEPWLEEEEVLGSGRAEKNGDIGGQIWKPKDVKESLGGPSSGAPPPSGGSPAGSPTSTEEGTSESATPESGPGTSTEPSEGSAPGSPAGSPTSTEEGTSTEPSEGSAPGTSTEPSEQEIKRINKIRRRLVKDSNTKKAGKTGPMKTLLVRVMTPDLRERLENLRKKPENIPQPISNTSRANLNKLLTDYTEMKKAILHVYWEEFQKDPVGLMSRVAQPASKKIDQNKLKPEMDEKGNLTTAGFACSQCGQPLFVYKLEQVSEKGKAYTNYFGRCNVAEHEKLILLAQLKPEKDSDEAVTYSLGKFGQRALDFYSIHVTKESTHPVKPLAQIAGNRYASGPVGKALSDACMGTIASFLSKYQDIIIEHQKVVKGNQKRLESLRELAGKENLEYPSVTLPPQPHTKEGVDAYNEVIARVRMWVNLNLWQKLKLSRDDAKPLLRLKGFPSFPLVERQANEVDWWDMVCNVKKLINEKKEDGKVFWQNLAGYKRQEALRPYLSSEEDRKKGKKFARYQLGDLLLHLEKKHGEDWGKVYDEAWERIDKKVEGLSKHIKLEEERRSEDAQSKAALTDWLRAKASFVIEGLKEADKDEFCRCELKLQKWYGDLRGKPFAIEAENSILDISGFSKQYNCAFIWQKDGVKKLNLYLIINYFKGGKLRFKKIKPEAFEANRFYTVINKKSGEIVPMEVNFNFDDPNLIILPLAFGKRQGREFIWNDLLSLETGSLKLANGRVIEKTLYNRRTRQDEPALFVALTFERREVLDSSNIKPMNLIGVARGENIPAVIALTDPEGCPLSRFKDSLGNPTHILRIGESYKEKQRTIQAKKEVEQRRAGGYSRKYASKAKNLADDMVRNTARDLLYYAVTQDAMLIFANLSRGFGRQGKRTFMAERQYTRMEDWLTAKLAYEGLSKTYLSKTLAQYTSKTCSNCGFTITSADYDRVLEKLKKTATGWMTTINGKELKVEGQITYYNRYKRQNVVKDLSVELDRLSEESVNNDISSWTKGRSGEALSLLKKRFSHRPVQEKFVCLNCGFETHAAEQAALNIARSWLFLRSQEYKKYQTNKTTGNTDKRAFVETWQSFYRKKLKEVWKPAVRSGGSGGGSTSPKKKRKV

SEQ ID NO: 1884 - protein, 1852 aa, synthetic construct
MAPKKKRKVSRMERLVYEVRQKCRNIEDICISCGSLNVTLEHPLFIGGMCQNCKNCFLECAYQYDDDGYQSYCTICCGGREVLMCGNNNCCRCFCVECVDLLVGPGAAQAAIKEDPWNCYMCGHKGTYGLLRRREDWPSRLQMFFANNHDQEFDPPKVYPPVPAEKRKPIRVLSLFDGIATGLLVLKDLGIQVDRYIASEVCEDSITVGMVRHQGKIMYVGDVRSVTQKHIQEWGPFDLVIGGSPCNDLSIVNPARKGLYEGTGRLFFEFYRLLHDARPKEGDDRPFFWLFENVVAMGVSDKRDISRFLESNPVMIDAKEVSAAHRARYFWGNLPGMNRPLASTVNDKLELQECLEHGRIAKFSKVRTITTRSNSIKQGKDQHFPVFMNEKEDILWCTEMERVFGFPVHYTDVSNMSRLARQRLLGRSWSVPVIRHLFAPLKEYFACVSSGNSNANSRGPSFSSGLVPLSLRGSHMGPMEIYKTVSAWKRQPVRVLSLFRNIDKVLKSLGFLESGSGSGGGTLKYVEDVTNVVRRDVEKWGPFDLVYGSTQPLGSSCDRCPGWYMFQFHRILQYALPRQESQRPFFWIFMDNLLLTEDDQETTTRFLQTEAVTLQDVRGRDYQNAMRVWSNIPGLKSKHAPLTPKEEEYLQAQVRSRSKLDAPKVDLLVKNCLLPLREYFKYFSQNSLPLGGSGGGSTPVTFEDVVVYFTAAEWVHLTNWQRDFYQAVMMETYELVASVAGDGVPMAEDEEGGVERPVWQYIPRGKRRRKTPQPRADGGPSSGAPPPSGGSPAGSPTSTEEGTSESATPESGPGTSTEPSEGSAPGSPAGSPTSTEEGTSTEPSEGSAPGTSTEPSEQEIKRINKIRRRLVKDSNTKKAGKTGPMKTLLVRVMTPDLRERLENLRKKPENIPQPISNTSRANLNKLLTDYTEMKKAILHVYWEEFQKDPVGLMSRVAQPASKKIDQNKLKPEMDEKGNLTTAGFACSQCGQPLFVYKLEQVSEKGKAYTNYFGRCNVAEHEKLILLAQLKPEKDSDEAVTYSLGKFGQRALDFYSIHVTKESTHPVKPLAQIAGNRYASGPVGKALSDACMGTIASFLSKYQDIIIEHQKVVKGNQKRLESLRELAGKENLEYPSVTLPPQPHTKEGVDAYNEVIARVRMWVNLNLWQKLKLSRDDAKPLLRLKGFPSFPLVERQANEVDWWDMVCNVKKLINEKKEDGKVFWQNLAGYKRQEALRPYLSSEEDRKKGKKFARYQLGDLLLHLEKKHGEDWGKVYDEAWERIDKKVEGLSKHIKLEEERRSEDAQSKAALTDWLRAKASFVIEGLKEADKDEFCRCELKLQKWYGDLRGKPFAIEAENSILDISGFSKQYNCAFIWQKDGVKKLNLYLIINYFKGGKLRFKKIKPEAFEANRFYTVINKKSGEIVPMEVNFNFDDPNLIILPLAFGKRQGREFIWNDLLSLETGSLKLANGRVIEKTLYNRRTRQDEPALFVALTFERREVLDSSNIKPMNLIGVARGENIPAVIALTDPEGCPLSRFKDSLGNPTHILRIGESYKEKQRTIQAKKEVEQRRAGGYSRKYASKAKNLADDMVRNTARDLLYYAVTQDAMLIFANLSRGFGRQGKRTFMAERQYTRMEDWLTAKLAYEGLSKTYLSKTLAQYTSKTCSNCGFTITSADYDRVLEKLKKTATGWMTTINGKELKVEGQITYYNRYKRQNVVKDLSVELDRLSEESVNNDISSWTKGRSGEALSLLKKRFSHRPVQEKFVCLNCGFETHAAEQAALNIARSWLFLRSQEYKKYQTNKTTGNTDKRAFVETWQSFYRKKLKEVWKPAVRSGGSGGGSTSPKKKRKV

SEQ ID NO: 1885 - protein, 1852 aa, synthetic construct
MAPKKKRKVSRMERLVYEVRQKCRNIEDICISCGSLNVTLEHPLFIGGMCQNCKNCFLECAYQYDDDGYQSYCTICCGGREVLMCGNNNCCRCFCVECVDLLVGPGAAQAAIKEDPWNCYMCGHKGTYGLLRRREDWPSRLQMFFANNHDQEFDPPKVYPPVPAEKRKPIRVLSLFDGIATGLLVLKDLGIQVDRYIASEVCEDSITVGMVRHQGKIMYVGDVRSVTQKHIQEWGPFDLVIGGSPCNDLSIVNPARKGLYEGTGRLFFEFYRLLHDARPKEGDDRPFFWLFENVVAMGVSDKRDISRFLESNPVMIDAKEVSAAHRARYFWGNLPGMNRPLASTVNDKLELQECLEHGRIAKFSKVRTITTRSNSIKQGKDQHFPVFMNEKEDILWCTEMERVFGFPVHYTDVSNMSRLARQRLLGRSWSVPVIRHLFAPLKEYFACVSSGNSNANSRGPSFSSGLVPLSLRGSHMGPMEIYKTVSAWKRQPVRVLSLFRNIDKVLKSLGFLESGSGSGGGTLKYVEDVTNVVRRDVEKWGPFDLVYGSTQPLGSSCDRCPGWYMFQFHRILQYALPRQESQRPFFWIFMDNLLLTEDDQETTTRFLQTEAVTLQDVRGRDYQNAMRVWSNIPGLKSKHAPLTPKEEEYLQAQVRSRSKLDAPKVDLLVKNCLLPLREYFKYFSQNSLPLGGSGGGALVTFEDVAVRFTQEEWALLDPSQKILYRDVMRETYRNLTSVGINWECWDLEACFRSLGRNLRVQVVKRKCELTNSGPCAEGGPSSGAPPPSGGSPAGSPTSTEEGTSESATPESGPGTSTEPSEGSAPGSPAGSPTSTEEGTSTEPSEGSAPGTSTEPSEQEIKRINKIRRRLVKDSNTKKAGKTGPMKTLLVRVMTPDLRERLENLRKKPENIPQPISNTSRANLNKLLTDYTEMKKAILHVYWEEFQKDPVGLMSRVAQPASKKIDQNKLKPEMDEKGNLTTAGFACSQCGQPLFVYKLEQVSEKGKAYTNYFGRCNVAEHEKLILLAQLKPEKDSDEAVTYSLGKFGQRALDFYSIHVTKESTHPVKPLAQIAGNRYASGPVGKALSDACMGTIASFLSKYQDIIIEHQKVVKGNQKRLESLRELAGKENLEYPSVTLPPQPHTKEGVDAYNEVIARVRMWVNLNLWQKLKLSRDDAKPLLRLKGFPSFPLVERQANEVDWWDMVCNVKKLINEKKEDGKVFWQNLAGYKRQEALRPYLSSEEDRKKGKKFARYQLGDLLLHLEKKHGEDWGKVYDEAWERIDKKVEGLSKHIKLEEERRSEDAQSKAALTDWLRAKASFVIEGLKEADKDEFCRCELKLQKWYGDLRGKPFAIEAENSILDISGFSKQYNCAFIWQKDGVKKLNLYLIINYFKGGKLRFKKIKPEAFEANRFYTVINKKSGEIVPMEVNFNFDDPNLIILPLAFGKRQGREFIWNDLLSLETGSLKLANGRVIEKTLYNRRTRQDEPALFVALTFERREVLDSSNIKPMNLIGVARGENIPAVIALTDPEGCPLSRFKDSLGNPTHILRIGESYKEKQRTIQAKKEVEQRRAGGYSRKYASKAKNLADDMVRNTARDLLYYAVTQDAMLIFANLSRGFGRQGKRTFMAERQYTRMEDWLTAKLAYEGLSKTYLSKTLAQYTSKTCSNCGFTITSADYDRVLEKLKKTATGWMTTINGKELKVEGQITYYNRYKRQNVVKDLSVELDRLSEESVNNDISSWTKGRSGEALSLLKKRFSHRPVQEKFVCLNCGFETHAAEQAALNIARSWLFLRSQEYKKYQTNKTTGNTDKRAFVETWQSFYRKKLKEVWKPAVRSGGSGGGSTSPKKKRKV

SEQ ID NO: 1886 - protein, 1793 aa, synthetic construct
MAPKKKRKVSRMERLVYEVRQKCRNIEDICISCGSLNVTLEHPLFIGGMCQNCKNCFLECAYQYDDDGYQSYCTICCGGREVLMCGNNNCCRCFCVECVDLLVGPGAAQAAIKEDPWNCYMCGHKGTYGLLRRREDWPSRLQMFFANNHDQEFDPPKVYPPVPAEKRKPIRVLSLFDGIATGLLVLKDLGIQVDRYIASEVCEDSITVGMVRHQGKIMYVGDVRSVTQKHIQEWGPFDLVIGGSPCNDLSIVNPARKGLYEGTGRLFFEFYRLLHDARPKEGDDRPFFWLFENVVAMGVSDKRDISRFLESNPVMIDAKEVSAAHRARYFWGNLPGMNRPLASTVNDKLELQECLEHGRIAKFSKVRTITTRSNSIKQGKDQHFPVFMNEKEDILWCTEMERVFGFPVHYTDVSNMSRLARQRLLGRSWSVPVIRHLFAPLKEYFACVSSGNSNANSRGPSFSSGLVPLSLRGSHMGPMEIYKTVSAWKRQPVRVLSLFRNIDKVLKSLGFLESGSGSGGGTLKYVEDVTNVVRRDVEKWGPFDLVYGSTQPLGSSCDRCPGWYMFQFHRILQYALPRQESQRPFFWIFMDNLLLTEDDQETTTRFLQTEAVTLQDVRGRDYQNAMRVWSNIPGLKSKHAPLTPKEEEYLQAQVRSRSKLDAPKVDLLVKNCLLPLREYFKYFSQNSLPLASPAAPAPASPAAPAPSAPAASTPVTFEDVVVYFTAAEWVHLTNWQRDFYQAVMMETYELVASVAGDGVPMAEDEEGGVERPVWQYIPRGKRRRKTPQPRADIRAHGDQEIKRINKIRRRLVKDSNTKKAGKTGPMKTLLVRVMTPDLRERLENLRKKPENIPQPISNTSRANLNKLLTDYTEMKKAILHVYWEEFQKDPVGLMSRVAQPASKKIDQNKLKPEMDEKGNLTTAGFACSQCGQPLFVYKLEQVSEKGKAYTNYFGRCNVAEHEKLILLAQLKPEKDSDEAVTYSLGKFGQRALDFYSIHVTKESTHPVKPLAQIAGNRYASGPVGKALSDACMGTIASFLSKYQDIIIEHQKVVKGNQKRLESLRELAGKENLEYPSVTLPPQPHTKEGVDAYNEVIARVRMWVNLNLWQKLKLSRDDAKPLLRLKGFPSFPLVERQANEVDWWDMVCNVKKLINEKKEDGKVFWQNLAGYKRQEALRPYLSSEEDRKKGKKFARYQLGDLLLHLEKKHGEDWGKVYDEAWERIDKKVEGLSKHIKLEEERRSEDAQSKAALTDWLRAKASFVIEGLKEADKDEFCRCELKLQKWYGDLRGKPFAIEAENSILDISGFSKQYNCAFIWQKDGVKKLNLYLIINYFKGGKLRFKKIKPEAFEANRFYTVINKKSGEIVPMEVNFNFDDPNLIILPLAFGKRQGREFIWNDLLSLETGSLKLANGRVIEKTLYNRRTRQDEPALFVALTFERREVLDSSNIKPMNLIGVARGENIPAVIALTDPEGCPLSRFKDSLGNPTHILRIGESYKEKQRTIQAKKEVEQRRAGGYSRKYASKAKNLADDMVRNTARDLLYYAVTQDAMLIFANLSRGFGRQGKRTFMAERQYTRMEDWLTAKLAYEGLSKTYLSKTLAQYTSKTCSNCGFTITSADYDRVLEKLKKTATGWMTTINGKELKVEGQITYYNRYKRQNVVKDLSVELDRLSEESVNNDISSWTKGRSGEALSLLKKRFSHRPVQEKFVCLNCGFETHAAEQAALNIARSWLFLRSQEYKKYQTNKTTGNTDKRAFVETWQSFYRKKLKEVWKPAVRSGGSGGGSTSPKKKRKV

SEQ ID NO: 1887 - protein, 1803 aa, synthetic construct
MAPKKKRKVSRMERLVYEVRQKCRNIEDICISCGSLNVTLEHPLFIGGMCQNCKNCFLECAYQYDDDGYQSYCTICCGGREVLMCGNNNCCRCFCVECVDLLVGPGAAQAAIKEDPWNCYMCGHKGTYGLLRRREDWPSRLQMFFANNHDQEFDPPKVYPPVPAEKRKPIRVLSLFDGIATGLLVLKDLGIQVDRYIASEVCEDSITVGMVRHQGKIMYVGDVRSVTQKHIQEWGPFDLVIGGSPCNDLSIVNPARKGLYEGTGRLFFEFYRLLHDARPKEGDDRPFFWLFENVVAMGVSDKRDISRFLESNPVMIDAKEVSAAHRARYFWGNLPGMNRPLASTVNDKLELQECLEHGRIAKFSKVRTITTRSNSIKQGKDQHFPVFMNEKEDILWCTEMERVFGFPVHYTDVSNMSRLARQRLLGRSWSVPVIRHLFAPLKEYFACVSSGNSNANSRGPSFSSGLVPLSLRGSHMGPMEIYKTVSAWKRQPVRVLSLFRNIDKVLKSLGFLESGSGSGGGTLKYVEDVTNVVRRDVEKWGPFDLVYGSTQPLGSSCDRCPGWYMFQFHRILQYALPRQESQRPFFWIFMDNLLLTEDDQETTTRFLQTEAVTLQDVRGRDYQNAMRVWSNIPGLKSKHAPLTPKEEEYLQAQVRSRSKLDAPKVDLLVKNCLLPLREYFKYFSQNSLPLGSGGSGGSGGSPVPSTPPTPSPSTPPTPSTPVTFEDVVVYFTAAEWVHLTNWQRDFYQAVMMETYELVASVAGDGVPMAEDEEGGVERPVWQYIPRGKRRRKTPQPRADAFPAAPAPAQEIKRINKIRRRLVKDSNTKKAGKTGPMKTLLVRVMTPDLRERLENLRKKPENIPQPISNTSRANLNKLLTDYTEMKKAILHVYWEEFQKDPVGLMSRVAQPASKKIDQNKLKPEMDEKGNLTTAGFACSQCGQPLFVYKLEQVSEKGKAYTNYFGRCNVAEHEKLILLAQLKPEKDSDEAVTYSLGKFGQRALDFYSIHVTKESTHPVKPLAQIAGNRYASGPVGKALSDACMGTIASFLSKYQDIIIEHQKVVKGNQKRLESLRELAGKENLEYPSVTLPPQPHTKEGVDAYNEVIARVRMWVNLNLWQKLKLSRDDAKPLLRLKGFPSFPLVERQANEVDWWDMVCNVKKLINEKKEDGKVFWQNLAGYKRQEALRPYLSSEEDRKKGKKFARYQLGDLLLHLEKKHGEDWGKVYDEAWERIDKKVEGLSKHIKLEEERRSEDAQSKAALTDWLRAKASFVIEGLKEADKDEFCRCELKLQKWYGDLRGKPFAIEAENSILDISGFSKQYNCAFIWQKDGVKKLNLYLIINYFKGGKLRFKKIKPEAFEANRFYTVINKKSGEIVPMEVNFNFDDPNLIILPLAFGKRQGREFIWNDLLSLETGSLKLANGRVIEKTLYNRRTRQDEPALFVALTFERREVLDSSNIKPMNLIGVARGENIPAVIALTDPEGCPLSRFKDSLGNPTHILRIGESYKEKQRTIQAKKEVEQRRAGGYSRKYASKAKNLADDMVRNTARDLLYYAVTQDAMLIFANLSRGFGRQGKRTFMAERQYTRMEDWLTAKLAYEGLSKTYLSKTLAQYTSKTCSNCGFTITSADYDRVLEKLKKTATGWMTTINGKELKVEGQITYYNRYKRQNVVKDLSVELDRLSEESVNNDISSWTKGRSGEALSLLKKRFSHRPVQEKFVCLNCGFETHAAEQAALNIARSWLFLRSQEYKKYQTNKTTGNTDKRAFVETWQSFYRKKLKEVWKPAVRSGGSGGGSTSPKKKRKV

SEQ ID NO: 1888 - protein, 1938 aa, synthetic construct
MAPKKKRKVSRMERLVYEVRQKCRNIEDICISCGSLNVTLEHPLFIGGMCQNCKNCFLECAYQYDDDGYQSYCTICCGGREVLMCGNNNCCRCFCVECVDLLVGPGAAQAAIKEDPWNCYMCGHKGTYGLLRRREDWPSRLQMFFANNHDQEFDPPKVYPPVPAEKRKPIRVLSLFDGIATGLLVLKDLGIQVDRYIASEVCEDSITVGMVRHQGKIMYVGDVRSVTQKHIQEWGPFDLVIGGSPCNDLSIVNPARKGLYEGTGRLFFEFYRLLHDARPKEGDDRPFFWLFENVVAMGVSDKRDISRFLESNPVMIDAKEVSAAHRARYFWGNLPGMNRPLASTVNDKLELQECLEHGRIAKFSKVRTITTRSNSIKQGKDQHFPVFMNEKEDILWCTEMERVFGFPVHYTDVSNMSRLARQRLLGRSWSVPVIRHLFAPLKEYFACVSSGNSNANSRGPSFSSGLVPLSLRGSHMGPMEIYKTVSAWKRQPVRVLSLFRNIDKVLKSLGFLESGSGSGGGTLKYVEDVTNVVRRDVEKWGPFDLVYGSTQPLGSSCDRCPGWYMFQFHRILQYALPRQESQRPFFWIFMDNLLLTEDDQETTTRFLQTEAVTLQDVRGRDYQNAMRVWSNIPGLKSKHAPLTPKEEEYLQAQVRSRSKLDAPKVDLLVKNCLLPLREYFKYFSQNSLPLGGSGGGSTPVTFEDVVVYFTAAEWVHLTNWQRDFYQAVMMETYELVASVAGDGVPMAEDEEGGVERPVWQYIPRGKRRRKTPQPRADGGPSSGAPPPSGGSPAGSPTSTEEGTSESATPESGPGTSTEPSEGSAPGSPAGSPTSTEEGTSTEPSEGSAPGTSTEPSEQEIKRINKIRRRLVKDSNTKKAGKTGPMKTLLVRVMTPDLRERLENLRKKPENIPQPISNTSRANLNKLLTDYTEMKKAILHVYWEEFQKDPVGLMSRVAQPASKKIDQNKLKPEMDEKGNLTTAGFACSQCGQPLFVYKLEQVSEKGKAYTNYFGRCNVAEHEKLILLAQLKPEKDSDEAVTYSLGKFGQRALDFYSIHVTKESTHPVKPLAQIAGNRYASGPVGKALSDACMGTIASFLSKYQDIIIEHQKVVKGNQKRLESLRELAGKENLEYPSVTLPPQPHTKEGVDAYNEVIARVRMWVNLNLWQKLKLSRDDAKPLLRLKGFPSFPLVERQANEVDWWDMVCNVKKLINEKKEDGKVFWQNLAGYKRQEALRPYLSSEEDRKKGKKFARYQLGDLLLHLEKKHGEDWGKVYDEAWERIDKKVEGLSKHIKLEEERRSEDAQSKAALTDWLRAKASFVIEGLKEADKDEFCRCELKLQKWYGDLRGKPFAIEAENSILDISGFSKQYNCAFIWQKDGVKKLNLYLIINYFKGGKLRFKKIKPEAFEANRFYTVINKKSGEIVPMEVNFNFDDPNLIILPLAFGKRQGREFIWNDLLSLETGSLKLANGRVIEKTLYNRRTRQDEPALFVALTFERREVLDSSNIKPMNLIGVARGENIPAVIALTDPEGCPLSRFKDSLGNPTHILRIGESYKEKQRTIQAKKEVEQRRAGGYSRKYASKAKNLADDMVRNTARDLLYYAVTQDAMLIFANLSRGFGRQGKRTFMAERQYTRMEDWLTAKLAYEGLSKTYLSKTLAQYTSKTCSNCGFTITSADYDRVLEKLKKTATGWMTTINGKELKVEGQITYYNRYKRQNVVKDLSVELDRLSEESVNNDISSWTKGRSGEALSLLKKRFSHRPVQEKFVCLNCGFETHAAEQAALNIARSWLFLRSQEYKKYQTNKTTGNTDKRAFVETWQSFYRKKLKEVWKPAVRSGGSGGGSSTPVTFEDVVVYFTAAEWVHLTNWQRDFYQAVMMETYELVASVAGDGVPMAEDEEGGVERPVWQYIPRGKRRRKTPQPRADGSGSGSGPKKKRKV

SEQ ID NO: 1889 - protein, 1938 aa, synthetic construct
MAPKKKRKVSRMERLVYEVRQKCRNIEDICISCGSLNVTLEHPLFIGGMCQNCKNCFLECAYQYDDDGYQSYCTICCGGREVLMCGNNNCCRCFCVECVDLLVGPGAAQAAIKEDPWNCYMCGHKGTYGLLRRREDWPSRLQMFFANNHDQEFDPPKVYPPVPAEKRKPIRVLSLFDGIATGLLVLKDLGIQVDRYIASEVCEDSITVGMVRHQGKIMYVGDVRSVTQKHIQEWGPFDLVIGGSPCNDLSIVNPARKGLYEGTGRLFFEFYRLLHDARPKEGDDRPFFWLFENVVAMGVSDKRDISRFLESNPVMIDAKEVSAAHRARYFWGNLPGMNRPLASTVNDKLELQECLEHGRIAKFSKVRTITTRSNSIKQGKDQHFPVFMNEKEDILWCTEMERVFGFPVHYTDVSNMSRLARQRLLGRSWSVPVIRHLFAPLKEYFACVSSGNSNANSRGPSFSSGLVPLSLRGSHMGPMEIYKTVSAWKRQPVRVLSLFRNIDKVLKSLGFLESGSGSGGGTLKYVEDVTNVVRRDVEKWGPFDLVYGSTQPLGSSCDRCPGWYMFQFHRILQYALPRQESQRPFFWIFMDNLLLTEDDQETTTRFLQTEAVTLQDVRGRDYQNAMRVWSNIPGLKSKHAPLTPKEEEYLQAQVRSRSKLDAPKVDLLVKNCLLPLREYFKYFSQNSLPLGGSGGGALVTFEDVAVRFTQEEWALLDPSQKILYRDVMRETYRNLTSVGINWECWDLEACFRSLGRNLRVQVVKRKCELTNSGPCAEGGPSSGAPPPSGGSPAGSPTSTEEGTSESATPESGPGTSTEPSEGSAPGSPAGSPTSTEEGTSTEPSEGSAPGTSTEPSEQEIKRINKIRRRLVKDSNTKKAGKTGPMKTLLVRVMTPDLRERLENLRKKPENIPQPISNTSRANLNKLLTDYTEMKKAILHVYWEEFQKDPVGLMSRVAQPASKKIDQNKLKPEMDEKGNLTTAGFACSQCGQPLFVYKLEQVSEKGKAYTNYFGRCNVAEHEKLILLAQLKPEKDSDEAVTYSLGKFGQRALDFYSIHVTKESTHPVKPLAQIAGNRYASGPVGKALSDACMGTIASFLSKYQDIIIEHQKVVKGNQKRLESLRELAGKENLEYPSVTLPPQPHTKEGVDAYNEVIARVRMWVNLNLWQKLKLSRDDAKPLLRLKGFPSFPLVERQANEVDWWDMVCNVKKLINEKKEDGKVFWQNLAGYKRQEALRPYLSSEEDRKKGKKFARYQLGDLLLHLEKKHGEDWGKVYDEAWERIDKKVEGLSKHIKLEEERRSEDAQSKAALTDWLRAKASFVIEGLKEADKDEFCRCELKLQKWYGDLRGKPFAIEAENSILDISGFSKQYNCAFIWQKDGVKKLNLYLIINYFKGGKLRFKKIKPEAFEANRFYTVINKKSGEIVPMEVNFNFDDPNLIILPLAFGKRQGREFIWNDLLSLETGSLKLANGRVIEKTLYNRRTRQDEPALFVALTFERREVLDSSNIKPMNLIGVARGENIPAVIALTDPEGCPLSRFKDSLGNPTHILRIGESYKEKQRTIQAKKEVEQRRAGGYSRKYASKAKNLADDMVRNTARDLLYYAVTQDAMLIFANLSRGFGRQGKRTFMAERQYTRMEDWLTAKLAYEGLSKTYLSKTLAQYTSKTCSNCGFTITSADYDRVLEKLKKTATGWMTTINGKELKVEGQITYYNRYKRQNVVKDLSVELDRLSEESVNNDISSWTKGRSGEALSLLKKRFSHRPVQEKFVCLNCGFETHAAEQAALNIARSWLFLRSQEYKKYQTNKTTGNTDKRAFVETWQSFYRKKLKEVWKPAVRSGGSGGGSSTPVTFEDVVVYFTAAEWVHLTNWQRDFYQAVMMETYELVASVAGDGVPMAEDEEGGVERPVWQYIPRGKRRRKTPQPRADGSGSGSGPKKKRKV

SEQ ID NO: 1890 - protein, 1879 aa, synthetic construct
MAPKKKRKVSRMERLVYEVRQKCRNIEDICISCGSLNVTLEHPLFIGGMCQNCKNCFLECAYQYDDDGYQSYCTICCGGREVLMCGNNNCCRCFCVECVDLLVGPGAAQAAIKEDPWNCYMCGHKGTYGLLRRREDWPSRLQMFFANNHDQEFDPPKVYPPVPAEKRKPIRVLSLFDGIATGLLVLKDLGIQVDRYIASEVCEDSITVGMVRHQGKIMYVGDVRSVTQKHIQEWGPFDLVIGGSPCNDLSIVNPARKGLYEGTGRLFFEFYRLLHDARPKEGDDRPFFWLFENVVAMGVSDKRDISRFLESNPVMIDAKEVSAAHRARYFWGNLPGMNRPLASTVNDKLELQECLEHGRIAKFSKVRTITTRSNSIKQGKDQHFPVFMNEKEDILWCTEMERVFGFPVHYTDVSNMSRLARQRLLGRSWSVPVIRHLFAPLKEYFACVSSGNSNANSRGPSFSSGLVPLSLRGSHMGPMEIYKTVSAWKRQPVRVLSLFRNIDKVLKSLGFLESGSGSGGGTLKYVEDVTNVVRRDVEKWGPFDLVYGSTQPLGSSCDRCPGWYMFQFHRILQYALPRQESQRPFFWIFMDNLLLTEDDQETTTRFLQTEAVTLQDVRGRDYQNAMRVWSNIPGLKSKHAPLTPKEEEYLQAQVRSRSKLDAPKVDLLVKNCLLPLREYFKYFSQNSLPLASPAAPAPASPAAPAPSAPAASTPVTFEDVVVYFTAAEWVHLTNWQRDFYQAVMMETYELVASVAGDGVPMAEDEEGGVERPVWQYIPRGKRRRKTPQPRADIRAHGDQEIKRINKIRRRLVKDSNTKKAGKTGPMKTLLVRVMTPDLRERLENLRKKPENIPQPISNTSRANLNKLLTDYTEMKKAILHVYWEEFQKDPVGLMSRVAQPASKKIDQNKLKPEMDEKGNLTTAGFACSQCGQPLFVYKLEQVSEKGKAYTNYFGRCNVAEHEKLILLAQLKPEKDSDEAVTYSLGKFGQRALDFYSIHVTKESTHPVKPLAQIAGNRYASGPVGKALSDACMGTIASFLSKYQDIIIEHQKVVKGNQKRLESLRELAGKENLEYPSVTLPPQPHTKEGVDAYNEVIARVRMWVNLNLWQKLKLSRDDAKPLLRLKGFPSFPLVERQANEVDWWDMVCNVKKLINEKKEDGKVFWQNLAGYKRQEALRPYLSSEEDRKKGKKFARYQLGDLLLHLEKKHGEDWGKVYDEAWERIDKKVEGLSKHIKLEEERRSEDAQSKAALTDWLRAKASFVIEGLKEADKDEFCRCELKLQKWYGDLRGKPFAIEAENSILDISGFSKQYNCAFIWQKDGVKKLNLYLIINYFKGGKLRFKKIKPEAFEANRFYTVINKKSGEIVPMEVNFNFDDPNLIILPLAFGKRQGREFIWNDLLSLETGSLKLANGRVIEKTLYNRRTRQDEPALFVALTFERREVLDSSNIKPMNLIGVARGENIPAVIALTDPEGCPLSRFKDSLGNPTHILRIGESYKEKQRTIQAKKEVEQRRAGGYSRKYASKAKNLADDMVRNTARDLLYYAVTQDAMLIFANLSRGFGRQGKRTFMAERQYTRMEDWLTAKLAYEGLSKTYLSKTLAQYTSKTCSNCGFTITSADYDRVLEKLKKTATGWMTTINGKELKVEGQITYYNRYKRQNVVKDLSVELDRLSEESVNNDISSWTKGRSGEALSLLKKRFSHRPVQEKFVCLNCGFETHAAEQAALNIARSWLFLRSQEYKKYQTNKTTGNTDKRAFVETWQSFYRKKLKEVWKPAVRSGGSGGGSSTPVTFEDVVVYFTAAEWVHLTNWQRDFYQAVMMETYELVASVAGDGVPMAEDEEGGVERPVWQYIPRGKRRRKTPQPRADGSGSGSGPKKKRKV

SEQ ID NO: 1891 - protein, 72 aa, synthetic construct
MDAKSLTAWSRTLVTFKDVFVDFTREEWKLLDTAQQIVYRNVMLENYKNLVSLGYQLTKPDVILRLEKGEEP

SEQ ID NO: 1892 - protein, 100 aa, synthetic construct
MNNSQGRVTFEDVTVNFTQGEWQRLNPEQRNLYRDVMLENYSNLVSVGQGETTKPDVILRLEQGKEPWLEEEEVLGSGRAEKNGDIGGQIWKPKDVKESL

SEQ ID NO: 1893 - protein, 302 aa, synthetic construct
MNHDQEFDPPKVYPPVPAEKRKPIRVLSLFDGIATGLLVLKDLGIQVDRYIASEVCEDSITVGMVRHQGKIMYVGDVRSVTQKHIQEWGPFDLVIGGSPCNDLSIVNPARKGLYEGTGRLFFEFYRLLHDARPKEGDDRPFFWLFENVVAMGVSDKRDISRFLESNPVMIDAKEVSAAHRARYFWGNLPGMNRPLASTVNDKLELQECLEHGRIAKFSKVRTITTRSNSIKQGKDQHFPVFMNEKEDILWCTEMERVFGFPVHYTDVSNMSRLARQRLLGRSWSVPVIRHLFAPLKEYFACV

SEQ ID NO: 1894 - protein, 1765 aa, synthetic construct
MAPKKKRKVSRVNGSGSGGGMNHDQEFDPPKVYPPVPAEKRKPIRVLSLFDGIATGLLVLKDLGIQVDRYIASEVCEDSITVGMVRHQGKIMYVGDVRSVTQKHIQEWGPFDLVIGGSPCNDLSIVNPARKGLYEGTGRLFFEFYRLLHDARPKEGDDRPFFWLFENVVAMGVSDKRDISRFLESNPVMIDAKEVSAAHRARYFWGNLPGMNRPLASTVNDKLELQECLEHGRIAKFSKVRTITTRSNSIKQGKDQHFPVFMNEKEDILWCTEMERVFGFPVHYTDVSNMSRLARQRLLGRSWSVPVIRHLFAPLKEYFACVSSGNSNANSRGPSFSSGLVPLSLRGSHMGPMEIYKTVSAWKRQPVRVLSLFRNIDKVLKSLGFLESGSGSGGGTLKYVEDVTNVVRRDVEKWGPFDLVYGSTQPLGSSCDRCPGWYMFQFHRILQYALPRQESQRPFFWIFMDNLLLTEDDQETTTRFLQTEAVTLQDVRGRDYQNAMRVWSNIPGLKSKHAPLTPKEEEYLQAQVRSRSKLDAPKVDLLVKNCLLPLREYFKYFSQNSLPLGGPSSGAPPPSGGSPAGSPTSTEEGTSESATPESGPGTSTEPSEGSAPGSPAGSPTSTEEGTSTEPSEGSAPGTSTEPSEGGSGGGSAQEIKRINKIRRRLVKDSNTKKAGKTGPMKTLLVRVMTPDLRERLENLRKKPENIPQPISNTSRANLNKLLTDYTEMKKAILHVYWEEFQKDPVGLMSRVAQPASKKIDQNKLKPEMDEKGNLTTAGFACSQCGQPLFVYKLEQVSEKGKAYTNYFGRCNVAEHEKLILLAQLKPEKDSDEAVTYSLGKFGQRALDFYSIHVTKESTHPVKPLAQIAGNRYASGPVGKALSDACMGTIASFLSKYQDIIIEHQKVVKGNQKRLESLRELAGKENLEYPSVTLPPQPHTKEGVDAYNEVIARVRMWVNLNLWQKLKLSRDDAKPLLRLKGFPSFPLVERQANEVDWWDMVCNVKKLINEKKEDGKVFWQNLAGYKRQEALRPYLSSEEDRKKGKKFARYQLGDLLLHLEKKHGEDWGKVYDEAWERIDKKVEGLSKHIKLEEERRSEDAQSKAALTDWLRAKASFVIEGLKEADKDEFCRCELKLQKWYGDLRGKPFAIEAENSILDISGFSKQYNCAFIWQKDGVKKLNLYLIINYFKGGKLRFKKIKPEAFEANRFYTVINKKSGEIVPMEVNFNFDDPNLIILPLAFGKRQGREFIWNDLLSLETGSLKLANGRVIEKTLYNRRTRQDEPALFVALTFERREVLDSSNIKPMNLIGVARGENIPAVIALTDPEGCPLSRFKDSLGNPTHILRIGESYKEKQRTIQAKKEVEQRRAGGYSRKYASKAKNLADDMVRNTARDLLYYAVTQDAMLIFANLSRGFGRQGKRTFMAERQYTRMEDWLTAKLAYEGLSKTYLSKTLAQYTSKTCSNCGFTITSADYDRVLEKLKKTATGWMTTINGKELKVEGQITYYNRYKRQNVVKDLSVELDRLSEESVNNDISSWTKGRSGEALSLLKKRFSHRPVQEKFVCLNCGFETHAAEQAALNIARSWLFLRSQEYKKYQTNKTTGNTDKRAFVETWQSFYRKKLKEVWKPAVRSGGSGGGSTSMNNSQGRVTFEDVTVNFTQGEWQRLNPEQRNLYRDVMLENYSNLVSVGQGETTKPDVILRLEQGKEPWLEEEEVLGSGRAEKNGDIGGQIWKPKDVKESLTSPKKKRKVDYKDDDDKDYKDDDDK

SEQ ID NO: 1895 - protein, 1737 aa, synthetic construct
MAPKKKRKVSRVNGSGSGGGMNHDQEFDPPKVYPPVPAEKRKPIRVLSLFDGIATGLLVLKDLGIQVDRYIASEVCEDSITVGMVRHQGKIMYVGDVRSVTQKHIQEWGPFDLVIGGSPCNDLSIVNPARKGLYEGTGRLFFEFYRLLHDARPKEGDDRPFFWLFENVVAMGVSDKRDISRFLESNPVMIDAKEVSAAHRARYFWGNLPGMNRPLASTVNDKLELQECLEHGRIAKFSKVRTITTRSNSIKQGKDQHFPVFMNEKEDILWCTEMERVFGFPVHYTDVSNMSRLARQRLLGRSWSVPVIRHLFAPLKEYFACVSSGNSNANSRGPSFSSGLVPLSLRGSHMGPMEIYKTVSAWKRQPVRVLSLFRNIDKVLKSLGFLESGSGSGGGTLKYVEDVTNVVRRDVEKWGPFDLVYGSTQPLGSSCDRCPGWYMFQFHRILQYALPRQESQRPFFWIFMDNLLLTEDDQETTTRFLQTEAVTLQDVRGRDYQNAMRVWSNIPGLKSKHAPLTPKEEEYLQAQVRSRSKLDAPKVDLLVKNCLLPLREYFKYFSQNSLPLGGPSSGAPPPSGGSPAGSPTSTEEGTSESATPESGPGTSTEPSEGSAPGSPAGSPTSTEEGTSTEPSEGSAPGTSTEPSEGGSGGGSAQEIKRINKIRRRLVKDSNTKKAGKTGPMKTLLVRVMTPDLRERLENLRKKPENIPQPISNTSRANLNKLLTDYTEMKKAILHVYWEEFQKDPVGLMSRVAQPASKKIDQNKLKPEMDEKGNLTTAGFACSQCGQPLFVYKLEQVSEKGKAYTNYFGRCNVAEHEKLILLAQLKPEKDSDEAVTYSLGKFGQRALDFYSIHVTKESTHPVKPLAQIAGNRYASGPVGKALSDACMGTIASFLSKYQDIIIEHQKVVKGNQKRLESLRELAGKENLEYPSVTLPPQPHTKEGVDAYNEVIARVRMWVNLNLWQKLKLSRDDAKPLLRLKGFPSFPLVERQANEVDWWDMVCNVKKLINEKKEDGKVFWQNLAGYKRQEALRPYLSSEEDRKKGKKFARYQLGDLLLHLEKKHGEDWGKVYDEAWERIDKKVEGLSKHIKLEEERRSEDAQSKAALTDWLRAKASFVIEGLKEADKDEFCRCELKLQKWYGDLRGKPFAIEAENSILDISGFSKQYNCAFIWQKDGVKKLNLYLIINYFKGGKLRFKKIKPEAFEANRFYTVINKKSGEIVPMEVNFNFDDPNLIILPLAFGKRQGREFIWNDLLSLETGSLKLANGRVIEKTLYNRRTRQDEPALFVALTFERREVLDSSNIKPMNLIGVARGENIPAVIALTDPEGCPLSRFKDSLGNPTHILRIGESYKEKQRTIQAKKEVEQRRAGGYSRKYASKAKNLADDMVRNTARDLLYYAVTQDAMLIFANLSRGFGRQGKRTFMAERQYTRMEDWLTAKLAYEGLSKTYLSKTLAQYTSKTCSNCGFTITSADYDRVLEKLKKTATGWMTTINGKELKVEGQITYYNRYKRQNVVKDLSVELDRLSEESVNNDISSWTKGRSGEALSLLKKRFSHRPVQEKFVCLNCGFETHAAEQAALNIARSWLFLRSQEYKKYQTNKTTGNTDKRAFVETWQSFYRKKLKEVWKPAVRSGGSGGGSTSMDAKSLTAWSRTLVTFKDVFVDFTREEWKLLDTAQQIVYRNVMLENYKNLVSLGYQLTKPDVILRLEKGEEPTSPKKKRKVDYKDDDDKDYKDDDDK

SEQ ID NO: 1896 - protein, 1756 aa, synthetic construct
MAPKKKRKVSRGGSGGGSAQEIKRINKIRRRLVKDSNTKKAGKTGPMKTLLVRVMTPDLRERLENLRKKPENIPQPISNTSRANLNKLLTDYTEMKKAILHVYWEEFQKDPVGLMSRVAQPASKKIDQNKLKPEMDEKGNLTTAGFACSQCGQPLFVYKLEQVSEKGKAYTNYFGRCNVAEHEKLILLAQLKPEKDSDEAVTYSLGKFGQRALDFYSIHVTKESTHPVKPLAQIAGNRYASGPVGKALSDACMGTIASFLSKYQDIIIEHQKVVKGNQKRLESLRELAGKENLEYPSVTLPPQPHTKEGVDAYNEVIARVRMWVNLNLWQKLKLSRDDAKPLLRLKGFPSFPLVERQANEVDWWDMVCNVKKLINEKKEDGKVFWQNLAGYKRQEALRPYLSSEEDRKKGKKFARYQLGDLLLHLEKKHGEDWGKVYDEAWERIDKKVEGLSKHIKLEEERRSEDAQSKAALTDWLRAKASFVIEGLKEADKDEFCRCELKLQKWYGDLRGKPFAIEAENSILDISGFSKQYNCAFIWQKDGVKKLNLYLIINYFKGGKLRFKKIKPEAFEANRFYTVINKKSGEIVPMEVNFNFDDPNLIILPLAFGKRQGREFIWNDLLSLETGSLKLANGRVIEKTLYNRRTRQDEPALFVALTFERREVLDSSNIKPMNLIGVARGENIPAVIALTDPEGCPLSRFKDSLGNPTHILRIGESYKEKQRTIQAKKEVEQRRAGGYSRKYASKAKNLADDMVRNTARDLLYYAVTQDAMLIFANLSRGFGRQGKRTFMAERQYTRMEDWLTAKLAYEGLSKTYLSKTLAQYTSKTCSNCGFTITSADYDRVLEKLKKTATGWMTTINGKELKVEGQITYYNRYKRQNVVKDLSVELDRLSEESVNNDISSWTKGRSGEALSLLKKRFSHRPVQEKFVCLNCGFETHAAEQAALNIARSWLFLRSQEYKKYQTNKTTGNTDKRAFVETWQSFYRKKLKEVWKPAVRSGGSGGGSTSMNNSQGRVTFEDVTVNFTQGEWQRLNPEQRNLYRDVMLENYSNLVSVGQGETTKPDVILRLEQGKEPWLEEEEVLGSGRAEKNGDIGGQIWKPKDVKESLTSPKKKRKVDYKDDDDKDYKDDDDKGGPSSGAPPPSGGSPAGSPTSTEEGTSESATPESGPGTSTEPSEGSAPGSPAGSPTSTEEGTSTEPSEGSAPGTSTEPSEMNHDQEFDPPKVYPPVPAEKRKPIRVLSLFDGIATGLLVLKDLGIQVDRYIASEVCEDSITVGMVRHQGKIMYVGDVRSVTQKHIQEWGPFDLVIGGSPCNDLSIVNPARKGLYEGTGRLFFEFYRLLHDARPKEGDDRPFFWLFENVVAMGVSDKRDISRFLESNPVMIDAKEVSAAHRARYFWGNLPGMNRPLASTVNDKLELQECLEHGRIAKFSKVRTITTRSNSIKQGKDQHFPVFMNEKEDILWCTEMERVFGFPVHYTDVSNMSRLARQRLLGRSWSVPVIRHLFAPLKEYFACVSSGNSNANSRGPSFSSGLVPLSLRGSHMGPMEIYKTVSAWKRQPVRVLSLFRNIDKVLKSLGFLESGSGSGGGTLKYVEDVTNVVRRDVEKWGPFDLVYGSTQPLGSSCDRCPGWYMFQFHRILQYALPRQESQRPFFWIFMDNLLLTEDDQETTTRFLQTEAVTLQDVRGRDYQNAMRVWSNIPGLKSKHAPLTPKEEEYLQAQVRSRSKLDAPKVDLLVKNCLLPLREYFKYFSQNSLPL

SEQ ID NO: 1897 - protein, 1728 aa, synthetic construct
MAPKKKRKVSRGGSGGGSAQEIKRINKIRRRLVKDSNTKKAGKTGPMKTLLVRVMTPDLRERLENLRKKPENIPQPISNTSRANLNKLLTDYTEMKKAILHVYWEEFQKDPVGLMSRVAQPASKKIDQNKLKPEMDEKGNLTTAGFACSQCGQPLFVYKLEQVSEKGKAYTNYFGRCNVAEHEKLILLAQLKPEKDSDEAVTYSLGKFGQRALDFYSIHVTKESTHPVKPLAQIAGNRYASGPVGKALSDACMGTIASFLSKYQDIIIEHQKVVKGNQKRLESLRELAGKENLEYPSVTLPPQPHTKEGVDAYNEVIARVRMWVNLNLWQKLKLSRDDAKPLLRLKGFPSFPLVERQANEVDWWDMVCNVKKLINEKKEDGKVFWQNLAGYKRQEALRPYLSSEEDRKKGKKFARYQLGDLLLHLEKKHGEDWGKVYDEAWERIDKKVEGLSKHIKLEEERRSEDAQSKAALTDWLRAKASFVIEGLKEADKDEFCRCELKLQKWYGDLRGKPFAIEAENSILDISGFSKQYNCAFIWQKDGVKKLNLYLIINYFKGGKLRFKKIKPEAFEANRFYTVINKKSGEIVPMEVNFNFDDPNLIILPLAFGKRQGREFIWNDLLSLETGSLKLANGRVIEKTLYNRRTRQDEPALFVALTFERREVLDSSNIKPMNLIGVARGENIPAVIALTDPEGCPLSRFKDSLGNPTHILRIGESYKEKQRTIQAKKEVEQRRAGGYSRKYASKAKNLADDMVRNTARDLLYYAVTQDAMLIFANLSRGFGRQGKRTFMAERQYTRMEDWLTAKLAYEGLSKTYLSKTLAQYTSKTCSNCGFTITSADYDRVLEKLKKTATGWMTTINGKELKVEGQITYYNRYKRQNVVKDLSVELDRLSEESVNNDISSWTKGRSGEALSLLKKRFSHRPVQEKFVCLNCGFETHAAEQAALNIARSWLFLRSQEYKKYQTNKTTGNTDKRAFVETWQSFYRKKLKEVWKPAVRSGGSGGGSTSMDAKSLTAWSRTLVTFKDVFVDFTREEWKLLDTAQQIVYRNVMLENYKNLVSLGYQLTKPDVILRLEKGEEPTSPKKKRKVDYKDDDDKDYKDDDDKGGPSSGAPPPSGGSPAGSPTSTEEGTSESATPESGPGTSTEPSEGSAPGSPAGSPTSTEEGTSTEPSEGSAPGTSTEPSEMNHDQEFDPPKVYPPVPAEKRKPIRVLSLFDGIATGLLVLKDLGIQVDRYIASEVCEDSITVGMVRHQGKIMYVGDVRSVTQKHIQEWGPFDLVIGGSPCNDLSIVNPARKGLYEGTGRLFFEFYRLLHDARPKEGDDRPFFWLFENVVAMGVSDKRDISRFLESNPVMIDAKEVSAAHRARYFWGNLPGMNRPLASTVNDKLELQECLEHGRIAKFSKVRTITTRSNSIKQGKDQHFPVFMNEKEDILWCTEMERVFGFPVHYTDVSNMSRLARQRLLGRSWSVPVIRHLFAPLKEYFACVSSGNSNANSRGPSFSSGLVPLSLRGSHMGPMEIYKTVSAWKRQPVRVLSLFRNIDKVLKSLGFLESGSGSGGGTLKYVEDVTNVVRRDVEKWGPFDLVYGSTQPLGSSCDRCPGWYMFQFHRILQYALPRQESQRPFFWIFMDNLLLTEDDQETTTRFLQTEAVTLQDVRGRDYQNAMRVWSNIPGLKSKHAPLTPKEEEYLQAQVRSRSKLDAPKVDLLVKNCLLPLREYFKYFSQNSLPL

SEQ ID NO: 1898 - protein, 1756 aa, synthetic construct
MAPKKKRKVSRGGSGGGSAQEIKRINKIRRRLVKDSNTKKAGKTGPMKTLLVRVMTPDLRERLENLRKKPENIPQPISNTSRANLNKLLTDYTEMKKAILHVYWEEFQKDPVGLMSRVAQPASKKIDQNKLKPEMDEKGNLTTAGFACSQCGQPLFVYKLEQVSEKGKAYTNYFGRCNVAEHEKLILLAQLKPEKDSDEAVTYSLGKFGQRALDFYSIHVTKESTHPVKPLAQIAGNRYASGPVGKALSDACMGTIASFLSKYQDIIIEHQKVVKGNQKRLESLRELAGKENLEYPSVTLPPQPHTKEGVDAYNEVIARVRMWVNLNLWQKLKLSRDDAKPLLRLKGFPSFPLVERQANEVDWWDMVCNVKKLINEKKEDGKVFWQNLAGYKRQEALRPYLSSEEDRKKGKKFARYQLGDLLLHLEKKHGEDWGKVYDEAWERIDKKVEGLSKHIKLEEERRSEDAQSKAALTDWLRAKASFVIEGLKEADKDEFCRCELKLQKWYGDLRGKPFAIEAENSILDISGFSKQYNCAFIWQKDGVKKLNLYLIINYFKGGKLRFKKIKPEAFEANRFYTVINKKSGEIVPMEVNFNFDDPNLIILPLAFGKRQGREFIWNDLLSLETGSLKLANGRVIEKTLYNRRTRQDEPALFVALTFERREVLDSSNIKPMNLIGVARGENIPAVIALTDPEGCPLSRFKDSLGNPTHILRIGESYKEKQRTIQAKKEVEQRRAGGYSRKYASKAKNLADDMVRNTARDLLYYAVTQDAMLIFANLSRGFGRQGKRTFMAERQYTRMEDWLTAKLAYEGLSKTYLSKTLAQYTSKTCSNCGFTITSADYDRVLEKLKKTATGWMTTINGKELKVEGQITYYNRYKRQNVVKDLSVELDRLSEESVNNDISSWTKGRSGEALSLLKKRFSHRPVQEKFVCLNCGFETHAAEQAALNIARSWLFLRSQEYKKYQTNKTTGNTDKRAFVETWQSFYRKKLKEVWKPAVRSGGPSSGAPPPSGGSPAGSPTSTEEGTSESATPESGPGTSTEPSEGSAPGSPAGSPTSTEEGTSTEPSEGSAPGTSTEPSEMNHDQEFDPPKVYPPVPAEKRKPIRVLSLFDGIATGLLVLKDLGIQVDRYIASEVCEDSITVGMVRHQGKIMYVGDVRSVTQKHIQEWGPFDLVIGGSPCNDLSIVNPARKGLYEGTGRLFFEFYRLLHDARPKEGDDRPFFWLFENVVAMGVSDKRDISRFLESNPVMIDAKEVSAAHRARYFWGNLPGMNRPLASTVNDKLELQECLEHGRIAKFSKVRTITTRSNSIKQGKDQHFPVFMNEKEDILWCTEMERVFGFPVHYTDVSNMSRLARQRLLGRSWSVPVIRHLFAPLKEYFACVSSGNSNANSRGPSFSSGLVPLSLRGSHMGPMEIYKTVSAWKRQPVRVLSLFRNIDKVLKSLGFLESGSGSGGGTLKYVEDVTNVVRRDVEKWGPFDLVYGSTQPLGSSCDRCPGWYMFQFHRILQYALPRQESQRPFFWIFMDNLLLTEDDQETTTRFLQTEAVTLQDVRGRDYQNAMRVWSNIPGLKSKHAPLTPKEEEYLQAQVRSRSKLDAPKVDLLVKNCLLPLREYFKYFSQNSLPLGGSGGGSTSMNNSQGRVTFEDVTVNFTQGEWQRLNPEQRNLYRDVMLENYSNLVSVGQGETTKPDVILRLEQGKEPWLEEEEVLGSGRAEKNGDIGGQIWKPKDVKESLTSPKKKRKVDYKDDDDKDYKDDDDK

SEQ ID NO: 1899 - protein, 1728 aa, synthetic construct
MAPKKKRKVSRGGSGGGSAQEIKRINKIRRRLVKDSNTKKAGKTGPMKTLLVRVMTPDLRERLENLRKKPENIPQPISNTSRANLNKLLTDYTEMKKAILHVYWEEFQKDPVGLMSRVAQPASKKIDQNKLKPEMDEKGNLTTAGFACSQCGQPLFVYKLEQVSEKGKAYTNYFGRCNVAEHEKLILLAQLKPEKDSDEAVTYSLGKFGQRALDFYSIHVTKESTHPVKPLAQIAGNRYASGPVGKALSDACMGTIASFLSKYQDIIIEHQKVVKGNQKRLESLRELAGKENLEYPSVTLPPQPHTKEGVDAYNEVIARVRMWVNLNLWQKLKLSRDDAKPLLRLKGFPSFPLVERQANEVDWWDMVCNVKKLINEKKEDGKVFWQNLAGYKRQEALRPYLSSEEDRKKGKKFARYQLGDLLLHLEKKHGEDWGKVYDEAWERIDKKVEGLSKHIKLEEERRSEDAQSKAALTDWLRAKASFVIEGLKEADKDEFCRCELKLQKWYGDLRGKPFAIEAENSILDISGFSKQYNCAFIWQKDGVKKLNLYLIINYFKGGKLRFKKIKPEAFEANRFYTVINKKSGEIVPMEVNFNFDDPNLIILPLAFGKRQGREFIWNDLLSLETGSLKLANGRVIEKTLYNRRTRQDEPALFVALTFERREVLDSSNIKPMNLIGVARGENIPAVIALTDPEGCPLSRFKDSLGNPTHILRIGESYKEKQRTIQAKKEVEQRRAGGYSRKYASKAKNLADDMVRNTARDLLYYAVTQDAMLIFANLSRGFGRQGKRTFMAERQYTRMEDWLTAKLAYEGLSKTYLSKTLAQYTSKTCSNCGFTITSADYDRVLEKLKKTATGWMTTINGKELKVEGQITYYNRYKRQNVVKDLSVELDRLSEESVNNDISSWTKGRSGEALSLLKKRFSHRPVQEKFVCLNCGFETHAAEQAALNIARSWLFLRSQEYKKYQTNKTTGNTDKRAFVETWQSFYRKKLKEVWKPAVRSGGPSSGAPPPSGGSPAGSPTSTEEGTSESATPESGPGTSTEPSEGSAPGSPAGSPTSTEEGTSTEPSEGSAPGTSTEPSEMNHDQEFDPPKVYPPVPAEKRKPIRVLSLFDGIATGLLVLKDLGIQVDRYIASEVCEDSITVGMVRHQGKIMYVGDVRSVTQKHIQEWGPFDLVIGGSPCNDLSIVNPARKGLYEGTGRLFFEFYRLLHDARPKEGDDRPFFWLFENVVAMGVSDKRDISRFLESNPVMIDAKEVSAAHRARYFWGNLPGMNRPLASTVNDKLELQECLEHGRIAKFSKVRTITTRSNSIKQGKDQHFPVFMNEKEDILWCTEMERVFGFPVHYTDVSNMSRLARQRLLGRSWSVPVIRHLFAPLKEYFACVSSGNSNANSRGPSFSSGLVPLSLRGSHMGPMEIYKTVSAWKRQPVRVLSLFRNIDKVLKSLGFLESGSGSGGGTLKYVEDVTNVVRRDVEKWGPFDLVYGSTQPLGSSCDRCPGWYMFQFHRILQYALPRQESQRPFFWIFMDNLLLTEDDQETTTRFLQTEAVTLQDVRGRDYQNAMRVWSNIPGLKSKHAPLTPKEEEYLQAQVRSRSKLDAPKVDLLVKNCLLPLREYFKYFSQNSLPLGGSGGGSTSMDAKSLTAWSRTLVTFKDVFVDFTREEWKLLDTAQQIVYRNVMLENYKNLVSLGYQLTKPDVILRLEKGEEPTSPKKKRKVDYKDDDDKDYKDDDDK

SEQ ID NO: 1900 - protein, 1754 aa, synthetic construct
MAPKKKRKVSRMNNSQGRVTFEDVTVNFTQGEWQRLNPEQRNLYRDVMLENYSNLVSVGQGETTKPDVILRLEQGKEPWLEEEEVLGSGRAEKNGDIGGQIWKPKDVKESLGGSGGGSAMNHDQEFDPPKVYPPVPAEKRKPIRVLSLFDGIATGLLVLKDLGIQVDRYIASEVCEDSITVGMVRHQGKIMYVGDVRSVTQKHIQEWGPFDLVIGGSPCNDLSIVNPARKGLYEGTGRLFFEFYRLLHDARPKEGDDRPFFWLFENVVAMGVSDKRDISRFLESNPVMIDAKEVSAAHRARYFWGNLPGMNRPLASTVNDKLELQECLEHGRIAKFSKVRTITTRSNSIKQGKDQHFPVFMNEKEDILWCTEMERVFGFPVHYTDVSNMSRLARQRLLGRSWSVPVIRHLFAPLKEYFACVSSGNSNANSRGPSFSSGLVPLSLRGSHMGPMEIYKTVSAWKRQPVRVLSLFRNIDKVLKSLGFLESGSGSGGGTLKYVEDVTNVVRRDVEKWGPFDLVYGSTQPLGSSCDRCPGWYMFQFHRILQYALPRQESQRPFFWIFMDNLLLTEDDQETTTRFLQTEAVTLQDVRGRDYQNAMRVWSNIPGLKSKHAPLTPKEEEYLQAQVRSRSKLDAPKVDLLVKNCLLPLREYFKYFSQNSLPLGGPSSGAPPPSGGSPAGSPTSTEEGTSESATPESGPGTSTEPSEGSAPGSPAGSPTSTEEGTSTEPSEGSAPGTSTEPSEQEIKRINKIRRRLVKDSNTKKAGKTGPMKTLLVRVMTPDLRERLENLRKKPENIPQPISNTSRANLNKLLTDYTEMKKAILHVYWEEFQKDPVGLMSRVAQPASKKIDQNKLKPEMDEKGNLTTAGFACSQCGQPLFVYKLEQVSEKGKAYTNYFGRCNVAEHEKLILLAQLKPEKDSDEAVTYSLGKFGQRALDFYSIHVTKESTHPVKPLAQIAGNRYASGPVGKALSDACMGTIASFLSKYQDIIIEHQKVVKGNQKRLESLRELAGKENLEYPSVTLPPQPHTKEGVDAYNEVIARVRMWVNLNLWQKLKLSRDDAKPLLRLKGFPSFPLVERQANEVDWWDMVCNVKKLINEKKEDGKVFWQNLAGYKRQEALRPYLSSEEDRKKGKKFARYQLGDLLLHLEKKHGEDWGKVYDEAWERIDKKVEGLSKHIKLEEERRSEDAQSKAALTDWLRAKASFVIEGLKEADKDEFCRCELKLQKWYGDLRGKPFAIEAENSILDISGFSKQYNCAFIWQKDGVKKLNLYLIINYFKGGKLRFKKIKPEAFEANRFYTVINKKSGEIVPMEVNFNFDDPNLIILPLAFGKRQGREFIWNDLLSLETGSLKLANGRVIEKTLYNRRTRQDEPALFVALTFERREVLDSSNIKPMNLIGVARGENIPAVIALTDPEGCPLSRFKDSLGNPTHILRIGESYKEKQRTIQAKKEVEQRRAGGYSRKYASKAKNLADDMVRNTARDLLYYAVTQDAMLIFANLSRGFGRQGKRTFMAERQYTRMEDWLTAKLAYEGLSKTYLSKTLAQYTSKTCSNCGFTITSADYDRVLEKLKKTATGWMTTINGKELKVEGQITYYNRYKRQNVVKDLSVELDRLSEESVNNDISSWTKGRSGEALSLLKKRFSHRPVQEKFVCLNCGFETHAAEQAALNIARSWLFLRSQEYKKYQTNKTTGNTDKRAFVETWQSFYRKKLKEVWKPAVRSGGSGGGSTSPKKKRKVDYKDDDDKDYKDDDDK

SEQ ID NO: 1901 - protein, 1726 aa, synthetic construct
MAPKKKRKVSRMDAKSLTAWSRTLVTFKDVFVDFTREEWKLLDTAQQIVYRNVMLENYKNLVSLGYQLTKPDVILRLEKGEEPGGSGGGSAMNHDQEFDPPKVYPPVPAEKRKPIRVLSLFDGIATGLLVLKDLGIQVDRYIASEVCEDSITVGMVRHQGKIMYVGDVRSVTQKHIQEWGPFDLVIGGSPCNDLSIVNPARKGLYEGTGRLFFEFYRLLHDARPKEGDDRPFFWLFENVVAMGVSDKRDISRFLESNPVMIDAKEVSAAHRARYFWGNLPGMNRPLASTVNDKLELQECLEHGRIAKFSKVRTITTRSNSIKQGKDQHFPVFMNEKEDILWCTEMERVFGFPVHYTDVSNMSRLARQRLLGRSWSVPVIRHLFAPLKEYFACVSSGNSNANSRGPSFSSGLVPLSLRGSHMGPMEIYKTVSAWKRQPVRVLSLFRNIDKVLKSLGFLESGSGSGGGTLKYVEDVTNVVRRDVEKWGPFDLVYGSTQPLGSSCDRCPGWYMFQFHRILQYALPRQESQRPFFWIFMDNLLLTEDDQETTTRFLQTEAVTLQDVRGRDYQNAMRVWSNIPGLKSKHAPLTPKEEEYLQAQVRSRSKLDAPKVDLLVKNCLLPLREYFKYFSQNSLPLGGPSSGAPPPSGGSPAGSPTSTEEGTSESATPESGPGTSTEPSEGSAPGSPAGSPTSTEEGTSTEPSEGSAPGTSTEPSEQEIKRINKIRRRLVKDSNTKKAGKTGPMKTLLVRVMTPDLRERLENLRKKPENIPQPISNTSRANLNKLLTDYTEMKKAILHVYWEEFQKDPVGLMSRVAQPASKKIDQNKLKPEMDEKGNLTTAGFACSQCGQPLFVYKLEQVSEKGKAYTNYFGRCNVAEHEKLILLAQLKPEKDSDEAVTYSLGKFGQRALDFYSIHVTKESTHPVKPLAQIAGNRYASGPVGKALSDACMGTIASFLSKYQDIIIEHQKVVKGNQKRLESLRELAGKENLEYPSVTLPPQPHTKEGVDAYNEVIARVRMWVNLNLWQKLKLSRDDAKPLLRLKGFPSFPLVERQANEVDWWDMVCNVKKLINEKKEDGKVFWQNLAGYKRQEALRPYLSSEEDRKKGKKFARYQLGDLLLHLEKKHGEDWGKVYDEAWERIDKKVEGLSKHIKLEEERRSEDAQSKAALTDWLRAKASFVIEGLKEADKDEFCRCELKLQKWYGDLRGKPFAIEAENSILDISGFSKQYNCAFIWQKDGVKKLNLYLIINYFKGGKLRFKKIKPEAFEANRFYTVINKKSGEIVPMEVNFNFDDPNLIILPLAFGKRQGREFIWNDLLSLETGSLKLANGRVIEKTLYNRRTRQDEPALFVALTFERREVLDSSNIKPMNLIGVARGENIPAVIALTDPEGCPLSRFKDSLGNPTHILRIGESYKEKQRTIQAKKEVEQRRAGGYSRKYASKAKNLADDMVRNTARDLLYYAVTQDAMLIFANLSRGFGRQGKRTFMAERQYTRMEDWLTAKLAYEGLSKTYLSKTLAQYTSKTCSNCGFTITSADYDRVLEKLKKTATGWMTTINGKELKVEGQITYYNRYKRQNVVKDLSVELDRLSEESVNNDISSWTKGRSGEALSLLKKRFSHRPVQEKFVCLNCGFETHAAEQAALNIARSWLFLRSQEYKKYQTNKTTGNTDKRAFVETWQSFYRKKLKEVWKPAVRSGGSGGGSTSPKKKRKVDYKDDDDKDYKDDDDK

SEQ ID NO: 1902 - protein, 1752 aa, synthetic construct
MAPKKKRKVSRMNHDQEFDPPKVYPPVPAEKRKPIRVLSLFDGIATGLLVLKDLGIQVDRYIASEVCEDSITVGMVRHQGKIMYVGDVRSVTQKHIQEWGPFDLVIGGSPCNDLSIVNPARKGLYEGTGRLFFEFYRLLHDARPKEGDDRPFFWLFENVVAMGVSDKRDISRFLESNPVMIDAKEVSAAHRARYFWGNLPGMNRPLASTVNDKLELQECLEHGRIAKFSKVRTITTRSNSIKQGKDQHFPVFMNEKEDILWCTEMERVFGFPVHYTDVSNMSRLARQRLLGRSWSVPVIRHLFAPLKEYFACVSSGNSNANSRGPSFSSGLVPLSLRGSHMGPMEIYKTVSAWKRQPVRVLSLFRNIDKVLKSLGFLESGSGSGGGTLKYVEDVTNVVRRDVEKWGPFDLVYGSTQPLGSSCDRCPGWYMFQFHRILQYALPRQESQRPFFWIFMDNLLLTEDDQETTTRFLQTEAVTLQDVRGRDYQNAMRVWSNIPGLKSKHAPLTPKEEEYLQAQVRSRSKLDAPKVDLLVKNCLLPLREYFKYFSQNSLPLGGSGGGMNNSQGRVTFEDVTVNFTQGEWQRLNPEQRNLYRDVMLENYSNLVSVGQGETTKPDVILRLEQGKEPWLEEEEVLGSGRAEKNGDIGGQIWKPKDVKESLGGPSSGAPPPSGGSPAGSPTSTEEGTSESATPESGPGTSTEPSEGSAPGSPAGSPTSTEEGTSTEPSEGSAPGTSTEPSEQEIKRINKIRRRLVKDSNTKKAGKTGPMKTLLVRVMTPDLRERLENLRKKPENIPQPISNTSRANLNKLLTDYTEMKKAILHVYWEEFQKDPVGLMSRVAQPASKKIDQNKLKPEMDEKGNLTTAGFACSQCGQPLFVYKLEQVSEKGKAYTNYFGRCNVAEHEKLILLAQLKPEKDSDEAVTYSLGKFGQRALDFYSIHVTKESTHPVKPLAQIAGNRYASGPVGKALSDACMGTIASFLSKYQDIIIEHQKVVKGNQKRLESLRELAGKENLEYPSVTLPPQPHTKEGVDAYNEVIARVRMWVNLNLWQKLKLSRDDAKPLLRLKGFPSFPLVERQANEVDWWDMVCNVKKLINEKKEDGKVFWQNLAGYKRQEALRPYLSSEEDRKKGKKFARYQLGDLLLHLEKKHGEDWGKVYDEAWERIDKKVEGLSKHIKLEEERRSEDAQSKAALTDWLRAKASFVIEGLKEADKDEFCRCELKLQKWYGDLRGKPFAIEAENSILDISGFSKQYNCAFIWQKDGVKKLNLYLIINYFKGGKLRFKKIKPEAFEANRFYTVINKKSGEIVPMEVNFNFDDPNLIILPLAFGKRQGREFIWNDLLSLETGSLKLANGRVIEKTLYNRRTRQDEPALFVALTFERREVLDSSNIKPMNLIGVARGENIPAVIALTDPEGCPLSRFKDSLGNPTHILRIGESYKEKQRTIQAKKEVEQRRAGGYSRKYASKAKNLADDMVRNTARDLLYYAVTQDAMLIFANLSRGFGRQGKRTFMAERQYTRMEDWLTAKLAYEGLSKTYLSKTLAQYTSKTCSNCGFTITSADYDRVLEKLKKTATGWMTTINGKELKVEGQITYYNRYKRQNVVKDLSVELDRLSEESVNNDISSWTKGRSGEALSLLKKRFSHRPVQEKFVCLNCGFETHAAEQAALNIARSWLFLRSQEYKKYQTNKTTGNTDKRAFVETWQSFYRKKLKEVWKPAVRSGGSGGGSTSPKKKRKVDYKDDDDKDYKDDDDK

SEQ ID NO: 1903 - protein, 1724 aa, synthetic construct
MAPKKKRKVSRMNHDQEFDPPKVYPPVPAEKRKPIRVLSLFDGIATGLLVLKDLGIQVDRYIASEVCEDSITVGMVRHQGKIMYVGDVRSVTQKHIQEWGPFDLVIGGSPCNDLSIVNPARKGLYEGTGRLFFEFYRLLHDARPKEGDDRPFFWLFENVVAMGVSDKRDISRFLESNPVMIDAKEVSAAHRARYFWGNLPGMNRPLASTVNDKLELQECLEHGRIAKFSKVRTITTRSNSIKQGKDQHFPVFMNEKEDILWCTEMERVFGFPVHYTDVSNMSRLARQRLLGRSWSVPVIRHLFAPLKEYFACVSSGNSNANSRGPSFSSGLVPLSLRGSHMGPMEIYKTVSAWKRQPVRVLSLFRNIDKVLKSLGFLESGSGSGGGTLKYVEDVTNVVRRDVEKWGPFDLVYGSTQPLGSSCDRCPGWYMFQFHRILQYALPRQESQRPFFWIFMDNLLLTEDDQETTTRFLQTEAVTLQDVRGRDYQNAMRVWSNIPGLKSKHAPLTPKEEEYLQAQVRSRSKLDAPKVDLLVKNCLLPLREYFKYFSQNSLPLGGSGGGMDAKSLTAWSRTLVTFKDVFVDFTREEWKLLDTAQQIVYRNVMLENYKNLVSLGYQLTKPDVILRLEKGEEPGGPSSGAPPPSGGSPAGSPTSTEEGTSESATPESGPGTSTEPSEGSAPGSPAGSPTSTEEGTSTEPSEGSAPGTSTEPSEQEIKRINKIRRRLVKDSNTKKAGKTGPMKTLLVRVMTPDLRERLENLRKKPENIPQPISNTSRANLNKLLTDYTEMKKAILHVYWEEFQKDPVGLMSRVAQPASKKIDQNKLKPEMDEKGNLTTAGFACSQCGQPLFVYKLEQVSEKGKAYTNYFGRCNVAEHEKLILLAQLKPEKDSDEAVTYSLGKFGQRALDFYSIHVTKESTHPVKPLAQIAGNRYASGPVGKALSDACMGTIASFLSKYQDIIIEHQKVVKGNQKRLESLRELAGKENLEYPSVTLPPQPHTKEGVDAYNEVIARVRMWVNLNLWQKLKLSRDDAKPLLRLKGFPSFPLVERQANEVDWWDMVCNVKKLINEKKEDGKVFWQNLAGYKRQEALRPYLSSEEDRKKGKKFARYQLGDLLLHLEKKHGEDWGKVYDEAWERIDKKVEGLSKHIKLEEERRSEDAQSKAALTDWLRAKASFVIEGLKEADKDEFCRCELKLQKWYGDLRGKPFAIEAENSILDISGFSKQYNCAFIWQKDGVKKLNLYLIINYFKGGKLRFKKIKPEAFEANRFYTVINKKSGEIVPMEVNFNFDDPNLIILPLAFGKRQGREFIWNDLLSLETGSLKLANGRVIEKTLYNRRTRQDEPALFVALTFERREVLDSSNIKPMNLIGVARGENIPAVIALTDPEGCPLSRFKDSLGNPTHILRIGESYKEKQRTIQAKKEVEQRRAGGYSRKYASKAKNLADDMVRNTARDLLYYAVTQDAMLIFANLSRGFGRQGKRTFMAERQYTRMEDWLTAKLAYEGLSKTYLSKTLAQYTSKTCSNCGFTITSADYDRVLEKLKKTATGWMTTINGKELKVEGQITYYNRYKRQNVVKDLSVELDRLSEESVNNDISSWTKGRSGEALSLLKKRFSHRPVQEKFVCLNCGFETHAAEQAALNIARSWLFLRSQEYKKYQTNKTTGNTDKRAFVETWQSFYRKKLKEVWKPAVRSGGSGGGSTSPKKKRKVDYKDDDDKDYKDDDDK

SEQ ID NO: 1904 - RNA, 20 nt, synthetic construct
  source 1..20: mol_type = other RNA
ggccgagatgtctcgctccg

SEQ ID NO: 1905 - RNA, 20 nt, synthetic construct
  source 1..20: mol_type = other RNA
cgcgagcacagctaaggcca

SEQ ID NO: 1906 - RNA, 20 nt, synthetic construct
  source 1..20: mol_type = other RNA
cgagacgtaattacgtctcg

SEQ ID NO: 1907 - protein, 161 aa, synthetic construct
TKAADDEPEYEDGRGFGIGELVWGKLRGFSWWPGRIVSWWMTGRSRAAEGTRWVMWFGDGKFSVVCVEKLMPLSSFCSAFHQATYNKQPMYRKAIYEVLQVASSRAGKLFPACHDSDESDSGKAVEVQNKQMIEWALGGFQPSGPKGLEPPEEEKNPYKEV

SEQ ID NO: 1908 - protein, 41 aa, synthetic construct
YTDMWVEPEAAAYAPPPPAKKPRKSTTEKPKVKEIIDERTR

SEQ ID NO: 1909 - protein, 1736 aa, synthetic construct
MAPKKKRKVSRMNHDQEFDPPKVYPPVPAEKRKPIRVLSLFDGIATGLLVLKDLGIQVDRYIASEVCEDSITVGMVRHQGKIMYVGDVRSVTQKHIQEWGPFDLVIGGSPCNDLSIVNPARKGLYEGTGRLFFEFYRLLHDARPKEGDDRPFFWLFENVVAMGVSDKRDISRFLESNPVMIDAKEVSAAHRARYFWGNLPGMNRPLASTVNDKLELQECLEHGRIAKFSKVRTITTRSNSIKQGKDQHFPVFMNEKEDILWCTEMERVFGFPVHYTDVSNMSRLARQRLLGRSWSVPVIRHLFAPLKEYFACVSSGNSNANSRGPSFSSGLVPLSLRGSHMGPMEIYKTVSAWKRQPVRVLSLFRNIDKVLKSLGFLESGSGSGGGTLKYVEDVTNVVRRDVEKWGPFDLVYGSTQPLGSSCDRCPGWYMFQFHRILQYALPRQESQRPFFWIFMDNLLLTEDDQETTTRFLQTEAVTLQDVRGRDYQNAMRVWSNIPGLKSKHAPLTPKEEEYLQAQVRSRSKLDAPKVDLLVKNCLLPLREYFKYFSQNSLPLGGSGGGMNNSQGRVTFEDVTVNFTQGEWQRLNPEQRNLYRDVMLENYSNLVSVGQGETTKPDVILRLEQGKEPWLEEEEVLGSGRAEKNGDIGGQIWKPKDVKESLGGPSSGAPPPSGGSPAGSPTSTEEGTSESATPESGPGTSTEPSEGSAPGSPAGSPTSTEEGTSTEPSEGSAPGTSTEPSEQEIKRINKIRRRLVKDSNTKKAGKTGPMKTLLVRVMTPDLRERLENLRKKPENIPQPISNTSRANLNKLLTDYTEMKKAILHVYWEEFQKDPVGLMSRVAQPASKKIDQNKLKPEMDEKGNLTTAGFACSQCGQPLFVYKLEQVSEKGKAYTNYFGRCNVAEHEKLILLAQLKPEKDSDEAVTYSLGKFGQRALDFYSIHVTKESTHPVKPLAQIAGNRYASGPVGKALSDACMGTIASFLSKYQDIIIEHQKVVKGNQKRLESLRELAGKENLEYPSVTLPPQPHTKEGVDAYNEVIARVRMWVNLNLWQKLKLSRDDAKPLLRLKGFPSFPLVERQANEVDWWDMVCNVKKLINEKKEDGKVFWQNLAGYKRQEALRPYLSSEEDRKKGKKFARYQLGDLLLHLEKKHGEDWGKVYDEAWERIDKKVEGLSKHIKLEEERRSEDAQSKAALTDWLRAKASFVIEGLKEADKDEFCRCELKLQKWYGDLRGKPFAIEAENSILDISGFSKQYNCAFIWQKDGVKKLNLYLIINYFKGGKLRFKKIKPEAFEANRFYTVINKKSGEIVPMEVNFNFDDPNLIILPLAFGKRQGREFIWNDLLSLETGSLKLANGRVIEKTLYNRRTRQDEPALFVALTFERREVLDSSNIKPMNLIGVARGENIPAVIALTDPEGCPLSRFKDSLGNPTHILRIGESYKEKQRTIQAKKEVEQRRAGGYSRKYASKAKNLADDMVRNTARDLLYYAVTQDAMLIFANLSRGFGRQGKRTFMAERQYTRMEDWLTAKLAYEGLSKTYLSKTLAQYTSKTCSNCGFTITSADYDRVLEKLKKTATGWMTTINGKELKVEGQITYYNRYKRQNVVKDLSVELDRLSEESVNNDISSWTKGRSGEALSLLKKRFSHRPVQEKFVCLNCGFETHAAEQAALNIARSWLFLRSQEYKKYQTNKTTGNTDKRAFVETWQSFYRKKLKEVWKPAVRSGGSGGGSTSPKKKRKV

SEQ ID NO: 1910 - protein, 2073 aa, synthetic construct
MAPKKKRKVSRMTKAADDEPEYEDGRGFGIGELVWGKLRGFSWWPGRIVSWWMTGRSRAAEGTRWVMWFGDGKFSVVCVEKLMPLSSFCSAFHQATYNKQPMYRKAIYEVLQVASSRAGKLFPACHDSDESDSGKAVEVQNKQMIEWALGGFQPSGPKGLEPPEEEKNPYKEVYTDMWVEPEAAAYAPPPPAKKPRKSTTEKPKVKEIIDERTRERLVYEVRQKCRNIEDICISCGSLNVTLEHPLFIGGMCQNCKNCFLECAYQYDDDGYQSYCTICCGGREVLMCGNNNCCRCFCVECVDLLVGPGAAQAAIKEDPWNCYMCGHKGTYGLLRRREDWPSRLQMFFANNHDQEFDPPKVYPPVPAEKRKPIRVLSLFDGIATGLLVLKDLGIQVDRYIASEVCEDSITVGMVRHQGKIMYVGDVRSVTQKHIQEWGPFDLVIGGSPCNDLSIVNPARKGLYEGTGRLFFEFYRLLHDARPKEGDDRPFFWLFENVVAMGVSDKRDISRFLESNPVMIDAKEVSAAHRARYFWGNLPGMNRPLASTVNDKLELQECLEHGRIAKFSKVRTITTRSNSIKQGKDQHFPVFMNEKEDILWCTEMERVFGFPVHYTDVSNMSRLARQRLLGRSWSVPVIRHLFAPLKEYFACVSSGNSNANSRGPSFSSGLVPLSLRGSHMGPMEIYKTVSAWKRQPVRVLSLFRNIDKVLKSLGFLESGSGSGGGTLKYVEDVTNVVRRDVEKWGPFDLVYGSTQPLGSSCDRCPGWYMFQFHRILQYALPRQESQRPFFWIFMDNLLLTEDDQETTTRFLQTEAVTLQDVRGRDYQNAMRVWSNIPGLKSKHAPLTPKEEEYLQAQVRSRSKLDAPKVDLLVKNCLLPLREYFKYFSQNSLPLGGSGGGMNNSQGRVTFEDVTVNFTQGEWQRLNPEQRNLYRDVMLENYSNLVSVGQGETTKPDVILRLEQGKEPWLEEEEVLGSGRAEKNGDIGGQIWKPKDVKESLGGPSSGAPPPSGGSPAGSPTSTEEGTSESATPESGPGTSTEPSEGSAPGSPAGSPTSTEEGTSTEPSEGSAPGTSTEPSEQEIKRINKIRRRLVKDSNTKKAGKTGPMKTLLVRVMTPDLRERLENLRKKPENIPQPISNTSRANLNKLLTDYTEMKKAILHVYWEEFQKDPVGLMSRVAQPASKKIDQNKLKPEMDEKGNLTTAGFACSQCGQPLFVYKLEQVSEKGKAYTNYFGRCNVAEHEKLILLAQLKPEKDSDEAVTYSLGKFGQRALDFYSIHVTKESTHPVKPLAQIAGNRYASGPVGKALSDACMGTIASFLSKYQDIIIEHQKVVKGNQKRLESLRELAGKENLEYPSVTLPPQPHTKEGVDAYNEVIARVRMWVNLNLWQKLKLSRDDAKPLLRLKGFPSFPLVERQANEVDWWDMVCNVKKLINEKKEDGKVFWQNLAGYKRQEALRPYLSSEEDRKKGKKFARYQLGDLLLHLEKKHGEDWGKVYDEAWERIDKKVEGLSKHIKLEEERRSEDAQSKAALTDWLRAKASFVIEGLKEADKDEFCRCELKLQKWYGDLRGKPFAIEAENSILDISGFSKQYNCAFIWQKDGVKKLNLYLIINYFKGGKLRFKKIKPEAFEANRFYTVINKKSGEIVPMEVNFNFDDPNLIILPLAFGKRQGREFIWNDLLSLETGSLKLANGRVIEKTLYNRRTRQDEPALFVALTFERREVLDSSNIKPMNLIGVARGENIPAVIALTDPEGCPLSRFKDSLGNPTHILRIGESYKEKQRTIQAKKEVEQRRAGGYSRKYASKAKNLADDMVRNTARDLLYYAVTQDAMLIFANLSRGFGRQGKRTFMAERQYTRMEDWLTAKLAYEGLSKTYLSKTLAQYTSKTCSNCGFTITSADYDRVLEKLKKTATGWMTTINGKELKVEGQITYYNRYKRQNVVKDLSVELDRLSEESVNNDISSWTKGRSGEALSLLKKRFSHRPVQEKFVCLNCGFETHAAEQAALNIARSWLFLRSQEYKKYQTNKTTGNTDKRAFVETWQSFYRKKLKEVWKPAVRSGGSGGGSTSPKKKRKV

SEQ ID NO: 1911 - protein, 1586 aa, synthetic construct
MAPKKKRKVSRMERLVYEVRQKCRNIEDICISCGSLNVTLEHPLFIGGMCQNCKNCFLECAYQYDDDGYQSYCTICCGGREVLMCGNNNCCRCFCVECVDLLVGPGAAQAAIKEDPWNCYMCGHKGTYGLLRRREDWPSRLQMFFANSSGNSNANSRGPSFSSGLVPLSLRGSHMGPMEIYKTVSAWKRQPVRVLSLFRNIDKVLKSLGFLESGSGSGGGTLKYVEDVTNVVRRDVEKWGPFDLVYGSTQPLGSSCDRCPGWYMFQFHRILQYALPRQESQRPFFWIFMDNLLLTEDDQETTTRFLQTEAVTLQDVRGRDYQNAMRVWSNIPGLKSKHAPLTPKEEEYLQAQVRSRSKLDAPKVDLLVKNCLLPLREYFKYFSQNSLPLGGSGGGMNNSQGRVTFEDVTVNFTQGEWQRLNPEQRNLYRDVMLENYSNLVSVGQGETTKPDVILRLEQGKEPWLEEEEVLGSGRAEKNGDIGGQIWKPKDVKESLGGPSSGAPPPSGGSPAGSPTSTEEGTSESATPESGPGTSTEPSEGSAPGSPAGSPTSTEEGTSTEPSEGSAPGTSTEPSEQEIKRINKIRRRLVKDSNTKKAGKTGPMKTLLVRVMTPDLRERLENLRKKPENIPQPISNTSRANLNKLLTDYTEMKKAILHVYWEEFQKDPVGLMSRVAQPASKKIDQNKLKPEMDEKGNLTTAGFACSQCGQPLFVYKLEQVSEKGKAYTNYFGRCNVAEHEKLILLAQLKPEKDSDEAVTYSLGKFGQRALDFYSIHVTKESTHPVKPLAQIAGNRYASGPVGKALSDACMGTIASFLSKYQDIIIEHQKVVKGNQKRLESLRELAGKENLEYPSVTLPPQPHTKEGVDAYNEVIARVRMWVNLNLWQKLKLSRDDAKPLLRLKGFPSFPLVERQANEVDWWDMVCNVKKLINEKKEDGKVFWQNLAGYKRQEALRPYLSSEEDRKKGKKFARYQLGDLLLHLEKKHGEDWGKVYDEAWERIDKKVEGLSKHIKLEEERRSEDAQSKAALTDWLRAKASFVIEGLKEADKDEFCRCELKLQKWYGDLRGKPFAIEAENSILDISGFSKQYNCAFIWQKDGVKKLNLYLIINYFKGGKLRFKKIKPEAFEANRFYTVINKKSGEIVPMEVNFNFDDPNLIILPLAFGKRQGREFIWNDLLSLETGSLKLANGRVIEKTLYNRRTRQDEPALFVALTFERREVLDSSNIKPMNLIGVARGENIPAVIALTDPEGCPLSRFKDSLGNPTHILRIGESYKEKQRTIQAKKEVEQRRAGGYSRKYASKAKNLADDMVRNTARDLLYYAVTQDAMLIFANLSRGFGRQGKRTFMAERQYTRMEDWLTAKLAYEGLSKTYLSKTLAQYTSKTCSNCGFTITSADYDRVLEKLKKTATGWMTTINGKELKVEGQITYYNRYKRQNVVKDLSVELDRLSEESVNNDISSWTKGRSGEALSLLKKRFSHRPVQEKFVCLNCGFETHAAEQAALNIARSWLFLRSQEYKKYQTNKTTGNTDKRAFVETWQSFYRKKLKEVWKPAVRSGGSGGGSTSPKKKRKVDYKDDDDKDYKDDDDK

SEQ ID NO: 1912 - protein, 1772 aa, synthetic construct
MAPKKKRKVSRMTKAADDEPEYEDGRGFGIGELVWGKLRGFSWWPGRIVSWWMTGRSRAAEGTRWVMWFGDGKFSVVCVEKLMPLSSFCSAFHQATYNKQPMYRKAIYEVLQVASSRAGKLFPACHDSDESDSGKAVEVQNKQMIEWALGGFQPSGPKGLEPPEEEKNPYKEVYTDMWVEPEAAAYAPPPPAKKPRKSTTEKPKVKEIIDERTRERLVYEVRQKCRNIEDICISCGSLNVTLEHPLFIGGMCQNCKNCFLECAYQYDDDGYQSYCTICCGGREVLMCGNNNCCRCFCVECVDLLVGPGAAQAAIKEDPWNCYMCGHKGTYGLLRRREDWPSRLQMFFANSSGNSNANSRGPSFSSGLVPLSLRGSHMGPMEIYKTVSAWKRQPVRVLSLFRNIDKVLKSLGFLESGSGSGGGTLKYVEDVTNVVRRDVEKWGPFDLVYGSTQPLGSSCDRCPGWYMFQFHRILQYALPRQESQRPFFWIFMDNLLLTEDDQETTTRFLQTEAVTLQDVRGRDYQNAMRVWSNIPGLKSKHAPLTPKEEEYLQAQVRSRSKLDAPKVDLLVKNCLLPLREYFKYFSQNSLPLGGSGGGMNNSQGRVTFEDVTVNFTQGEWQRLNPEQRNLYRDVMLENYSNLVSVGQGETTKPDVILRLEQGKEPWLEEEEVLGSGRAEKNGDIGGQIWKPKDVKESLGGPSSGAPPPSGGSPAGSPTSTEEGTSESATPESGPGTSTEPSEGSAPGSPAGSPTSTEEGTSTEPSEGSAPGTSTEPSEQEIKRINKIRRRLVKDSNTKKAGKTGPMKTLLVRVMTPDLRERLENLRKKPENIPQPISNTSRANLNKLLTDYTEMKKAILHVYWEEFQKDPVGLMSRVAQPASKKIDQNKLKPEMDEKGNLTTAGFACSQCGQPLFVYKLEQVSEKGKAYTNYFGRCNVAEHEKLILLAQLKPEKDSDEAVTYSLGKFGQRALDFYSIHVTKESTHPVKPLAQIAGNRYASGPVGKALSDACMGTIASFLSKYQDIIIEHQKVVKGNQKRLESLRELAGKENLEYPSVTLPPQPHTKEGVDAYNEVIARVRMWVNLNLWQKLKLSRDDAKPLLRLKGFPSFPLVERQANEVDWWDMVCNVKKLINEKKEDGKVFWQNLAGYKRQEALRPYLSSEEDRKKGKKFARYQLGDLLLHLEKKHGEDWGKVYDEAWERIDKKVEGLSKHIKLEEERRSEDAQSKAALTDWLRAKASFVIEGLKEADKDEFCRCELKLQKWYGDLRGKPFAIEAENSILDISGFSKQYNCAFIWQKDGVKKLNLYLIINYFKGGKLRFKKIKPEAFEANRFYTVINKKSGEIVPMEVNFNFDDPNLIILPLAFGKRQGREFIWNDLLSLETGSLKLANGRVIEKTLYNRRTRQDEPALFVALTFERREVLDSSNIKPMNLIGVARGENIPAVIALTDPEGCPLSRFKDSLGNPTHILRIGESYKEKQRTIQAKKEVEQRRAGGYSRKYASKAKNLADDMVRNTARDLLYYAVTQDAMLIFANLSRGFGRQGKRTFMAERQYTRMEDWLTAKLAYEGLSKTYLSKTLAQYTSKTCSNCGFTITSADYDRVLEKLKKTATGWMTTINGKELKVEGQITYYNRYKRQNVVKDLSVELDRLSEESVNNDISSWTKGRSGEALSLLKKRFSHRPVQEKFVCLNCGFETHAAEQAALNIARSWLFLRSQEYKKYQTNKTTGNTDKRAFVETWQSFYRKKLKEVWKPAVRSGGSGGGSTSPKKKRKV

SEQ ID NO: 1913 - RNA, 20 nt, synthetic construct
  source 1..20: mol_type = other RNA
taaacatcacgagactctaa

SEQ ID NO: 1914 - RNA, 20 nt, synthetic construct
  source 1..20: mol_type = other RNA
tccctatgtccttgctgttt

SEQ ID NO: 1915 - protein, 1847 aa, synthetic construct
MAPKKKRKVSRMERLVYEVRQKCRNIEDICISCGSLNVTLEHPLFIGGMCQNCKNCFLECAYQYDDDGYQSYCTICCGGREVLMCGNNNCCRCFCVECVDLLVGPGAAQAAIKEDPWNCYMCGHKGTYGLLRRREDWPSRLQMFFANNHDQEFDPPKVYPPVPAEKRKPIRVLSLFDGIATGLLVLKDLGIQVDRYIASEVCEDSITVGMVRHQGKIMYVGDVRSVTQKHIQEWGPFDLVIGGSPCNDLSIVNPARKGLYEGTGRLFFEFYRLLHDARPKEGDDRPFFWLFENVVAMGVSDKRDISRFLESNPVMIDAKEVSAAHRARYFWGNLPGMNRPLASTVNDKLELQECLEHGRIAKFSKVRTITTRSNSIKQGKDQHFPVFMNEKEDILWCTEMERVFGFPVHYTDVSNMSRLARQRLLGRSWSVPVIRHLFAPLKEYFACVSSGNSNANSRGPSFSSGLVPLSLRGSHMGPMEIYKTVSAWKRQPVRVLSLFRNIDKVLKSLGFLESGSGSGGGTLKYVEDVTNVVRRDVEKWGPFDLVYGSTQPLGSSCDRCPGWYMFQFHRILQYALPRQESQRPFFWIFMDNLLLTEDDQETTTRFLQTEAVTLQDVRGRDYQNAMRVWSNIPGLKSKHAPLTPKEEEYLQAQVRSRSKLDAPKVDLLVKNCLLPLREYFKYFSQNSLPLGGPSSGAPPPSGGSPAGSPTSTEEGTSESATPESGPGTSTEPSEGSAPGSPAGSPTSTEEGTSTEPSEGSAPGTSTEPSEGGSGGGSAQEIKRINKIRRRLVKDSNTKKAGKTGPMKTLLVRVMTPDLRERLENLRKKPENIPQPISNTSRANLNKLLTDYTEMKKAILHVYWEEFQKDPVGLMSRVAQPASKKIDQNKLKPEMDEKGNLTTAGFACSQCGQPLFVYKLEQVSEKGKAYTNYFGRCNVAEHEKLILLAQLKPEKDSDEAVTYSLGKFGQRALDFYSIHVTKESTHPVKPLAQIAGNRYASGPVGKALSDACMGTIASFLSKYQDIIIEHQKVVKGNQKRLESLRELAGKENLEYPSVTLPPQPHTKEGVDAYNEVIARVRMWVNLNLWQKLKLSRDDAKPLLRLKGFPSFPLVERQANEVDWWDMVCNVKKLINEKKEDGKVFWQNLAGYKRQEALRPYLSSEEDRKKGKKFARYQLGDLLLHLEKKHGEDWGKVYDEAWERIDKKVEGLSKHIKLEEERRSEDAQSKAALTDWLRAKASFVIEGLKEADKDEFCRCELKLQKWYGDLRGKPFAIEAENSILDISGFSKQYNCAFIWQKDGVKKLNLYLIINYFKGGKLRFKKIKPEAFEANRFYTVINKKSGEIVPMEVNFNFDDPNLIILPLAFGKRQGREFIWNDLLSLETGSLKLANGRVIEKTLYNRRTRQDEPALFVALTFERREVLDSSNIKPMNLIGVARGENIPAVIALTDPEGCPLSRFKDSLGNPTHILRIGESYKEKQRTIQAKKEVEQRRAGGYSRKYASKAKNLADDMVRNTARDLLYYAVTQDAMLIFANLSRGFGRQGKRTFMAERQYTRMEDWLTAKLAYEGLSKTYLSKTLAQYTSKTCSNCGFTITSADYDRVLEKLKKTATGWMTTINGKELKVEGQITYYNRYKRQNVVKDLSVELDRLSEESVNNDISSWTKGRSGEALSLLKKRFSHRPVQEKFVCLNCGFETHAAEQAALNIARSWLFLRSQEYKKYQTNKTTGNTDKRAFVETWQSFYRKKLKEVWKPAVRSGGSGGGSTSMDAKSLTAWSRTLVTFKDVFVDFTREEWKLLDTAQQIVYRNVMLENYKNLVSLGYQLTKPDVILRLEKGEEPTSPKKKRKV

SEQ ID NO: 1916 - protein, 1875 aa, synthetic construct
MAPKKKRKVSRMERLVYEVRQKCRNIEDICISCGSLNVTLEHPLFIGGMCQNCKNCFLECAYQYDDDGYQSYCTICCGGREVLMCGNNNCCRCFCVECVDLLVGPGAAQAAIKEDPWNCYMCGHKGTYGLLRRREDWPSRLQMFFANNHDQEFDPPKVYPPVPAEKRKPIRVLSLFDGIATGLLVLKDLGIQVDRYIASEVCEDSITVGMVRHQGKIMYVGDVRSVTQKHIQEWGPFDLVIGGSPCNDLSIVNPARKGLYEGTGRLFFEFYRLLHDARPKEGDDRPFFWLFENVVAMGVSDKRDISRFLESNPVMIDAKEVSAAHRARYFWGNLPGMNRPLASTVNDKLELQECLEHGRIAKFSKVRTITTRSNSIKQGKDQHFPVFMNEKEDILWCTEMERVFGFPVHYTDVSNMSRLARQRLLGRSWSVPVIRHLFAPLKEYFACVSSGNSNANSRGPSFSSGLVPLSLRGSHMGPMEIYKTVSAWKRQPVRVLSLFRNIDKVLKSLGFLESGSGSGGGTLKYVEDVTNVVRRDVEKWGPFDLVYGSTQPLGSSCDRCPGWYMFQFHRILQYALPRQESQRPFFWIFMDNLLLTEDDQETTTRFLQTEAVTLQDVRGRDYQNAMRVWSNIPGLKSKHAPLTPKEEEYLQAQVRSRSKLDAPKVDLLVKNCLLPLREYFKYFSQNSLPLGGPSSGAPPPSGGSPAGSPTSTEEGTSESATPESGPGTSTEPSEGSAPGSPAGSPTSTEEGTSTEPSEGSAPGTSTEPSEGGSGGGSAQEIKRINKIRRRLVKDSNTKKAGKTGPMKTLLVRVMTPDLRERLENLRKKPENIPQPISNTSRANLNKLLTDYTEMKKAILHVYWEEFQKDPVGLMSRVAQPASKKIDQNKLKPEMDEKGNLTTAGFACSQCGQPLFVYKLEQVSEKGKAYTNYFGRCNVAEHEKLILLAQLKPEKDSDEAVTYSLGKFGQRALDFYSIHVTKESTHPVKPLAQIAGNRYASGPVGKALSDACMGTIASFLSKYQDIIIEHQKVVKGNQKRLESLRELAGKENLEYPSVTLPPQPHTKEGVDAYNEVIARVRMWVNLNLWQKLKLSRDDAKPLLRLKGFPSFPLVERQANEVDWWDMVCNVKKLINEKKEDGKVFWQNLAGYKRQEALRPYLSSEEDRKKGKKFARYQLGDLLLHLEKKHGEDWGKVYDEAWERIDKKVEGLSKHIKLEEERRSEDAQSKAALTDWLRAKASFVIEGLKEADKDEFCRCELKLQKWYGDLRGKPFAIEAENSILDISGFSKQYNCAFIWQKDGVKKLNLYLIINYFKGGKLRFKKIKPEAFEANRFYTVINKKSGEIVPMEVNFNFDDPNLIILPLAFGKRQGREFIWNDLLSLETGSLKLANGRVIEKTLYNRRTRQDEPALFVALTFERREVLDSSNIKPMNLIGVARGENIPAVIALTDPEGCPLSRFKDSLGNPTHILRIGESYKEKQRTIQAKKEVEQRRAGGYSRKYASKAKNLADDMVRNTARDLLYYAVTQDAMLIFANLSRGFGRQGKRTFMAERQYTRMEDWLTAKLAYEGLSKTYLSKTLAQYTSKTCSNCGFTITSADYDRVLEKLKKTATGWMTTINGKELKVEGQITYYNRYKRQNVVKDLSVELDRLSEESVNNDISSWTKGRSGEALSLLKKRFSHRPVQEKFVCLNCGFETHAAEQAALNIARSWLFLRSQEYKKYQTNKTTGNTDKRAFVETWQSFYRKKLKEVWKPAVRSGGSGGGSTSMNNSQGRVTFEDVTVNFTQGEWQRLNPEQRNLYRDVMLENYSNLVSVGQGETTKPDVILRLEQGKEPWLEEEEVLGSGRAEKNGDIGGQIWKPKDVKESLTSPKKKRKV

SEQ ID NO: 1917 - protein, 1721 aa, synthetic construct
MAPKKKRKVSRVNGSGSGGGMNHDQEFDPPKVYPPVPAEKRKPIRVLSLFDGIATGLLVLKDLGIQVDRYIASEVCEDSITVGMVRHQGKIMYVGDVRSVTQKHIQEWGPFDLVIGGSPCNDLSIVNPARKGLYEGTGRLFFEFYRLLHDARPKEGDDRPFFWLFENVVAMGVSDKRDISRFLESNPVMIDAKEVSAAHRARYFWGNLPGMNRPLASTVNDKLELQECLEHGRIAKFSKVRTITTRSNSIKQGKDQHFPVFMNEKEDILWCTEMERVFGFPVHYTDVSNMSRLARQRLLGRSWSVPVIRHLFAPLKEYFACVSSGNSNANSRGPSFSSGLVPLSLRGSHMGPMEIYKTVSAWKRQPVRVLSLFRNIDKVLKSLGFLESGSGSGGGTLKYVEDVTNVVRRDVEKWGPFDLVYGSTQPLGSSCDRCPGWYMFQFHRILQYALPRQESQRPFFWIFMDNLLLTEDDQETTTRFLQTEAVTLQDVRGRDYQNAMRVWSNIPGLKSKHAPLTPKEEEYLQAQVRSRSKLDAPKVDLLVKNCLLPLREYFKYFSQNSLPLGGPSSGAPPPSGGSPAGSPTSTEEGTSESATPESGPGTSTEPSEGSAPGSPAGSPTSTEEGTSTEPSEGSAPGTSTEPSEGGSGGGSAQEIKRINKIRRRLVKDSNTKKAGKTGPMKTLLVRVMTPDLRERLENLRKKPENIPQPISNTSRANLNKLLTDYTEMKKAILHVYWEEFQKDPVGLMSRVAQPASKKIDQNKLKPEMDEKGNLTTAGFACSQCGQPLFVYKLEQVSEKGKAYTNYFGRCNVAEHEKLILLAQLKPEKDSDEAVTYSLGKFGQRALDFYSIHVTKESTHPVKPLAQIAGNRYASGPVGKALSDACMGTIASFLSKYQDIIIEHQKVVKGNQKRLESLRELAGKENLEYPSVTLPPQPHTKEGVDAYNEVIARVRMWVNLNLWQKLKLSRDDAKPLLRLKGFPSFPLVERQANEVDWWDMVCNVKKLINEKKEDGKVFWQNLAGYKRQEALRPYLSSEEDRKKGKKFARYQLGDLLLHLEKKHGEDWGKVYDEAWERIDKKVEGLSKHIKLEEERRSEDAQSKAALTDWLRAKASFVIEGLKEADKDEFCRCELKLQKWYGDLRGKPFAIEAENSILDISGFSKQYNCAFIWQKDGVKKLNLYLIINYFKGGKLRFKKIKPEAFEANRFYTVINKKSGEIVPMEVNFNFDDPNLIILPLAFGKRQGREFIWNDLLSLETGSLKLANGRVIEKTLYNRRTRQDEPALFVALTFERREVLDSSNIKPMNLIGVARGENIPAVIALTDPEGCPLSRFKDSLGNPTHILRIGESYKEKQRTIQAKKEVEQRRAGGYSRKYASKAKNLADDMVRNTARDLLYYAVTQDAMLIFANLSRGFGRQGKRTFMAERQYTRMEDWLTAKLAYEGLSKTYLSKTLAQYTSKTCSNCGFTITSADYDRVLEKLKKTATGWMTTINGKELKVEGQITYYNRYKRQNVVKDLSVELDRLSEESVNNDISSWTKGRSGEALSLLKKRFSHRPVQEKFVCLNCGFETHAAEQAALNIARSWLFLRSQEYKKYQTNKTTGNTDKRAFVETWQSFYRKKLKEVWKPAVRSGGSGGGSTSMDAKSLTAWSRTLVTFKDVFVDFTREEWKLLDTAQQIVYRNVMLENYKNLVSLGYQLTKPDVILRLEKGEEPTSPKKKRKV

SEQ ID NO: 1918 - protein, 1749 aa, synthetic construct
MAPKKKRKVSRVNGSGSGGGMNHDQEFDPPKVYPPVPAEKRKPIRVLSLFDGIATGLLVLKDLGIQVDRYIASEVCEDSITVGMVRHQGKIMYVGDVRSVTQKHIQEWGPFDLVIGGSPCNDLSIVNPARKGLYEGTGRLFFEFYRLLHDARPKEGDDRPFFWLFENVVAMGVSDKRDISRFLESNPVMIDAKEVSAAHRARYFWGNLPGMNRPLASTVNDKLELQECLEHGRIAKFSKVRTITTRSNSIKQGKDQHFPVFMNEKEDILWCTEMERVFGFPVHYTDVSNMSRLARQRLLGRSWSVPVIRHLFAPLKEYFACVSSGNSNANSRGPSFSSGLVPLSLRGSHMGPMEIYKTVSAWKRQPVRVLSLFRNIDKVLKSLGFLESGSGSGGGTLKYVEDVTNVVRRDVEKWGPFDLVYGSTQPLGSSCDRCPGWYMFQFHRILQYALPRQESQRPFFWIFMDNLLLTEDDQETTTRFLQTEAVTLQDVRGRDYQNAMRVWSNIPGLKSKHAPLTPKEEEYLQAQVRSRSKLDAPKVDLLVKNCLLPLREYFKYFSQNSLPLGGPSSGAPPPSGGSPAGSPTSTEEGTSESATPESGPGTSTEPSEGSAPGSPAGSPTSTEEGTSTEPSEGSAPGTSTEPSEGGSGGGSAQEIKRINKIRRRLVKDSNTKKAGKTGPMKTLLVRVMTPDLRERLENLRKKPENIPQPISNTSRANLNKLLTDYTEMKKAILHVYWEEFQKDPVGLMSRVAQPASKKIDQNKLKPEMDEKGNLTTAGFACSQCGQPLFVYKLEQVSEKGKAYTNYFGRCNVAEHEKLILLAQLKPEKDSDEAVTYSLGKFGQRALDFYSIHVTKESTHPVKPLAQIAGNRYASGPVGKALSDACMGTIASFLSKYQDIIIEHQKVVKGNQKRLESLRELAGKENLEYPSVTLPPQPHTKEGVDAYNEVIARVRMWVNLNLWQKLKLSRDDAKPLLRLKGFPSFPLVERQANEVDWWDMVCNVKKLINEKKEDGKVFWQNLAGYKRQEALRPYLSSEEDRKKGKKFARYQLGDLLLHLEKKHGEDWGKVYDEAWERIDKKVEGLSKHIKLEEERRSEDAQSKAALTDWLRAKASFVIEGLKEADKDEFCRCELKLQKWYGDLRGKPFAIEAENSILDISGFSKQYNCAFIWQKDGVKKLNLYLIINYFKGGKLRFKKIKPEAFEANRFYTVINKKSGEIVPMEVNFNFDDPNLIILPLAFGKRQGREFIWNDLLSLETGSLKLANGRVIEKTLYNRRTRQDEPALFVALTFERREVLDSSNIKPMNLIGVARGENIPAVIALTDPEGCPLSRFKDSLGNPTHILRIGESYKEKQRTIQAKKEVEQRRAGGYSRKYASKAKNLADDMVRNTARDLLYYAVTQDAMLIFANLSRGFGRQGKRTFMAERQYTRMEDWLTAKLAYEGLSKTYLSKTLAQYTSKTCSNCGFTITSADYDRVLEKLKKTATGWMTTINGKELKVEGQITYYNRYKRQNVVKDLSVELDRLSEESVNNDISSWTKGRSGEALSLLKKRFSHRPVQEKFVCLNCGFETHAAEQAALNIARSWLFLRSQEYKKYQTNKTTGNTDKRAFVETWQSFYRKKLKEVWKPAVRSGGSGGGSTSMNNSQGRVTFEDVTVNFTQGEWQRLNPEQRNLYRDVMLENYSNLVSVGQGETTKPDVILRLEQGKEPWLEEEEVLGSGRAEKNGDIGGQIWKPKDVKESLTSPKKKRKV

SEQ ID NO: 1919 - protein, 1845 aa, synthetic construct
MAPKKKRKVSRMDAKSLTAWSRTLVTFKDVFVDFTREEWKLLDTAQQIVYRNVMLENYKNLVSLGYQLTKPDVILRLEKGEEPGGSGGGSAMERLVYEVRQKCRNIEDICISCGSLNVTLEHPLFIGGMCQNCKNCFLECAYQYDDDGYQSYCTICCGGREVLMCGNNNCCRCFCVECVDLLVGPGAAQAAIKEDPWNCYMCGHKGTYGLLRRREDWPSRLQMFFANNHDQEFDPPKVYPPVPAEKRKPIRVLSLFDGIATGLLVLKDLGIQVDRYIASEVCEDSITVGMVRHQGKIMYVGDVRSVTQKHIQEWGPFDLVIGGSPCNDLSIVNPARKGLYEGTGRLFFEFYRLLHDARPKEGDDRPFFWLFENVVAMGVSDKRDISRFLESNPVMIDAKEVSAAHRARYFWGNLPGMNRPLASTVNDKLELQECLEHGRIAKFSKVRTITTRSNSIKQGKDQHFPVFMNEKEDILWCTEMERVFGFPVHYTDVSNMSRLARQRLLGRSWSVPVIRHLFAPLKEYFACVSSGNSNANSRGPSFSSGLVPLSLRGSHMGPMEIYKTVSAWKRQPVRVLSLFRNIDKVLKSLGFLESGSGSGGGTLKYVEDVTNVVRRDVEKWGPFDLVYGSTQPLGSSCDRCPGWYMFQFHRILQYALPRQESQRPFFWIFMDNLLLTEDDQETTTRFLQTEAVTLQDVRGRDYQNAMRVWSNIPGLKSKHAPLTPKEEEYLQAQVRSRSKLDAPKVDLLVKNCLLPLREYFKYFSQNSLPLGGPSSGAPPPSGGSPAGSPTSTEEGTSESATPESGPGTSTEPSEGSAPGSPAGSPTSTEEGTSTEPSEGSAPGTSTEPSEQEIKRINKIRRRLVKDSNTKKAGKTGPMKTLLVRVMTPDLRERLENLRKKPENIPQPISNTSRANLNKLLTDYTEMKKAILHVYWEEFQKDPVGLMSRVAQPASKKIDQNKLKPEMDEKGNLTTAGFACSQCGQPLFVYKLEQVSEKGKAYTNYFGRCNVAEHEKLILLAQLKPEKDSDEAVTYSLGKFGQRALDFYSIHVTKESTHPVKPLAQIAGNRYASGPVGKALSDACMGTIASFLSKYQDIIIEHQKVVKGNQKRLESLRELAGKENLEYPSVTLPPQPHTKEGVDAYNEVIARVRMWVNLNLWQKLKLSRDDAKPLLRLKGFPSFPLVERQANEVDWWDMVCNVKKLINEKKEDGKVFWQNLAGYKRQEALRPYLSSEEDRKKGKKFARYQLGDLLLHLEKKHGEDWGKVYDEAWERIDKKVEGLSKHIKLEEERRSEDAQSKAALTDWLRAKASFVIEGLKEADKDEFCRCELKLQKWYGDLRGKPFAIEAENSILDISGFSKQYNCAFIWQKDGVKKLNLYLIINYFKGGKLRFKKIKPEAFEANRFYTVINKKSGEIVPMEVNFNFDDPNLIILPLAFGKRQGREFIWNDLLSLETGSLKLANGRVIEKTLYNRRTRQDEPALFVALTFERREVLDSSNIKPMNLIGVARGENIPAVIALTDPEGCPLSRFKDSLGNPTHILRIGESYKEKQRTIQAKKEVEQRRAGGYSRKYASKAKNLADDMVRNTARDLLYYAVTQDAMLIFANLSRGFGRQGKRTFMAERQYTRMEDWLTAKLAYEGLSKTYLSKTLAQYTSKTCSNCGFTITSADYDRVLEKLKKTATGWMTTINGKELKVEGQITYYNRYKRQNVVKDLSVELDRLSEESVNNDISSWTKGRSGEALSLLKKRFSHRPVQEKFVCLNCGFETHAAEQAALNIARSWLFLRSQEYKKYQTNKTTGNTDKRAFVETWQSFYRKKLKEVWKPAVRSGGSGGGSTSPKKKRKV

SEQ ID NO: 1920 - protein, 1873 aa, synthetic construct
MAPKKKRKVSRMNNSQGRVTFEDVTVNFTQGEWQRLNPEQRNLYRDVMLENYSNLVSVGQGETTKPDVILRLEQGKEPWLEEEEVLGSGRAEKNGDIGGQIWKPKDVKESLGGSGGGSAMERLVYEVRQKCRNIEDICISCGSLNVTLEHPLFIGGMCQNCKNCFLECAYQYDDDGYQSYCTICCGGREVLMCGNNNCCRCFCVECVDLLVGPGAAQAAIKEDPWNCYMCGHKGTYGLLRRREDWPSRLQMFFANNHDQEFDPPKVYPPVPAEKRKPIRVLSLFDGIATGLLVLKDLGIQVDRYIASEVCEDSITVGMVRHQGKIMYVGDVRSVTQKHIQEWGPFDLVIGGSPCNDLSIVNPARKGLYEGTGRLFFEFYRLLHDARPKEGDDRPFFWLFENVVAMGVSDKRDISRFLESNPVMIDAKEVSAAHRARYFWGNLPGMNRPLASTVNDKLELQECLEHGRIAKFSKVRTITTRSNSIKQGKDQHFPVFMNEKEDILWCTEMERVFGFPVHYTDVSNMSRLARQRLLGRSWSVPVIRHLFAPLKEYFACVSSGNSNANSRGPSFSSGLVPLSLRGSHMGPMEIYKTVSAWKRQPVRVLSLFRNIDKVLKSLGFLESGSGSGGGTLKYVEDVTNVVRRDVEKWGPFDLVYGSTQPLGSSCDRCPGWYMFQFHRILQYALPRQESQRPFFWIFMDNLLLTEDDQETTTRFLQTEAVTLQDVRGRDYQNAMRVWSNIPGLKSKHAPLTPKEEEYLQAQVRSRSKLDAPKVDLLVKNCLLPLREYFKYFSQNSLPLGGPSSGAPPPSGGSPAGSPTSTEEGTSESATPESGPGTSTEPSEGSAPGSPAGSPTSTEEGTSTEPSEGSAPGTSTEPSEQEIKRINKIRRRLVKDSNTKKAGKTGPMKTLLVRVMTPDLRERLENLRKKPENIPQPISNTSRANLNKLLTDYTEMKKAILHVYWEEFQKDPVGLMSRVAQPASKKIDQNKLKPEMDEKGNLTTAGFACSQCGQPLFVYKLEQVSEKGKAYTNYFGRCNVAEHEKLILLAQLKPEKDSDEAVTYSLGKFGQRALDFYSIHVTKESTHPVKPLAQIAGNRYASGPVGKALSDACMGTIASFLSKYQDIIIEHQKVVKGNQKRLESLRELAGKENLEYPSVTLPPQPHTKEGVDAYNEVIARVRMWVNLNLWQKLKLSRDDAKPLLRLKGFPSFPLVERQANEVDWWDMVCNVKKLINEKKEDGKVFWQNLAGYKRQEALRPYLSSEEDRKKGKKFARYQLGDLLLHLEKKHGEDWGKVYDEAWERIDKKVEGLSKHIKLEEERRSEDAQSKAALTDWLRAKASFVIEGLKEADKDEFCRCELKLQKWYGDLRGKPFAIEAENSILDISGFSKQYNCAFIWQKDGVKKLNLYLIINYFKGGKLRFKKIKPEAFEANRFYTVINKKSGEIVPMEVNFNFDDPNLIILPLAFGKRQGREFIWNDLLSLETGSLKLANGRVIEKTLYNRRTRQDEPALFVALTFERREVLDSSNIKPMNLIGVARGENIPAVIALTDPEGCPLSRFKDSLGNPTHILRIGESYKEKQRTIQAKKEVEQRRAGGYSRKYASKAKNLADDMVRNTARDLLYYAVTQDAMLIFANLSRGFGRQGKRTFMAERQYTRMEDWLTAKLAYEGLSKTYLSKTLAQYTSKTCSNCGFTITSADYDRVLEKLKKTATGWMTTINGKELKVEGQITYYNRYKRQNVVKDLSVELDRLSEESVNNDISSWTKGRSGEALSLLKKRFSHRPVQEKFVCLNCGFETHAAEQAALNIARSWLFLRSQEYKKYQTNKTTGNTDKRAFVETWQSFYRKKLKEVWKPAVRSGGSGGGSTSPKKKRKV

SEQ ID NO: 1921 - protein, 1710 aa, synthetic construct
MAPKKKRKVSRMDAKSLTAWSRTLVTFKDVFVDFTREEWKLLDTAQQIVYRNVMLENYKNLVSLGYQLTKPDVILRLEKGEEPGGSGGGSAMNHDQEFDPPKVYPPVPAEKRKPIRVLSLFDGIATGLLVLKDLGIQVDRYIASEVCEDSITVGMVRHQGKIMYVGDVRSVTQKHIQEWGPFDLVIGGSPCNDLSIVNPARKGLYEGTGRLFFEFYRLLHDARPKEGDDRPFFWLFENVVAMGVSDKRDISRFLESNPVMIDAKEVSAAHRARYFWGNLPGMNRPLASTVNDKLELQECLEHGRIAKFSKVRTITTRSNSIKQGKDQHFPVFMNEKEDILWCTEMERVFGFPVHYTDVSNMSRLARQRLLGRSWSVPVIRHLFAPLKEYFACVSSGNSNANSRGPSFSSGLVPLSLRGSHMGPMEIYKTVSAWKRQPVRVLSLFRNIDKVLKSLGFLESGSGSGGGTLKYVEDVTNVVRRDVEKWGPFDLVYGSTQPLGSSCDRCPGWYMFQFHRILQYALPRQESQRPFFWIFMDNLLLTEDDQETTTRFLQTEAVTLQDVRGRDYQNAMRVWSNIPGLKSKHAPLTPKEEEYLQAQVRSRSKLDAPKVDLLVKNCLLPLREYFKYFSQNSLPLGGPSSGAPPPSGGSPAGSPTSTEEGTSESATPESGPGTSTEPSEGSAPGSPAGSPTSTEEGTSTEPSEGSAPGTSTEPSEQEIKRINKIRRRLVKDSNTKKAGKTGPMKTLLVRVMTPDLRERLENLRKKPENIPQPISNTSRANLNKLLTDYTEMKKAILHVYWEEFQKDPVGLMSRVAQPASKKIDQNKLKPEMDEKGNLTTAGFACSQCGQPLFVYKLEQVSEKGKAYTNYFGRCNVAEHEKLILLAQLKPEKDSDEAVTYSLGKFGQRALDFYSIHVTKESTHPVKPLAQIAGNRYASGPVGKALSDACMGTIASFLSKYQDIIIEHQKVVKGNQKRLESLRELAGKENLEYPSVTLPPQPHTKEGVDAYNEVIARVRMWVNLNLWQKLKLSRDDAKPLLRLKGFPSFPLVERQANEVDWWDMVCNVKKLINEKKEDGKVFWQNLAGYKRQEALRPYLSSEEDRKKGKKFARYQLGDLLLHLEKKHGEDWGKVYDEAWERIDKKVEGLSKHIKLEEERRSEDAQSKAALTDWLRAKASFVIEGLKEADKDEFCRCELKLQKWYGDLRGKPFAIEAENSILDISGFSKQYNCAFIWQKDGVKKLNLYLIINYFKGGKLRFKKIKPEAFEANRFYTVINKKSGEIVPMEVNFNFDDPNLIILPLAFGKRQGREFIWNDLLSLETGSLKLANGRVIEKTLYNRRTRQDEPALFVALTFERREVLDSSNIKPMNLIGVARGENIPAVIALTDPEGCPLSRFKDSLGNPTHILRIGESYKEKQRTIQAKKEVEQRRAGGYSRKYASKAKNLADDMVRNTARDLLYYAVTQDAMLIFANLSRGFGRQGKRTFMAERQYTRMEDWLTAKLAYEGLSKTYLSKTLAQYTSKTCSNCGFTITSADYDRVLEKLKKTATGWMTTINGKELKVEGQITYYNRYKRQNVVKDLSVELDRLSEESVNNDISSWTKGRSGEALSLLKKRFSHRPVQEKFVCLNCGFETHAAEQAALNIARSWLFLRSQEYKKYQTNKTTGNTDKRAFVETWQSFYRKKLKEVWKPAVRSGGSGGGSTSPKKKRKV

SEQ ID NO: 1922 - protein, 1717 aa, synthetic construct
MAPKKKRKVSRVNGSGSGGGMNHDQEFDPPKVYPPVPAEKRKPIRVLSLFDGIATGLLVLKDLGIQVDRYIASEVCEDSITVGMVRHQGKIMYVGDVRSVTQKHIQEWGPFDLVIGGSPCNDLSIVNPARKGLYEGTGRLFFEFYRLLHDARPKEGDDRPFFWLFENVVAMGVSDKRDISRFLESNPVMIDAKEVSAAHRARYFWGNLPGMNRPLASTVNDKLELQECLEHGRIAKFSKVRTITTRSNSIKQGKDQHFPVFMNEKEDILWCTEMERVFGFPVHYTDVSNMSRLARQRLLGRSWSVPVIRHLFAPLKEYFACVSSGNSNANSRGPSFSSGLVPLSLRGSHMGPMEIYKTVSAWKRQPVRVLSLFRNIDKVLKSLGFLESGSGSGGGTLKYVEDVTNVVRRDVEKWGPFDLVYGSTQPLGSSCDRCPGWYMFQFHRILQYALPRQESQRPFFWIFMDNLLLTEDDQETTTRFLQTEAVTLQDVRGRDYQNAMRVWSNIPGLKSKHAPLTPKEEEYLQAQVRSRSKLDAPKVDLLVKNCLLPLREYFKYFSQNSLPLGGSGGGMDAKSLTAWSRTLVTFKDVFVDFTREEWKLLDTAQQIVYRNVMLENYKNLVSLGYQLTKPDVILRLEKGEEPGGPSSGAPPPSGGSPAGSPTSTEEGTSESATPESGPGTSTEPSEGSAPGSPAGSPTSTEEGTSTEPSEGSAPGTSTEPSEQEIKRINKIRRRLVKDSNTKKAGKTGPMKTLLVRVMTPDLRERLENLRKKPENIPQPISNTSRANLNKLLTDYTEMKKAILHVYWEEFQKDPVGLMSRVAQPASKKIDQNKLKPEMDEKGNLTTAGFACSQCGQPLFVYKLEQVSEKGKAYTNYFGRCNVAEHEKLILLAQLKPEKDSDEAVTYSLGKFGQRALDFYSIHVTKESTHPVKPLAQIAGNRYASGPVGKALSDACMGTIASFLSKYQDIIIEHQKVVKGNQKRLESLRELAGKENLEYPSVTLPPQPHTKEGVDAYNEVIARVRMWVNLNLWQKLKLSRDDAKPLLRLKGFPSFPLVERQANEVDWWDMVCNVKKLINEKKEDGKVFWQNLAGYKRQEALRPYLSSEEDRKKGKKFARYQLGDLLLHLEKKHGEDWGKVYDEAWERIDKKVEGLSKHIKLEEERRSEDAQSKAALTDWLRAKASFVIEGLKEADKDEFCRCELKLQKWYGDLRGKPFAIEAENSILDISGFSKQYNCAFIWQKDGVKKLNLYLIINYFKGGKLRFKKIKPEAFEANRFYTVINKKSGEIVPMEVNFNFDDPNLIILPLAFGKRQGREFIWNDLLSLETGSLKLANGRVIEKTLYNRRTRQDEPALFVALTFERREVLDSSNIKPMNLIGVARGENIPAVIALTDPEGCPLSRFKDSLGNPTHILRIGESYKEKQRTIQAKKEVEQRRAGGYSRKYASKAKNLADDMVRNTARDLLYYAVTQDAMLIFANLSRGFGRQGKRTFMAERQYTRMEDWLTAKLAYEGLSKTYLSKTLAQYTSKTCSNCGFTITSADYDRVLEKLKKTATGWMTTINGKELKVEGQITYYNRYKRQNVVKDLSVELDRLSEESVNNDISSWTKGRSGEALSLLKKRFSHRPVQEKFVCLNCGFETHAAEQAALNIARSWLFLRSQEYKKYQTNKTTGNTDKRAFVETWQSFYRKKLKEVWKPAVRSGGSGGGSTSPKKKRKV

SEQ ID NO: 1923 - protein, 1738 aa, synthetic construct
MAPKKKRKVSRMNNSQGRVTFEDVTVNFTQGEWQRLNPEQRNLYRDVMLENYSNLVSVGQGETTKPDVILRLEQGKEPWLEEEEVLGSGRAEKNGDIGGQIWKPKDVKESLGGSGGGSAMNHDQEFDPPKVYPPVPAEKRKPIRVLSLFDGIATGLLVLKDLGIQVDRYIASEVCEDSITVGMVRHQGKIMYVGDVRSVTQKHIQEWGPFDLVIGGSPCNDLSIVNPARKGLYEGTGRLFFEFYRLLHDARPKEGDDRPFFWLFENVVAMGVSDKRDISRFLESNPVMIDAKEVSAAHRARYFWGNLPGMNRPLASTVNDKLELQECLEHGRIAKFSKVRTITTRSNSIKQGKDQHFPVFMNEKEDILWCTEMERVFGFPVHYTDVSNMSRLARQRLLGRSWSVPVIRHLFAPLKEYFACVSSGNSNANSRGPSFSSGLVPLSLRGSHMGPMEIYKTVSAWKRQPVRVLSLFRNIDKVLKSLGFLESGSGSGGGTLKYVEDVTNVVRRDVEKWGPFDLVYGSTQPLGSSCDRCPGWYMFQFHRILQYALPRQESQRPFFWIFMDNLLLTEDDQETTTRFLQTEAVTLQDVRGRDYQNAMRVWSNIPGLKSKHAPLTPKEEEYLQAQVRSRSKLDAPKVDLLVKNCLLPLREYFKYFSQNSLPLGGPSSGAPPPSGGSPAGSPTSTEEGTSESATPESGPGTSTEPSEGSAPGSPAGSPTSTEEGTSTEPSEGSAPGTSTEPSEQEIKRINKIRRRLVKDSNTKKAGKTGPMKTLLVRVMTPDLRERLENLRKKPENIPQPISNTSRANLNKLLTDYTEMKKAILHVYWEEFQKDPVGLMSRVAQPASKKIDQNKLKPEMDEKGNLTTAGFACSQCGQPLFVYKLEQVSEKGKAYTNYFGRCNVAEHEKLILLAQLKPEKDSDEAVTYSLGKFGQRALDFYSIHVTKESTHPVKPLAQIAGNRYASGPVGKALSDACMGTIASFLSKYQDIIIEHQKVVKGNQKRLESLRELAGKENLEYPSVTLPPQPHTKEGVDAYNEVIARVRMWVNLNLWQKLKLSRDDAKPLLRLKGFPSFPLVERQANEVDWWDMVCNVKKLINEKKEDGKVFWQNLAGYKRQEALRPYLSSEEDRKKGKKFARYQLGDLLLHLEKKHGEDWGKVYDEAWERIDKKVEGLSKHIKLEEERRSEDAQSKAALTDWLRAKASFVIEGLKEADKDEFCRCELKLQKWYGDLRGKPFAIEAENSILDISGFSKQYNCAFIWQKDGVKKLNLYLIINYFKGGKLRFKKIKPEAFEANRFYTVINKKSGEIVPMEVNFNFDDPNLIILPLAFGKRQGREFIWNDLLSLETGSLKLANGRVIEKTLYNRRTRQDEPALFVALTFERREVLDSSNIKPMNLIGVARGENIPAVIALTDPEGCPLSRFKDSLGNPTHILRIGESYKEKQRTIQAKKEVEQRRAGGYSRKYASKAKNLADDMVRNTARDLLYYAVTQDAMLIFANLSRGFGRQGKRTFMAERQYTRMEDWLTAKLAYEGLSKTYLSKTLAQYTSKTCSNCGFTITSADYDRVLEKLKKTATGWMTTINGKELKVEGQITYYNRYKRQNVVKDLSVELDRLSEESVNNDISSWTKGRSGEALSLLKKRFSHRPVQEKFVCLNCGFETHAAEQAALNIARSWLFLRSQEYKKYQTNKTTGNTDKRAFVETWQSFYRKKLKEVWKPAVRSGGSGGGSTSPKKKRKV

SEQ ID NO: 1924 - protein, 1730 aa, synthetic construct
MAPKKKRKVSRVNGSGSGGGMNHDQEFDPPKVYPPVPAEKRKPIRVLSLFDGIATGLLVLKDLGIQVDRYIASEVCEDSITVGMVRHQGKIMYVGDVRSVTQKHIQEWGPFDLVIGGSPCNDLSIVNPARKGLYEGTGRLFFEFYRLLHDARPKEGDDRPFFWLFENVVAMGVSDKRDISRFLESNPVMIDAKEVSAAHRARYFWGNLPGMNRPLASTVNDKLELQECLEHGRIAKFSKVRTITTRSNSIKQGKDQHFPVFMNEKEDILWCTEMERVFGFPVHYTDVSNMSRLARQRLLGRSWSVPVIRHLFAPLKEYFACVSSGNSNANSRGPSFSSGLVPLSLRGSHMGPMEIYKTVSAWKRQPVRVLSLFRNIDKVLKSLGFLESGSGSGGGTLKYVEDVTNVVRRDVEKWGPFDLVYGSTQPLGSSCDRCPGWYMFQFHRILQYALPRQESQRPFFWIFMDNLLLTEDDQETTTRFLQTEAVTLQDVRGRDYQNAMRVWSNIPGLKSKHAPLTPKEEEYLQAQVRSRSKLDAPKVDLLVKNCLLPLREYFKYFSQNSLPLGGPSSGAPPPSGGSPAGSPTSTEEGTSESATPESGPGTSTEPSEGSAPGSPAGSPTSTEEGTSTEPSEGSAPGTSTEPSEGGSGGGSAQEIKRINKIRRRLVKDSNTKKAGKTGPMKTLLVRVMTPDLRERLENLRKKPENIPQPISNTSRANLNKLLTDYTEMKKAILHVYWEEFQKDPVGLMSRVAQPASKKIDQNKLKPEMDEKGNLTTAGFACSQCGQPLFVYKLEQVSEKGKAYTNYFGRCNVAEHEKLILLAQLKPEKDSDEAVTYSLGKFGQRALDFYSIHVTKESTHPVKPLAQIAGNRYASGPVGKALSDACMGTIASFLSKYQDIIIEHQKVVKGNQKRLESLRELAGKENLEYPSVTLPPQPHTKEGVDAYNEVIARVRMWVNLNLWQKLKLSRDDAKPLLRLKGFPSFPLVERQANEVDWWDMVCNVKKLINEKKEDGKVFWQNLAGYKRQEALRPYLSSEEDRKKGKKFARYQLGDLLLHLEKKHGEDWGKVYDEAWERIDKKVEGLSKHIKLEEERRSEDAQSKAALTDWLRAKASFVIEGLKEADKDEFCRCELKLQKWYGDLRGKPFAIEAENSILDISGFSKQYNCAFIWQKDGVKKLNLYLIINYFKGGKLRFKKIKPEAFEANRFYTVINKKSGEIVPMEVNFNFDDPNLIILPLAFGKRQGREFIWNDLLSLETGSLKLANGRVIEKTLYNRRTRQDEPALFVALTFERREVLDSSNIKPMNLIGVARGENIPAVIALTDPEGCPLSRFKDSLGNPTHILRIGESYKEKQRTIQAKKEVEQRRAGGYSRKYASKAKNLADDMVRNTARDLLYYAVTQDAMLIFANLSRGFGRQGKRTFMAERQYTRMEDWLTAKLAYEGLSKTYLSKTLAQYTSKTCSNCGFTITSADYDRVLEKLKKTATGWMTTINGKELKVEGQITYYNRYKRQNVVKDLSVELDRLSEESVNNDISSWTKGRSGEALSLLKKRFSHRPVQEKFVCLNCGFETHAAEQAALNIARSWLFLRSQEYKKYQTNKTTGNTDKRAFVETWQSFYRKKLKEVWKPAVRSGGSGGGSTSSQGSVTFRDVAIDFSQEEWKWLQPAQRDLYRRVMLENYGHLVSLGLSISKPDVVSLLEQGKEPWLGKRNVKRDLFSASESSTSPKKKRKV

SEQ ID NO: 1925 - DNA, 44 bp, synthetic construct
  source 1..44: mol_type = other DNA
aaataagagagaaaagaagagtaagaagaaatataagagccacc

SEQ ID NO: 1926 - DNA, 33 bp, synthetic construct
  source 1..33: mol_type = other DNA
atggcccctaagaagaagcgtaaagtgagccgg

SEQ ID NO: 1927 - DNA, 906 bp, synthetic construct
  source 1..906: mol_type = other DNA
atgaaccacgaccaggagttcgacccccctaaggtgtaccctcccgtccccgccgagaagagaaagcccatccgggtcctgagcctgttcgatggcatcgccaccggtctgctggtgctgaaggacctgggcatccaggtggataggtacattgcctccgaggtgtgcgaggactccatcaccgtgggaatggtgcgtcatcagggcaagatcatgtacgtgggcgacgtgcggagcgtgacacagaagcatatccaggagtggggccctttcgacctggtgatcggcggcagcccttgcaatgacctgagcatcgtgaacccagcccggaagggcctgtacgagggaaccggcagactgttcttcgagttttacagactgctgcacgacgcccggcctaaggaaggcgacgaccggcccttcttttggctgttcgagaatgtggtggccatgggagtcagcgacaagcgggatattagccggttcctggagagcaaccccgtgatgatcgatgccaaggaagtgagcgccgcccaccgggccagatacttctggggcaatctgcctggcatgaacagacccctggccagcaccgtgaacgacaagctggagctgcaggagtgcctggagcacggccggatcgccaagttcagcaaggtgagaaccatcaccacccgaagcaacagcatcaaacaaggcaaggaccagcactttcctgtgttcatgaacgagaaggaggacatcctgtggtgtaccgagatggagagagtgttcgggttcccagtccactacacagatgtcagcaacatgtctagactggccagacagagactgctgggaagaagctggtccgtccctgtgatcagacacctgttcgcccctctgaaggagtacttcgcctgcgtg

SEQ ID NO: 1928 - DNA, 81 bp, synthetic construct
  source 1..81: mol_type = other DNA
agcagcggcaacagcaacgccaacagccggggccccagcttctctagcggcctggtgccactgtccctgagagggagccac

SEQ ID NO: 1929 - DNA, 645 bp, synthetic construct
  source 1..645: mol_type = other DNA
atgggccccatggagatctacaaaaccgtgagcgcctggaagcggcagcctgtgcgcgtgctgagcctgtttcggaatatcgataaagtcctgaaaagcctgggattcctggagagcggctctggctccggcggtggcaccctgaagtacgtggaggatgtgacaaacgtggtcagacgggatgtggagaagtggggccccttcgatctggtgtacggcagcacccaacccctgggcagctcttgtgaccggtgccctggctggtacatgtttcagttccaccggatcctgcagtacgccctgccgagacaggagtcccagcggccattcttttggattttcatggacaacttgctgctgaccgaggatgaccaggaaactaccactcggttcctgcagaccgaagccgtgaccctgcaggacgtgagaggccgggactaccagaacgccatgcgggtgtggtccaacatccctggactgaaaagcaagcacgcacctctgacccctaaagaagaggagtacctgcaggcccaggtgcggagcagaagcaagctggacgcccctaaggtggatctgctggtgaagaattgcctcctgcccctgagagagtacttcaagtatttcagccagaatagtctgcccctg

SEQ ID NO: 1930 - DNA, 18 bp, synthetic construct
  source 1..18: mol_type = other DNA
ggaggcagcggcggcggc

SEQ ID NO: 1931 - DNA, 300 bp, synthetic construct
  source 1..300: mol_type = other DNA
atgaacaactcccagggcagagtgaccttcgaggacgtgaccgtgaattttacacagggagagtggcagagactgaaccccgagcagagaaacctgtaccgggatgtgatgctggaaaactacagcaatctggtgtccgtgggccagggcgagaccacaaagcctgacgtgatcctgcgtctggagcagggcaaggaaccctggctggaggaggaggaggtgctgggaagcggacgggccgagaagaacggcgacatcggcggacagatctggaagcctaaggacgtgaaagaaagcctg

SEQ ID NO: 1932 - DNA, 240 bp, synthetic construct
  source 1..240: mol_type = other DNA
ggcggcccaagcagcggcgcccctcctcccagcggcggcagcccagccggctccccaacctctaccgaggagggcacctctgagtccgccacccccgagagcggccctggcacctccaccgagcccagcgagggcagcgcacccggcagccctgccggcagccccacctccacagaggagggaaccagcaccgagcccagcgaaggcagcgccccaggcaccagcaccgagcctagtgag

SEQ ID NO: 1933 - DNA, 2931 bp, synthetic construct
  source 1..2931: mol_type = other DNA
caggagattaaacggatcaacaagatcagaagaagacttgtgaaagacagcaacaccaagaaggccggcaagacaggccccatgaaaaccctgctggttagagtgatgacacccgatctgagagagcggctggaaaacctgagaaagaagcctgaaaatatcccccagcccatcagcaatacatctagagccaacctgaataagctgctgaccgattacaccgaaatgaagaaggcgatcctgcatgtgtactgggaagagttccagaaggaccctgtgggcctgatgagccgggtggcccagcctgccagcaagaagatcgatcagaacaagctgaaacctgagatggacgagaagggcaacctgaccaccgccggctttgcctgctctcagtgtggccagcccctgttcgtgtacaagctggagcaggtgtctgagaagggcaaggcttacaccaactacttcggacggtgcaatgtggccgagcacgaaaagctgatcctgctggcccagctgaagcccgagaaggatagcgacgaagccgtgacatatagcctgggaaagtttgggcagagggccctggatttctacagcattcatgtgaccaaggagtccacccaccccgtgaagcccctggcccagatcgccggaaacagatacgcctccggacctgtgggaaaggccctgagcgacgcatgtatgggcacaatcgcctccttcctgtctaagtaccaggacatcatcatcgaacaccagaaggtggtgaagggcaaccagaagagactggagagcctgcgggagctggccggcaaggaaaacctggaataccctagcgtgaccctgccacctcagcctcacaccaaggagggcgttgatgcctacaacgaagtgatcgcccgggtgcgaatgtgggtgaacctgaacctgtggcagaagctgaagctaagcagagatgatgccaagcctctgctgagactgaagggattcccttcctttcctctggtcgagagacaggccaacgaagtggactggtgggacatggtgtgtaacgtgaagaagctgatcaacgagaaaaaggaggatggcaaggtgttttggcagaatctggctggctacaagagacaggaagccctgagaccatacctgagcagcgaggaagatcggaagaagggaaagaaattcgctcggtaccagctgggcgacctgctgctgcacctggaaaagaagcacggcgaggactggggaaaggtgtacgacgaggcctgggagcggattgacaagaaagtggaaggcctgagcaagcacatcaagctggaagaggaacggagaagcgaggacgcccagagcaaggccgccctgaccgactggctgcgggctaaggccagcttcgtgatcgagggcctgaaggaggccgacaaggacgagttctgcagatgcgagctgaagctgcagaagtggtacggggacctgcggggaaagcccttcgccatcgaagccgagaacagcatcctggacatcagcggcttcagcaagcagtacaactgtgccttcatctggcagaaggacggcgtgaagaagctgaacctgtacctgatcatcaactacttcaagggcggcaagctgcggttcaagaagatcaaacctgaagccttcgaagccaacagattctacaccgtgatcaacaaaaagagcggcgagatcgtgcccatggaggtgaacttcaacttcgacgaccccaacctgatcatcctgcctctggcctttggcaagagacagggcagagaattcatctggaacgacctgctgtccctggaaaccggcagcctgaagctggccaacggaagagtgatcgagaagacactgtacaacagaagaacccggcaggatgagcctgccctgttcgtggccctgaccttcgagcggcgggaggtcctggactcctccaatatcaaaccaatgaacctgatcggcgtggcaagaggcgaaaacatccccgccgtgatcgccctgaccgaccccgagggctgcccactgagccggtttaaggatagcctgggaaacccaacccacatcctgagaatcggcgagagctataaggagaagcagcggaccatccaggccaagaaggaggtggagcagcggagagccggcggctacagccggaagtacgccagcaaagccaagaatctggcagacgatatggtgagaaacaccgctagagatctgctgtactacgccgtgacccaggatgccatgctgatcttcgccaacctgagccggggcttcggccggcagggcaagcggaccttcatggccgagagacagtacacacggatggaggactggctgaccgccaagctggcctacgagggcctgagcaagacctacctgtccaagacactggcccagtacacctccaagacatgcagcaactgtgggtttaccatcaccagcgccgactacgacagggtgctggagaagctgaagaagacagcaacaggctggatgaccacaattaacggcaaggagctgaaggtggagggccagattacctactacaacagatacaagagacagaacgtagtcaaggacctgtccgtcgagctggatagactgagcgaagaatctgtgaacaacgacatctcctcctggacaaagggcagaagcggagaagctctgagcctcctgaagaaaagattctcccatagacccgtgcaggagaagttcgtgtgcctgaactgcggcttcgagacacacgcagccgagcaagccgccctgaacatcgccagatcctggctgttcctgcggagccaggagtacaagaaataccagacaaacaagacaaccggcaacaccgataagagagccttcgtcgagacctggcagtccttttaccggaagaagcttaaggaggtgtggaaacctgccgtg

SEQ ID NO: 1934 - DNA, 33 bp, synthetic construct
  source 1..33: mol_type = other DNA
cggtctggcggatctggcggaggctccaccagc

SEQ ID NO: 1935 - DNA, 31 bp, synthetic construct
  source 1..31: mol_type = other DNA
cccaagaaaaagagaaaagtctaatagataa

SEQ ID NO: 1936 - DNA, 93 bp, synthetic construct
  source 1..93: mol_type = other DNA
gctgccttctgcggggcttgccttctggccatgcccttcttctctcccttgcacctgtacctcttggtctttgaataaagcctgagtaggaag

SEQ ID NO: 1937 - skipped

SEQ ID NO: 1938 - DNA, 79 bp, synthetic construct
  source 1..79: mol_type = other DNA
aaaaaaaaaaaaaaaaaaaaaaaaaaaaaaaaaaaaaaaaaaaaaaaaaaaaaaaaaaaaaaaaaaaaaaaaaaaaaaa

SEQ ID NO: 1939 - DNA, 408 bp, synthetic construct
  source 1..408: mol_type = other DNA
atggaacgcctcgtctacgaggtgcggcagaagtgcagaaacatcgaggacatctgcatctcctgcggatctctgaacgtgaccctggagcacccactgttcatcggcggcatgtgccagaactgtaaaaactgttttctggagtgtgcctatcaatacgacgatgacggctaccagagctactgcaccatctgttgcggcggaagagaggtgctgatgtgtggaaataacaactgctgccggtgcttctgcgtggaatgcgtggacctgctggtgggccccggcgccgcccaggccgctattaaggaagatccttggaactgctacatgtgcggccacaagggcacatacggcctgctgagacggagagaggactggcctagcagactgcagatgttcttcgccaat

SEQ ID NO: 1940 - DNA, 903 bp, synthetic construct
  source 1..903: mol_type = other DNA
aaccacgaccaggagttcgacccccctaaggtgtaccctcccgtccccgccgagaagagaaagcccatccgggtcctgagcctgttcgatggcatcgccaccggtctgctggtgctgaaggacctgggcatccaggtggataggtacattgcctccgaggtgtgcgaggactccatcaccgtgggaatggtgcgtcatcagggcaagatcatgtacgtgggcgacgtgcggagcgtgacacagaagcatatccaggagtggggccctttcgacctggtgatcggcggcagcccttgcaatgacctgagcatcgtgaacccagcccggaagggcctgtacgagggaaccggcagactgttcttcgagttttacagactgctgcacgacgcccggcctaaggaaggcgacgaccggcccttcttttggctgttcgagaatgtggtggccatgggagtcagcgacaagcgggatattagccggttcctggagagcaaccccgtgatgatcgatgccaaggaagtgagcgccgcccaccgggccagatacttctggggcaatctgcctggcatgaacagacccctggccagcaccgtgaacgacaagctggagctgcaggagtgcctggagcacggccggatcgccaagttcagcaaggtgagaaccatcaccacccgaagcaacagcatcaaacaaggcaaggaccagcactttcctgtgttcatgaacgagaaggaggacatcctgtggtgtaccgagatggagagagtgttcgggttcccagtccactacacagatgtcagcaacatgtctagactggccagacagagactgctgggaagaagctggtccgtccctgtgatcagacacctgttcgcccctctgaaggagtacttcgcctgcgtg

SEQ ID NO: 1941 - RNA, 44 nt, synthetic construct
  source 1..44: mol_type = other RNA
aaataagagagaaaagaagagtaagaagaaatataagagccacc

SEQ ID NO: 1942 - RNA, 33 nt, synthetic construct
  source 1..33: mol_type = other RNA
atggcccctaagaagaagcgtaaagtgagccgg

SEQ ID NO: 1943 - RNA, 906 nt, synthetic construct
  source 1..906: mol_type = other RNA
atgaaccacgaccaggagttcgacccccctaaggtgtaccctcccgtccccgccgagaagagaaagcccatccgggtcctgagcctgttcgatggcatcgccaccggtctgctggtgctgaaggacctgggcatccaggtggataggtacattgcctccgaggtgtgcgaggactccatcaccgtgggaatggtgcgtcatcagggcaagatcatgtacgtgggcgacgtgcggagcgtgacacagaagcatatccaggagtggggccctttcgacctggtgatcggcggcagcccttgcaatgacctgagcatcgtgaacccagcccggaagggcctgtacgagggaaccggcagactgttcttcgagttttacagactgctgcacgacgcccggcctaaggaaggcgacgaccggcccttcttttggctgttcgagaatgtggtggccatgggagtcagcgacaagcgggatattagccggttcctggagagcaaccccgtgatgatcgatgccaaggaagtgagcgccgcccaccgggccagatacttctggggcaatctgcctggcatgaacagacccctggccagcaccgtgaacgacaagctggagctgcaggagtgcctggagcacggccggatcgccaagttcagcaaggtgagaaccatcaccacccgaagcaacagcatcaaacaaggcaaggaccagcactttcctgtgttcatgaacgagaaggaggacatcctgtggtgtaccgagatggagagagtgttcgggttcccagtccactacacagatgtcagcaacatgtctagactggccagacagagactgctgggaagaagctggtccgtccctgtgatcagacacctgttcgcccctctgaaggagtacttcgcctgcgtg

SEQ ID NO: 1944 - RNA, 81 nt, synthetic construct
  source 1..81: mol_type = other RNA
agcagcggcaacagcaacgccaacagccggggccccagcttctctagcggcctggtgccactgtccctgagagggagccac

SEQ ID NO: 1945 - RNA, 645 nt, synthetic construct
  source 1..645: mol_type = other RNA
atgggccccatggagatctacaaaaccgtgagcgcctggaagcggcagcctgtgcgcgtgctgagcctgtttcggaatatcgataaagtcctgaaaagcctgggattcctggagagcggctctggctccggcggtggcaccctgaagtacgtggaggatgtgacaaacgtggtcagacgggatgtggagaagtggggccccttcgatctggtgtacggcagcacccaacccctgggcagctcttgtgaccggtgccctggctggtacatgtttcagttccaccggatcctgcagtacgccctgccgagacaggagtcccagcggccattcttttggattttcatggacaacttgctgctgaccgaggatgaccaggaaactaccactcggttcctgcagaccgaagccgtgaccctgcaggacgtgagaggccgggactaccagaacgccatgcgggtgtggtccaacatccctggactgaaaagcaagcacgcacctctgacccctaaagaagaggagtacctgcaggcccaggtgcggagcagaagcaagctggacgcccctaaggtggatctgctggtgaagaattgcctcctgcccctgagagagtacttcaagtatttcagccagaatagtctgcccctg

SEQ ID NO: 1946 - RNA, 300 nt, synthetic construct
  source 1..300: mol_type = other RNA
atgaacaactcccagggcagagtgaccttcgaggacgtgaccgtgaattttacacagggagagtggcagagactgaaccccgagcagagaaacctgtaccgggatgtgatgctggaaaactacagcaatctggtgtccgtgggccagggcgagaccacaaagcctgacgtgatcctgcgtctggagcagggcaaggaaccctggctggaggaggaggaggtgctgggaagcggacgggccgagaagaacggcgacatcggcggacagatctggaagcctaaggacgtgaaagaaagcctg

SEQ ID NO: 1947 - RNA, 240 nt, synthetic construct
  source 1..240: mol_type = other RNA
ggcggcccaagcagcggcgcccctcctcccagcggcggcagcccagccggctccccaacctctaccgaggagggcacctctgagtccgccacccccgagagcggccctggcacctccaccgagcccagcgagggcagcgcacccggcagccctgccggcagccccacctccacagaggagggaaccagcaccgagcccagcgaaggcagcgccccaggcaccagcaccgagcctagtgag

SEQ ID NO: 1948 - RNA, 2931 nt, synthetic construct
  source 1..2931: mol_type = other RNA
caggagattaaacggatcaacaagatcagaagaagacttgtgaaagacagcaacaccaagaaggccggcaagacaggccccatgaaaaccctgctggttagagtgatgacacccgatctgagagagcggctggaaaacctgagaaagaagcctgaaaatatcccccagcccatcagcaatacatctagagccaacctgaataagctgctgaccgattacaccgaaatgaagaaggcgatcctgcatgtgtactgggaagagttccagaaggaccctgtgggcctgatgagccgggtggcccagcctgccagcaagaagatcgatcagaacaagctgaaacctgagatggacgagaagggcaacctgaccaccgccggctttgcctgctctcagtgtggccagcccctgttcgtgtacaagctggagcaggtgtctgagaagggcaaggcttacaccaactacttcggacggtgcaatgtggccgagcacgaaaagctgatcctgctggcccagctgaagcccgagaaggatagcgacgaagccgtgacatatagcctgggaaagtttgggcagagggccctggatttctacagcattcatgtgaccaaggagtccacccaccccgtgaagcccctggcccagatcgccggaaacagatacgcctccggacctgtgggaaaggccctgagcgacgcatgtatgggcacaatcgcctccttcctgtctaagtaccaggacatcatcatcgaacaccagaaggtggtgaagggcaaccagaagagactggagagcctgcgggagctggccggcaaggaaaacctggaataccctagcgtgaccctgccacctcagcctcacaccaaggagggcgttgatgcctacaacgaagtgatcgcccgggtgcgaatgtgggtgaacctgaacctgtggcagaagctgaagctaagcagagatgatgccaagcctctgctgagactgaagggattcccttcctttcctctggtcgagagacaggccaacgaagtggactggtgggacatggtgtgtaacgtgaagaagctgatcaacgagaaaaaggaggatggcaaggtgttttggcagaatctggctggctacaagagacaggaagccctgagaccatacctgagcagcgaggaagatcggaagaagggaaagaaattcgctcggtaccagctgggcgacctgctgctgcacctggaaaagaagcacggcgaggactggggaaaggtgtacgacgaggcctgggagcggattgacaagaaagtggaaggcctgagcaagcacatcaagctggaagaggaacggagaagcgaggacgcccagagcaaggccgccctgaccgactggctgcgggctaaggccagcttcgtgatcgagggcctgaaggaggccgacaaggacgagttctgcagatgcgagctgaagctgcagaagtggtacggggacctgcggggaaagcccttcgccatcgaagccgagaacagcatcctggacatcagcggcttcagcaagcagtacaactgtgccttcatctggcagaaggacggcgtgaagaagctgaacctgtacctgatcatcaactacttcaagggcggcaagctgcggttcaagaagatcaaacctgaagccttcgaagccaacagattctacaccgtgatcaacaaaaagagcggcgagatcgtgcccatggaggtgaacttcaacttcgacgaccccaacctgatcatcctgcctctggcctttggcaagagacagggcagagaattcatctggaacgacctgctgtccctggaaaccggcagcctgaagctggccaacggaagagtgatcgagaagacactgtacaacagaagaacccggcaggatgagcctgccctgttcgtggccctgaccttcgagcggcgggaggtcctggactcctccaatatcaaaccaatgaacctgatcggcgtggcaagaggcgaaaacatccccgccgtgatcgccctgaccgaccccgagggctgcccactgagccggtttaaggatagcctgggaaacccaacccacatcctgagaatcggcgagagctataaggagaagcagcggaccatccaggccaagaaggaggtggagcagcggagagccggcggctacagccggaagtacgccagcaaagccaagaatctggcagacgatatggtgagaaacaccgctagagatctgctgtactacgccgtgacccaggatgccatgctgatcttcgccaacctgagccggggcttcggccggcagggcaagcggaccttcatggccgagagacagtacacacggatggaggactggctgaccgccaagctggcctacgagggcctgagcaagacctacctgtccaagacactggcccagtacacctccaagacatgcagcaactgtgggtttaccatcaccagcgccgactacgacagggtgctggagaagctgaagaagacagcaacaggctggatgaccacaattaacggcaaggagctgaaggtggagggccagattacctactacaacagatacaagagacagaacgtagtcaaggacctgtccgtcgagctggatagactgagcgaagaatctgtgaacaacgacatctcctcctggacaaagggcagaagcggagaagctctgagcctcctgaagaaaagattctcccatagacccgtgcaggagaagttcgtgtgcctgaactgcggcttcgagacacacgcagccgagcaagccgccctgaacatcgccagatcctggctgttcctgcggagccaggagtacaagaaataccagacaaacaagacaaccggcaacaccgataagagagccttcgtcgagacctggcagtccttttaccggaagaagcttaaggaggtgtggaaacctgccgtg

SEQ ID NO: 1949 - RNA, 33 nt, synthetic construct
  source 1..33: mol_type = other RNA
cggtctggcggatctggcggaggctccaccagc

SEQ ID NO: 1950 - RNA, 31 nt, synthetic construct
  source 1..31: mol_type = other RNA
cccaagaaaaagagaaaagtctaatagataa

SEQ ID NO: 1951 - RNA, 93 nt, synthetic construct
  source 1..93: mol_type = other RNA
gctgccttctgcggggcttgccttctggccatgcccttcttctctcccttgcacctgtacctcttggtctttgaataaagcctgagtaggaag

SEQ ID NO: 1952-1953 - skipped (2 entries)

SEQ ID NO: 1954 - RNA, 408 nt, synthetic construct
  source 1..408: mol_type = other RNA
atggaacgcctcgtctacgaggtgcggcagaagtgcagaaacatcgaggacatctgcatctcctgcggatctctgaacgtgaccctggagcacccactgttcatcggcggcatgtgccagaactgtaaaaactgttttctggagtgtgcctatcaatacgacgatgacggctaccagagctactgcaccatctgttgcggcggaagagaggtgctgatgtgtggaaataacaactgctgccggtgcttctgcgtggaatgcgtggacctgctggtgggccccggcgccgcccaggccgctattaaggaagatccttggaactgctacatgtgcggccacaagggcacatacggcctgctgagacggagagaggactggcctagcagactgcagatgttcttcgccaat

SEQ ID NO: 1955 - RNA, 903 nt, synthetic construct
  source 1..903: mol_type = other RNA
aaccacgaccaggagttcgacccccctaaggtgtaccctcccgtccccgccgagaagagaaagcccatccgggtcctgagcctgttcgatggcatcgccaccggtctgctggtgctgaaggacctgggcatccaggtggataggtacattgcctccgaggtgtgcgaggactccatcaccgtgggaatggtgcgtcatcagggcaagatcatgtacgtgggcgacgtgcggagcgtgacacagaagcatatccaggagtggggccctttcgacctggtgatcggcggcagcccttgcaatgacctgagcatcgtgaacccagcccggaagggcctgtacgagggaaccggcagactgttcttcgagttttacagactgctgcacgacgcccggcctaaggaaggcgacgaccggcccttcttttggctgttcgagaatgtggtggccatgggagtcagcgacaagcgggatattagccggttcctggagagcaaccccgtgatgatcgatgccaaggaagtgagcgccgcccaccgggccagatacttctggggcaatctgcctggcatgaacagacccctggccagcaccgtgaacgacaagctggagctgcaggagtgcctggagcacggccggatcgccaagttcagcaaggtgagaaccatcaccacccgaagcaacagcatcaaacaaggcaaggaccagcactttcctgtgttcatgaacgagaaggaggacatcctgtggtgtaccgagatggagagagtgttcgggttcccagtccactacacagatgtcagcaacatgtctagactggccagacagagactgctgggaagaagctggtccgtccctgtgatcagacacctgttcgcccctctgaaggagtacttcgcctgcgtg

SEQ ID NO: 1956 - RNA, 5439 nt, synthetic construct
  source 1..5439: mol_type = other RNA
  modified_base 1..5439: mod_base = OTHER; note = each t is m1f
aaataagagagaaaagaagagtaagaagaaatataagagccaccatggcccctaagaagaagcgtaaagtgagccggatgaaccacgaccaggagttcgacccccctaaggtgtaccctcccgtccccgccgagaagagaaagcccatccgggtcctgagcctgttcgatggcatcgccaccggtctgctggtgctgaaggacctgggcatccaggtggataggtacattgcctccgaggtgtgcgaggactccatcaccgtgggaatggtgcgtcatcagggcaagatcatgtacgtgggcgacgtgcggagcgtgacacagaagcatatccaggagtggggccctttcgacctggtgatcggcggcagcccttgcaatgacctgagcatcgtgaacccagcccggaagggcctgtacgagggaaccggcagactgttcttcgagttttacagactgctgcacgacgcccggcctaaggaaggcgacgaccggcccttcttttggctgttcgagaatgtggtggccatgggagtcagcgacaagcgggatattagccggttcctggagagcaaccccgtgatgatcgatgccaaggaagtgagcgccgcccaccgggccagatacttctggggcaatctgcctggcatgaacagacccctggccagcaccgtgaacgacaagctggagctgcaggagtgcctggagcacggccggatcgccaagttcagcaaggtgagaaccatcaccacccgaagcaacagcatcaaacaaggcaaggaccagcactttcctgtgttcatgaacgagaaggaggacatcctgtggtgtaccgagatggagagagtgttcgggttcccagtccactacacagatgtcagcaacatgtctagactggccagacagagactgctgggaagaagctggtccgtccctgtgatcagacacctgttcgcccctctgaaggagtacttcgcctgcgtgagcagcggcaacagcaacgccaacagccggggccccagcttctctagcggcctggtgccactgtccctgagagggagccacatgggccccatggagatctacaaaaccgtgagcgcctggaagcggcagcctgtgcgcgtgctgagcctgtttcggaatatcgataaagtcctgaaaagcctgggattcctggagagcggctctggctccggcggtggcaccctgaagtacgtggaggatgtgacaaacgtggtcagacgggatgtggagaagtggggccccttcgatctggtgtacggcagcacccaacccctgggcagctcttgtgaccggtgccctggctggtacatgtttcagttccaccggatcctgcagtacgccctgccgagacaggagtcccagcggccattcttttggattttcatggacaacttgctgctgaccgaggatgaccaggaaactaccactcggttcctgcagaccgaagccgtgaccctgcaggacgtgagaggccgggactaccagaacgccatgcgggtgtggtccaacatccctggactgaaaagcaagcacgcacctctgacccctaaagaagaggagtacctgcaggcccaggtgcggagcagaagcaagctggacgcccctaaggtggatctgctggtgaagaattgcctcctgcccctgagagagtacttcaagtatttcagccagaatagtctgcccctgggaggcagcggcggcggcatgaacaactcccagggcagagtgaccttcgaggacgtgaccgtgaattttacacagggagagtggcagagactgaaccccgagcagagaaacctgtaccgggatgtgatgctggaaaactacagcaatctggtgtccgtgggccagggcgagaccacaaagcctgacgtgatcctgcgtctggagcagggcaaggaaccctggctggaggaggaggaggtgctgggaagcggacgggccgagaagaacggcgacatcggcggacagatctggaagcctaaggacgtgaaagaaagcctgggcggcccaagcagcggcgcccctcctcccagcggcggcagcccagccggctccccaacctctaccgaggagggcacctctgagtccgccacccccgagagcggccctggcacctccaccgagcccagcgagggcagcgcacccggcagccctgccggcagccccacctccacagaggagggaaccagcaccgagcccagcgaaggcagcgccccaggcaccagcaccgagcctagtgagcaggagattaaacggatcaacaagatcagaagaagacttgtgaaagacagcaacaccaagaaggccggcaagacaggccccatgaaaaccctgctggttagagtgatgacacccgatctgagagagcggctggaaaacctgagaaagaagcctgaaaatatcccccagcccatcagcaatacatctagagccaacctgaataagctgctgaccgattacaccgaaatgaagaaggcgatcctgcatgtgtactgggaagagttccagaaggaccctgtgggcctgatgagccgggtggcccagcctgccagcaagaagatcgatcagaacaagctgaaacctgagatggacgagaagggcaacctgaccaccgccggctttgcctgctctcagtgtggccagcccctgttcgtgtacaagctggagcaggtgtctgagaagggcaaggcttacaccaactacttcggacggtgcaatgtggccgagcacgaaaagctgatcctgctggcccagctgaagcccgagaaggatagcgacgaagccgtgacatatagcctgggaaagtttgggcagagggccctggatttctacagcattcatgtgaccaaggagtccacccaccccgtgaagcccctggcccagatcgccggaaacagatacgcctccggacctgtgggaaaggccctgagcgacgcatgtatgggcacaatcgcctccttcctgtctaagtaccaggacatcatcatcgaacaccagaaggtggtgaagggcaaccagaagagactggagagcctgcgggagctggccggcaaggaaaacctggaataccctagcgtgaccctgccacctcagcctcacaccaaggagggcgttgatgcctacaacgaagtgatcgcccgggtgcgaatgtgggtgaacctgaacctgtggcagaagctgaagctaagcagagatgatgccaagcctctgctgagactgaagggattcccttcctttcctctggtcgagagacaggccaacgaagtggactggtgggacatggtgtgtaacgtgaagaagctgatcaacgagaaaaaggaggatggcaaggtgttttggcagaatctggctggctacaagagacaggaagccctgagaccatacctgagcagcgaggaagatcggaagaagggaaagaaattcgctcggtaccagctgggcgacctgctgctgcacctggaaaagaagcacggcgaggactggggaaaggtgtacgacgaggcctgggagcggattgacaagaaagtggaaggcctgagcaagcacatcaagctggaagaggaacggagaagcgaggacgcccagagcaaggccgccctgaccgactggctgcgggctaaggccagcttcgtgatcgagggcctgaaggaggccgacaaggacgagttctgcagatgcgagctgaagctgcagaagtggtacggggacctgcggggaaagcccttcgccatcgaagccgagaacagcatcctggacatcagcggcttcagcaagcagtacaactgtgccttcatctggcagaaggacggcgtgaagaagctgaacctgtacctgatcatcaactacttcaagggcggcaagctgcggttcaagaagatcaaacctgaagccttcgaagccaacagattctacaccgtgatcaacaaaaagagcggcgagatcgtgcccatggaggtgaacttcaacttcgacgaccccaacctgatcatcctgcctctggcctttggcaagagacagggcagagaattcatctggaacgacctgctgtccctggaaaccggcagcctgaagctggccaacggaagagtgatcgagaagacactgtacaacagaagaacccggcaggatgagcctgccctgttcgtggccctgaccttcgagcggcgggaggtcctggactcctccaatatcaaaccaatgaacctgatcggcgtggcaagaggcgaaaacatccccgccgtgatcgccctgaccgaccccgagggctgcccactgagccggtttaaggatagcctgggaaacccaacccacatcctgagaatcggcgagagctataaggagaagcagcggaccatccaggccaagaaggaggtggagcagcggagagccggcggctacagccggaagtacgccagcaaagccaagaatctggcagacgatatggtgagaaacaccgctagagatctgctgtactacgccgtgacccaggatgccatgctgatcttcgccaacctgagccggggcttcggccggcagggcaagcggaccttcatggccgagagacagtacacacggatggaggactggctgaccgccaagctggcctacgagggcctgagcaagacctacctgtccaagacactggcccagtacacctccaagacatgcagcaactgtgggtttaccatcaccagcgccgactacgacagggtgctggagaagctgaagaagacagcaacaggctggatgaccacaattaacggcaaggagctgaaggtggagggccagattacctactacaacagatacaagagacagaacgtagtcaaggacctgtccgtcgagctggatagactgagcgaagaatctgtgaacaacgacatctcctcctggacaaagggcagaagcggagaagctctgagcctcctgaagaaaagattctcccatagacccgtgcaggagaagttcgtgtgcctgaactgcggcttcgagacacacgcagccgagcaagccgccctgaacatcgccagatcctggctgttcctgcggagccaggagtacaagaaataccagacaaacaagacaaccggcaacaccgataagagagccttcgtcgagacctggcagtccttttaccggaagaagcttaaggaggtgtggaaacctgccgtgcggtctggcggatctggcggaggctccaccagccccaagaaaaagagaaaagtctaatagataagctgccttctgcggggcttgccttctggccatgcccttcttctctcccttgcacctgtacctcttggtctttgaataaagcctgagtaggaagtctagaaaaaaaaaaaaaaaaaaaaaaaaaaaaaaaaaaaaaaaaaaaaaaaaaaaaaaaaaaaaaaaaaaaaaaaaaaaaaaa

SEQ ID NO: 1957 - RNA, 5844 nt, synthetic construct
  source 1..5844: mol_type = other RNA
  modified_base 1..5844: mod_base = OTHER; note = Each t is m1f
aaataagagagaaaagaagagtaagaagaaatataagagccaccatggcccctaagaagaagcgtaaagtgagccggatggaacgcctcgtctacgaggtgcggcagaagtgcagaaacatcgaggacatctgcatctcctgcggatctctgaacgtgaccctggagcacccactgttcatcggcggcatgtgccagaactgtaaaaactgttttctggagtgtgcctatcaatacgacgatgacggctaccagagctactgcaccatctgttgcggcggaagagaggtgctgatgtgtggaaataacaactgctgccggtgcttctgcgtggaatgcgtggacctgctggtgggccccggcgccgcccaggccgctattaaggaagatccttggaactgctacatgtgcggccacaagggcacatacggcctgctgagacggagagaggactggcctagcagactgcagatgttcttcgccaataaccacgaccaggagttcgacccccctaaggtgtaccctcccgtccccgccgagaagagaaagcccatccgggtcctgagcctgttcgatggcatcgccaccggtctgctggtgctgaaggacctgggcatccaggtggataggtacattgcctccgaggtgtgcgaggactccatcaccgtgggaatggtgcgtcatcagggcaagatcatgtacgtgggcgacgtgcggagcgtgacacagaagcatatccaggagtggggccctttcgacctggtgatcggcggcagcccttgcaatgacctgagcatcgtgaacccagcccggaagggcctgtacgagggaaccggcagactgttcttcgagttttacagactgctgcacgacgcccggcctaaggaaggcgacgaccggcccttcttttggctgttcgagaatgtggtggccatgggagtcagcgacaagcgggatattagccggttcctggagagcaaccccgtgatgatcgatgccaaggaagtgagcgccgcccaccgggccagatacttctggggcaatctgcctggcatgaacagacccctggccagcaccgtgaacgacaagctggagctgcaggagtgcctggagcacggccggatcgccaagttcagcaaggtgagaaccatcaccacccgaagcaacagcatcaaacaaggcaaggaccagcactttcctgtgttcatgaacgagaaggaggacatcctgtggtgtaccgagatggagagagtgttcgggttcccagtccactacacagatgtcagcaacatgtctagactggccagacagagactgctgggaagaagctggtccgtccctgtgatcagacacctgttcgcccctctgaaggagtacttcgcctgcgtgagcagcggcaacagcaacgccaacagccggggccccagcttctctagcggcctggtgccactgtccctgagagggagccacatgggccccatggagatctacaaaaccgtgagcgcctggaagcggcagcctgtgcgcgtgctgagcctgtttcggaatatcgataaagtcctgaaaagcctgggattcctggagagcggctctggctccggcggtggcaccctgaagtacgtggaggatgtgacaaacgtggtcagacgggatgtggagaagtggggccccttcgatctggtgtacggcagcacccaacccctgggcagctcttgtgaccggtgccctggctggtacatgtttcagttccaccggatcctgcagtacgccctgccgagacaggagtcccagcggccattcttttggattttcatggacaacttgctgctgaccgaggatgaccaggaaactaccactcggttcctgcagaccgaagccgtgaccctgcaggacgtgagaggccgggactaccagaacgccatgcgggtgtggtccaacatccctggactgaaaagcaagcacgcacctctgacccctaaagaagaggagtacctgcaggcccaggtgcggagcagaagcaagctggacgcccctaaggtggatctgctggtgaagaattgcctcctgcccctgagagagtacttcaagtatttcagccagaatagtctgcccctgggaggcagcggcggcggcatgaacaactcccagggcagagtgaccttcgaggacgtgaccgtgaattttacacagggagagtggcagagactgaaccccgagcagagaaacctgtaccgggatgtgatgctggaaaactacagcaatctggtgtccgtgggccagggcgagaccacaaagcctgacgtgatcctgcgtctggagcagggcaaggaaccctggctggaggaggaggaggtgctgggaagcggacgggccgagaagaacggcgacatcggcggacagatctggaagcctaaggacgtgaaagaaagcctgggcggcccaagcagcggcgcccctcctcccagcggcggcagcccagccggctccccaacctctaccgaggagggcacctctgagtccgccacccccgagagcggccctggcacctccaccgagcccagcgagggcagcgcacccggcagccctgccggcagccccacctccacagaggagggaaccagcaccgagcccagcgaaggcagcgccccaggcaccagcaccgagcctagtgagcaggagattaaacggatcaacaagatcagaagaagacttgtgaaagacagcaacaccaagaaggccggcaagacaggccccatgaaaaccctgctggttagagtgatgacacccgatctgagagagcggctggaaaacctgagaaagaagcctgaaaatatcccccagcccatcagcaatacatctagagccaacctgaataagctgctgaccgattacaccgaaatgaagaaggcgatcctgcatgtgtactgggaagagttccagaaggaccctgtgggcctgatgagccgggtggcccagcctgccagcaagaagatcgatcagaacaagctgaaacctgagatggacgagaagggcaacctgaccaccgccggctttgcctgctctcagtgtggccagcccctgttcgtgtacaagctggagcaggtgtctgagaagggcaaggcttacaccaactacttcggacggtgcaatgtggccgagcacgaaaagctgatcctgctggcccagctgaagcccgagaaggatagcgacgaagccgtgacatatagcctgggaaagtttgggcagagggccctggatttctacagcattcatgtgaccaaggagtccacccaccccgtgaagcccctggcccagatcgccggaaacagatacgcctccggacctgtgggaaaggccctgagcgacgcatgtatgggcacaatcgcctccttcctgtctaagtaccaggacatcatcatcgaacaccagaaggtggtgaagggcaaccagaagagactggagagcctgcgggagctggccggcaaggaaaacctggaataccctagcgtgaccctgccacctcagcctcacaccaaggagggcgttgatgcctacaacgaagtgatcgcccgggtgcgaatgtgggtgaacctgaacctgtggcagaagctgaagctaagcagagatgatgccaagcctctgctgagactgaagggattcccttcctttcctctggtcgagagacaggccaacgaagtggactggtgggacatggtgtgtaacgtgaagaagctgatcaacgagaaaaaggaggatggcaaggtgttttggcagaatctggctggctacaagagacaggaagccctgagaccatacctgagcagcgaggaagatcggaagaagggaaagaaattcgctcggtaccagctgggcgacctgctgctgcacctggaaaagaagcacggcgaggactggggaaaggtgtacgacgaggcctgggagcggattgacaagaaagtggaaggcctgagcaagcacatcaagctggaagaggaacggagaagcgaggacgcccagagcaaggccgccctgaccgactggctgcgggctaaggccagcttcgtgatcgagggcctgaaggaggccgacaaggacgagttctgcagatgcgagctgaagctgcagaagtggtacggggacctgcggggaaagcccttcgccatcgaagccgagaacagcatcctggacatcagcggcttcagcaagcagtacaactgtgccttcatctggcagaaggacggcgtgaagaagctgaacctgtacctgatcatcaactacttcaagggcggcaagctgcggttcaagaagatcaaacctgaagccttcgaagccaacagattctacaccgtgatcaacaaaaagagcggcgagatcgtgcccatggaggtgaacttcaacttcgacgaccccaacctgatcatcctgcctctggcctttggcaagagacagggcagagaattcatctggaacgacctgctgtccctggaaaccggcagcctgaagctggccaacggaagagtgatcgagaagacactgtacaacagaagaacccggcaggatgagcctgccctgttcgtggccctgaccttcgagcggcgggaggtcctggactcctccaatatcaaaccaatgaacctgatcggcgtggcaagaggcgaaaacatccccgccgtgatcgccctgaccgaccccgagggctgcccactgagccggtttaaggatagcctgggaaacccaacccacatcctgagaatcggcgagagctataaggagaagcagcggaccatccaggccaagaaggaggtggagcagcggagagccggcggctacagccggaagtacgccagcaaagccaagaatctggcagacgatatggtgagaaacaccgctagagatctgctgtactacgccgtgacccaggatgccatgctgatcttcgccaacctgagccggggcttcggccggcagggcaagcggaccttcatggccgagagacagtacacacggatggaggactggctgaccgccaagctggcctacgagggcctgagcaagacctacctgtccaagacactggcccagtacacctccaagacatgcagcaactgtgggtttaccatcaccagcgccgactacgacagggtgctggagaagctgaagaagacagcaacaggctggatgaccacaattaacggcaaggagctgaaggtggagggccagattacctactacaacagatacaagagacagaacgtagtcaaggacctgtccgtcgagctggatagactgagcgaagaatctgtgaacaacgacatctcctcctggacaaagggcagaagcggagaagctctgagcctcctgaagaaaagattctcccatagacccgtgcaggagaagttcgtgtgcctgaactgcggcttcgagacacacgcagccgagcaagccgccctgaacatcgccagatcctggctgttcctgcggagccaggagtacaagaaataccagacaaacaagacaaccggcaacaccgataagagagccttcgtcgagacctggcagtccttttaccggaagaagcttaaggaggtgtggaaacctgccgtgcggtctggcggatctggcggaggctccaccagccccaagaaaaagagaaaagtctaatagataagctgccttctgcggggcttgccttctggccatgcccttcttctctcccttgcacctgtacctcttggtctttgaataaagcctgagtaggaagtctagaaaaaaaaaaaaaaaaaaaaaaaaaaaaaaaaaaaaaaaaaaaaaaaaaaaaaaaaaaaaaaaaaaaaaaaaaaaaaaa

SEQ ID NO: 1958 - DNA, 39 bp, synthetic construct
  source 1..39: mol_type = other DNA
atggcccctgctgccaagagagtgaagctggatagcaga

SEQ ID NO: 1959 - DNA, 2937 bp, synthetic construct
  source 1..2937: mol_type = other DNA
caggagatcaagcggattaataaaattcggagaagactggtgaaggattctaacacaaagaaggctggcaagacacggggccctatgaagacactgctggtgagagtgatgacacccgacctgagagaaagactggaaaacctgagaaagaagcctgagaatatcccccagcccatcagcaacacaagccgggccaacctgaataagctgctgaccgactacaccgaaatgaagaaggccatcctgcacgtgtattgggaagagttccagaaagacccagtcggcctgatgagcagagtggctcagcctgccagcaagaagatcgatcagaacaagctgaagcccgaaatggacgagaaggggaacctgacaaccgccggctttgcctgtagccagtgcggccagcccctgtttgtgtacaaactggaacaggtgagcgaaaagggcaaggcttacacgaattacttcggcagatgcaacgtggccgagcacgagaagctgatcaagctggcccagctgaagcctgagaaggatagcgatgaggcagtgacatattccctgggcaagttcggacagcgggccctggatttttattccattcatgtgaccaaggaatccacccaccccgtcaagcctcttgcccaaattgccggcaacagatacgcctccagccccgtgggcaaggccctgagcgacgcctgtatgggcaccatcgccagcttcctgtctaagtaccaggacattatcatcgagcaccagaaggtggtgaagggcaaccagaagagactggagagcctgcgcgagctggccggcaaggaaaacctggagtatcctagcgtgaccctgcctcctcagcctcatacaaaggagggcgtggatgcctacaacgaagtgatcgcccgggtgcggatgtgggtgaacctgaatctgtggcagaagctgaagctgtctagagacgacgccaagcccctgctgagactgaagggcttccccagcttccctctggtggagagacaggcaaatgaagtggactggtgggacatggtgtgtaacgtgaagaagctgatcaatgagaagaaggaggacggcaaagtgttctggcagaatctggccggctacaagcgtcaggaggccctgcggccctacctgagcagcgaggaagacagaaagaagggcaagaagttcgcccggtatcagctgggggacctgctgctgcacctcgagaagaagcacggcgaagactgggggaaggtgtacgatgaggcctgggagcggatcgataagaaggtggagggcctgagcaagcacatcaagctggaggaggaacggagatctgaggacgcccagagcaaggccgccctgaccgactggctgagagccaaggccagcttcgtcatcgaggggctgaaggaggccgacaaggacgagttctgccggtgcgaactgaagctgcagaagtggtacggagatctgagaggcaaacctttcgccatcgaggccgagaacagcatcctggacatcagcggcttcagcaagcagtacaactgcgcctttatttggcagaaggacggagtgaagaagctgaacctgtacctgatcatcaactatttcaagggcggcaagctgagattcaagaagatcaagcctgaagccttcgaggccaacagattctacaccgtgattaacaagaaaagcggagagatcgtgccaatggaagtgaacttcaacttcgacgaccctaacctgatcatcctgcccctggcatttggcaagcggcagggcagagagttcatctggaacgacctgctgtctctggagaccggcagcctgaagctggccaacggcagagtgatcgagaagacactgtacaacagacgaaccagacaagacgagcccgccctgtttgtggccctgaccttcgagagaagagaggtgctggacagcagcaatatcaagcctatgaacctgatcggcgtggaccggggcgagaacatccctgccgtgatcgcccttaccgaccccgagggatgccctctgagccggtttaaagacagcctgggcaaccctacccacatcctgagaattggcgagtcctacaaggagaagcagagaaccatccaggccaagaaggaggtggagcagcggcgggctggcggctactcccggaagtacgccagcaaggccaagaacctggccgacgacatggttagaaataccgccagagacctcctgtactacgctgtgacccaggacgccatgctgatcttcgagaacctgagcagaggcttcggcagacagggcaagagaaccttcatggccgagagacagtacacccggatggaggactggctgaccgccaagctggcctacgagggcctgccctctaagacctacctgtccaagaccttggcacagtacaccagcaagacatgctctaactgcggcttcacaatcacgagcgccgactacgaccgggtgctggagaaactgaagaagaccgccacaggctggatgaccaccattaacggcaaggagctgaaggtggagggccagatcacctactacaacaggtacaaacggcagaacgtggtgaaggacctgagcgtggaactggatagactgagcgaggaaagcgtaaacaatgacatcagcagctggaccaagggccggagcggcgaggccctgagcctgctgaagaagagattctcccacagaccagtgcaggagaagttcgtgtgtctgaactgcggcttcgagacccacgccgacgagcaagccgccctgaacatcgcccggtcttggcttttcctgcggagccaggagtacaagaagtaccagacaaacaagaccacaggcaacacagacaagagagccttcgtcgagacctggcagagcttctacagaaagaagctgaaggaggtgtggaagcctgccgtg

SEQ ID NO: 1960 - DNA, 43 bp, synthetic construct
  source 1..43: mol_type = other DNA
ggaagccccgctgccaagagagtgaagctggactaatagataa

SEQ ID NO: 1961 - DNA, 80 bp, synthetic construct
  source 1..80: mol_type = other DNA
aaaaaaaaaaaaaaaaaaaaaaaaaaaaaaaaaaaaaaaaaaaaaaaaaaaaaaaaaaaaaaaaaaaaaaaaaaaaaaaa

SEQ ID NO: 1962 - RNA, 3241 nt, synthetic construct
  source 1..3241: mol_type = other RNA
  modified_base 1..3241: mod_base = OTHER; note = Each t is m1f
aaataagagagaaaagaagagtaagaagaaatataagagccaccatggcccctgctgccaagagagtgaagctggatagcagacaggagatcaagcggattaataaaattcggagaagactggtgaaggattctaacacaaagaaggctggcaagacacggggccctatgaagacactgctggtgagagtgatgacacccgacctgagagaaagactggaaaacctgagaaagaagcctgagaatatcccccagcccatcagcaacacaagccgggccaacctgaataagctgctgaccgactacaccgaaatgaagaaggccatcctgcacgtgtattgggaagagttccagaaagacccagtcggcctgatgagcagagtggctcagcctgccagcaagaagatcgatcagaacaagctgaagcccgaaatggacgagaaggggaacctgacaaccgccggctttgcctgtagccagtgcggccagcccctgtttgtgtacaaactggaacaggtgagcgaaaagggcaaggcttacacgaattacttcggcagatgcaacgtggccgagcacgagaagctgatcaagctggcccagctgaagcctgagaaggatagcgatgaggcagtgacatattccctgggcaagttcggacagcgggccctggatttttattccattcatgtgaccaaggaatccacccaccccgtcaagcctcttgcccaaattgccggcaacagatacgcctccagccccgtgggcaaggccctgagcgacgcctgtatgggcaccatcgccagcttcctgtctaagtaccaggacattatcatcgagcaccagaaggtggtgaagggcaaccagaagagactggagagcctgcgcgagctggccggcaaggaaaacctggagtatcctagcgtgaccctgcctcctcagcctcatacaaaggagggcgtggatgcctacaacgaagtgatcgcccgggtgcggatgtgggtgaacctgaatctgtggcagaagctgaagctgtctagagacgacgccaagcccctgctgagactgaagggcttccccagcttccctctggtggagagacaggcaaatgaagtggactggtgggacatggtgtgtaacgtgaagaagctgatcaatgagaagaaggaggacggcaaagtgttctggcagaatctggccggctacaagcgtcaggaggccctgcggccctacctgagcagcgaggaagacagaaagaagggcaagaagttcgcccggtatcagctgggggacctgctgctgcacctcgagaagaagcacggcgaagactgggggaaggtgtacgatgaggcctgggagcggatcgataagaaggtggagggcctgagcaagcacatcaagctggaggaggaacggagatctgaggacgcccagagcaaggccgccctgaccgactggctgagagccaaggccagcttcgtcatcgaggggctgaaggaggccgacaaggacgagttctgccggtgcgaactgaagctgcagaagtggtacggagatctgagaggcaaacctttcgccatcgaggccgagaacagcatcctggacatcagcggcttcagcaagcagtacaactgcgcctttatttggcagaaggacggagtgaagaagctgaacctgtacctgatcatcaactatttcaagggcggcaagctgagattcaagaagatcaagcctgaagccttcgaggccaacagattctacaccgtgattaacaagaaaagcggagagatcgtgccaatggaagtgaacttcaacttcgacgaccctaacctgatcatcctgcccctggcatttggcaagcggcagggcagagagttcatctggaacgacctgctgtctctggagaccggcagcctgaagctggccaacggcagagtgatcgagaagacactgtacaacagacgaaccagacaagacgagcccgccctgtttgtggccctgaccttcgagagaagagaggtgctggacagcagcaatatcaagcctatgaacctgatcggcgtggaccggggcgagaacatccctgccgtgatcgcccttaccgaccccgagggatgccctctgagccggtttaaagacagcctgggcaaccctacccacatcctgagaattggcgagtcctacaaggagaagcagagaaccatccaggccaagaaggaggtggagcagcggcgggctggcggctactcccggaagtacgccagcaaggccaagaacctggccgacgacatggttagaaataccgccagagacctcctgtactacgctgtgacccaggacgccatgctgatcttcgagaacctgagcagaggcttcggcagacagggcaagagaaccttcatggccgagagacagtacacccggatggaggactggctgaccgccaagctggcctacgagggcctgccctctaagacctacctgtccaagaccttggcacagtacaccagcaagacatgctctaactgcggcttcacaatcacgagcgccgactacgaccgggtgctggagaaactgaagaagaccgccacaggctggatgaccaccattaacggcaaggagctgaaggtggagggccagatcacctactacaacaggtacaaacggcagaacgtggtgaaggacctgagcgtggaactggatagactgagcgaggaaagcgtaaacaatgacatcagcagctggaccaagggccggagcggcgaggccctgagcctgctgaagaagagattctcccacagaccagtgcaggagaagttcgtgtgtctgaactgcggcttcgagacccacgccgacgagcaagccgccctgaacatcgcccggtcttggcttttcctgcggagccaggagtacaagaagtaccagacaaacaagaccacaggcaacacagacaagagagccttcgtcgagacctggcagagcttctacagaaagaagctgaaggaggtgtggaagcctgccgtgggaagccccgctgccaagagagtgaagctggactaatagataagctgccttctgcggggcttgccttctggccatgcccttcttctctcccttgcacctgtacctcttggtctttgaataaagcctgagtaggaagtctagaaaaaaaaaaaaaaaaaaaaaaaaaaaaaaaaaaaaaaaaaaaaaaaaaaaaaaaaaaaaaaaaaaaaaaaaaaaaaaaa

SEQ ID NO: 1963 - RNA, 20 nt, synthetic construct
  source 1..20: mol_type = other RNA
gaggaggacggcctggccga

SEQ ID NO: 1964 - RNA, 20 nt, synthetic construct
  source 1..20: mol_type = other RNA
agaaagagcaagcctcatgt

SEQ ID NO: 1965 - RNA, 20 nt, synthetic construct
  source 1..20: mol_type = other RNA
agggatttatactacaaaga

SEQ ID NO: 1966 - RNA, 20 nt, synthetic construct
  source 1..20: mol_type = other RNA
gttaatgtttaatcagatag

SEQ ID NO: 1967 - RNA, 20 nt, synthetic construct
  source 1..20: mol_type = other RNA
gggtctgagcctggaggagt

SEQ ID NO: 1968 - RNA, 20 nt, synthetic construct
  source 1..20: mol_type = other RNA
gctgaaacagatggaatact

SEQ ID NO: 1969 - RNA, 20 nt, synthetic construct
  source 1..20: mol_type = other RNA
tcatctgcactcgtggccac

SEQ ID NO: 1970 - DNA, 33 bp, synthetic construct
  source 1..33: mol_type = other DNA
atggccccaaagaagaagcggaaggtctctaga

SEQ ID NO: 1971 - DNA, 408 bp, synthetic construct
  source 1..408: mol_type = other DNA
atggagcggctggtgtatgaggtgcgccagaagtgcagaaacatcgaggacatttgtatctcatgtgggagcctcaatgtcaccctggagcacccactcttcattggaggcatgtgccagaactgtaagaactgcttcttggagtgtgcttaccagtatgacgacgatgggtaccagtcctattgcaccatctgctgtggggggcgtgaagtgctcatgtgtgggaacaacaactgctgcaggtgcttttgtgtcgagtgtgtggatctcttggtggggccaggagctgctcaggcagccattaaggaagacccctggaactgctacatgtgcgggcataagggcacctatgggctgctgcgaagacgggaagactggccttctcgactccagatgttctttgccaat

SEQ ID NO: 1972 - DNA, 903 bp, synthetic construct
  source 1..903: mol_type = other DNA
aaccatgaccaggaatttgaccccccaaaggtttacccacctgtgccagctgagaagaggaagcccatccgcgtgctgtctctctttgatgggattgctacagggctcctggtgctgaaggacctgggcatccaagtggaccgctacatcgcctccgaggtgtgtgaggactccatcacggtgggcatggtgcggcaccagggaaagatcatgtacgtcggggacgtccgcagcgtcacacagaagcatatccaggagtggggcccattcgacctggtgattggaggcagtccctgcaacgacctctccattgtcaaccctgcccgcaagggactttatgagggtactggccgcctcttctttgagttctaccgcctcctgcatgatgcgcggcccaaggagggagatgatcgccccttcttctggctctttgagaatgtggtggccatgggcgttagtgacaagagggacatctcgcgatttcttgagtctaaccccgtgatgattgacgccaaagaagtgtctgctgcacacagggcccgttacttctggggtaaccttcctggcatgaacaggcctttggcatccactgtgaatgataagctggagctgcaagagtgtctggagcacggcagaatagccaagttcagcaaagtgaggaccattaccaccaggtcaaactctataaagcagggcaaagaccagcatttccccgtcttcatgaacgagaaggaggacatcctgtggtgcactgaaatggaaagggtgtttggcttccccgtccactacacagacgtgtccaacatgagccgcttggcgaggcagagactgctgggccggtcgtggagcgtgccggtcatccgccacctcttcgctccgctgaaggaatattttgcttgtgtg

SEQ ID NO: 1973 - DNA, 81 bp, synthetic construct
  source 1..81: mol_type = other DNA
tctagcggcaatagtaacgctaacagccgcgggccgagcttcagcagcggcctggtgccgttaagcttgcgcggcagccat

SEQ ID NO: 1974 - DNA, 645 bp, synthetic construct
  source 1..645: mol_type = other DNA
atgggccctatggagatatacaagacagtgtctgcatggaagagacagccagtgcgggtactgagcctcttcagaaacatcgacaaggtactaaagagtttgggcttcttggaaagcggttctggttctgggggaggaacgctgaagtacgtggaagatgtcacaaatgtcgtgaggagggacgtggagaaatggggcccctttgacctggtgtacggctcgacgcagcccctaggcagctcttgtgatcgctgtcccggctggtacatgttccagttccaccggattctgcagtatgcgctgcctcgccaggagagtcagcggcccttcttctggatattcatggacaatctgctgctgactgaggatgaccaagagacaactacccgcttccttcagacagaggctgtgaccctccaggatgtccgtggcagagactaccagaatgctatgcgggtgtggagcaacattccagggctgaagagcaagcatgcgcccctgaccccaaaggaagaagagtatctgcaagcccaagtcagaagcaggagcaagctggacgccccgaaagttgacctcctggtgaagaactgccttctcccgctgagagagtacttcaagtatttttctcaaaactcacttcctctt

SEQ ID NO: 1975 - DNA, 18 bp, synthetic construct
  source 1..18: mol_type = other DNA
ggcggttccggcggagga

SEQ ID NO: 1976 - DNA, 243 bp, synthetic construct
  source 1..243: mol_type = other DNA
gttcgtatgcctgttacttttgaagatgttgctgttacttttactcaagaagaatgggggcaattagatcctgctcaacgtactttatatcaagaagttatgttagagacttgtggtttattagtttctttaggttgtcctttacctaaacctgaattattttatcctttagatcattctcctgaattacaaactttaaaacgtggtttatctcctaattcttgtcctggtgattctactaaa

SEQ ID NO: 1977 - DNA, 243 bp, synthetic construct
  source 1..243: mol_type = other DNA
actcaagttcctgttacctttgaagatgttgctgtttatttttgtgaaggtgaatgggaaactttagctgaatggcaaaaagaattatatcgtgaaactatgaaagagaattatgaaactttaacttctttaggtttttcttctaaaaaaccttctttaatttctaaaatagaacgtgaagaagatccttgtgtgcgtgataaacaagattctcgtgatcgtcgtcgtttacgttcttgttgg

SEQ ID NO: 1978 - DNA, 243 bp, synthetic construct
  source 1..243: mol_type = other DNA
tctactcctgttacttttgaagatgttgttgtttattttactgctgctgaatgggttcatttaactaattggcaacgtgatttttatcaagctgttatgatggaaacttatgaattagttgcttctgttgctggtgatggtgttcctatggctgaagatgaagaaggtggtgttgaacgtcctgtttggcaatatattcctcgtggtaaacgtcgtcgtaaaactcctcaacctcgtgctgat

SEQ ID NO: 1979-1980 - skipped (2 entries)

SEQ ID NO: 1981 - DNA, 2931 bp, synthetic construct
  source 1..2931: mol_type = other DNA
caagagatcaagagaatcaacaagatcagaaggagactggtcaaggacagcaacacaaagaaggccggcaagacaggccccatgaaaaccctgctcgtcagagtgatgacccctgacctgagagagcggctggaaaacctgagaaagaagcccgagaacatccctcagcctatcagcaacaccagcagggccaacctgaacaagctgctgaccgactacaccgagatgaagaaagccatcctgcacgtgtactgggaagagttccagaaagaccccgtgggcctgatgagcagagttgctcagcctgccagcaagaagatcgaccagaacaagctgaagcccgagatggacgagaagggcaatctgaccacagccggctttgcctgctctcagtgtggccagcctctgttcgtgtacaagctggaacaggtgtccgagaaaggcaaggcctacaccaactacttcggcagatgtaacgtggccgagcacgagaagctgattctgctggcccagctgaaacctgagaaggactctgatgaggccgtgacctacagcctgggcaagtttggacagagagccctggacttctacagcatccacgtgaccaaagaaagcacacaccccgtgaagcccctggctcagatcgccggcaatagatacgcctctggacctgtgggcaaagccctgtccgatgcctgcatgggaacaatcgccagcttcctgagcaagtaccaggacatcatcatcgagcaccagaaggtggtcaagggcaaccagaagagactggaaagcctgagggagctggccggcaaagagaacctggaataccccagcgtgaccctgcctcctcagcctcacacaaaagaaggcgtggacgcctacaacgaagtgatcgccagagtgagaatgtgggtcaacctgaacctgtggcagaagctgaaactgtccagggacgacgccaagcctctgctgagactgaagggcttccctagcttccctctggtggaaagacaggccaatgaagtggattggtgggacatggtctgcaacgtgaagaagctgatcaacgagaagaaagaggatggcaaggttttctggcagaacctggccggctacaagagacaagaagccctgaggccttacctgagcagcgaagaggaccggaagaagggcaagaagttcgccagataccagctgggcgacctgctgctgcacctggaaaagaagcacggcgaggactggggcaaagtgtacgatgaggcctgggagagaatcgacaagaaggtggaaggcctgagcaagcacattaagctggaagaggaaagaaggagcgaggacgcccaatctaaagccgctctgaccgattggctgagagccaaggccagctttgtgatcgagggcctgaaagaggccgacaaggacgagttctgcagatgcgagctgaagctgcagaagtggtacggcgatctgagaggcaagcccttcgccattgaggccgagaacagcatcctggacatcagcggcttcagcaagcagtacaactgcgccttcatttggcagaaagacggcgtcaagaaactgaacctgtacctgatcatcaattacttcaaaggcggcaagctgcggttcaagaagatcaaacccgaggccttcgaggctaacagattctacaccgtgatcaacaaaaagtccggcgagatcgtgcccatggaagtgaacttcaacttcgacgaccccaacctgattatcctgcctctggccttcggcaagagacagggcagagagttcatctggaacgatctgctgagcctggaaaccggctctctgaagctggccaatggcagagtgatcgagaaaaccctgtacaacaggagaaccagacaggacgagcctgctctgtttgtggccctgaccttcgagagaagagaggtgctggacagcagcaacatcaagcccatgaacctgatcggcgtggcccggggcgagaatatccctgctgtgatcgccctgacagaccctgaaggatgcccactgagcagattcaaggactccctgggcaaccctacacacatcctgagaatcggcgagagctacaaagagaagcagaggacaatccaggccaagaaagaggtggaacagagaagagccggcggatactctaggaagtacgccagcaaggccaagaatctggccgacgacatggtccgaaacaccgccagagatctgctgtactacgccgtgacacaggacgccatgctgatcttcgcgaatctgagcagaggcttcggccggcagggcaagagaacctttatggccgagaggcagtacaccagaatggaagattggctcacagctaaactggcctacgagggactgagcaagacctacctgtccaaaacactggcccagtatacctccaagacctgcagcaattgcggcttcaccatcaccagcgccgactacgacagagtgctggaaaagctcaagaaaaccgccaccggctggatgaccaccatcaacggcaaagagctgaaggttgagggccagatcacctactacaacaggtacaagaggcagaacgtcgtgaaggatctgagcgtggaactggacagactgagcgaagagagcgtgaacaacgacatcagcagctggacaaagggcagatcaggcgaggctctgagcctgctgaagaagaggtttagccacagacctgtgcaagagaagttcgtgtgcctgaactgcggcttcgagacacacgccgctgaacaggctgccctgaacattgccagaagctggctgttcctgagaagccaagagtacaagaagtaccagaccaacaagaccaccggcaacaccgacaagagggcctttgtggaaacctggcagagcttctacagaaaaaagctgaaagaagtctggaagcccgccgtg

SEQ ID NO: 1982 - DNA, 33 bp, synthetic construct
  source 1..33: mol_type = other DNA
cgatcgggcggttccggcggaggttccactagt

SEQ ID NO: 1983 - DNA, 12 bp, synthetic construct
  source 1..12: mol_type = other DNA
ggaagtgggagc

SEQ ID NO: 1984 - DNA, 21 bp, synthetic construct
  source 1..21: mol_type = other DNA
cccaagaaaaagagaaaagtg

SEQ ID NO: 1985 - protein, 11 aa, synthetic construct
MAPKKKRKVSR

SEQ ID NO: 1986 - protein, 136 aa, synthetic construct
MERLVYEVRQKCRNIEDICISCGSLNVTLEHPLFIGGMCQNCKNCFLECAYQYDDDGYQSYCTICCGGREVLMCGNNNCCRCFCVECVDLLVGPGAAQAAIKEDPWNCYMCGHKGTYGLLRRREDWPSRLQMFFAN

SEQ ID NO: 1987 - protein, 11 aa, synthetic construct
RSGGSGGGSTS

SEQ ID NO: 1988 - protein, 4 aa, synthetic construct
GSGS

SEQ ID NO: 1989 - RNA, 20 nt, synthetic construct
  source 1..20: mol_type = other RNA
ggagggagagggcggcggcg

SEQ ID NO: 1990 - RNA, 20 nt, synthetic construct
  source 1..20: mol_type = other RNA
gccaggacctcagggcccag

SEQ ID NO: 1991 - DNA, 20 bp, synthetic construct
  source 1..20: mol_type = other DNA
actgggaggctcagcccatg

SEQ ID NO: 1992 - DNA, 20 bp, synthetic construct
  source 1..20: mol_type = other DNA
tgttctgtcttgaactagct

SEQ ID NO: 1993 - DNA, 20 bp, synthetic construct
  source 1..20: mol_type = other DNA
tgagtgtcttgtcttgctca

SEQ ID NO: 1994 - DNA, 20 bp, synthetic construct
  source 1..20: mol_type = other DNA
cgagacgtaattacgtctcg

SEQ ID NO: 1995 - RNA, 20 nt, synthetic construct
  source 1..20: mol_type = other RNA
actgggaggctcagcccatg

SEQ ID NO: 1996 - RNA, 20 nt, synthetic construct
  source 1..20: mol_type = other RNA
tgttctgtcttgaactagct

SEQ ID NO: 1997 - RNA, 20 nt, synthetic construct
  source 1..20: mol_type = other RNA
tgagtgtcttgtcttgctca

SEQ ID NO: 1998 - RNA, 20 nt, synthetic construct
  source 1..20: mol_type = other RNA
ggaatgcccgccagcgcgac

SEQ ID NO: 1999 - DNA, 57 bp, synthetic construct
  source 1..57: mol_type = other DNA
atggcccctaagaagaagcgtaaagtgagccggggcggcagcggcggcggcagcgcc

SEQ ID NO: 2000 - DNA, 33 bp, synthetic construct
  source 1..33: mol_type = other DNA
cggtctggcggatctggcggaggctccacaagc

SEQ ID NO: 2001 - DNA, 27 bp, synthetic construct
  source 1..27: mol_type = other DNA
accagccccaagaaaaagagaaaagtc

SEQ ID NO: 2002 - DNA, 48 bp, synthetic construct
  source 1..48: mol_type = other DNA
gactacaaggatgacgatgacaaggactacaaggatgacgacgacaag

SEQ ID NO: 2003 - DNA, 26 bp, synthetic construct
  source 1..26: mol_type = other DNA
taatagataagcggccgcttaattaa

SEQ ID NO: 2004 - DNA, 60 bp, synthetic construct
  source 1..60: mol_type = other DNA
atggcccctaagaagaagcgtaaagtgagccgggtgaacggcagcggcagcggcggcggc

SEQ ID NO: 2005 - DNA, 264 bp, synthetic construct
  source 1..264: mol_type = other DNA
ggcggcccaagcagcggcgcccctcctcccagcggcggcagcccagccggctccccaacctctaccgaggagggcacctctgagtccgccacccccgagagcggccctggcacctccaccgagcccagcgagggcagcgcacccggcagccctgccggcagccccacctccacagaggagggaaccagcaccgagcccagcgaaggcagcgccccaggcaccagcaccgagcctagtgagggcggctctggcggcggcagcgcc

SEQ ID NO: 2006 - RNA, 3644 nt, synthetic construct
  source 1..3644: mol_type = other RNA
  modified_base 1..3644: mod_base = OTHER; note = Each t is m1f
aaataagagagaaaagaagagtaagaagaaatataagagccaccatggcccctaagaagaagcgtaaagtgagccggggcggcagcggcggcggcagcgcccaggagattaaacggatcaacaagatcagaagaagacttgtgaaagacagcaacaccaagaaggccggcaagacaggccccatgaaaaccctgctggttagagtgatgacacccgatctgagagagcggctggaaaacctgagaaagaagcctgaaaatatcccccagcccatcagcaatacatctagagccaacctgaataagctgctgaccgattacaccgaaatgaagaaggcgatcctgcatgtgtactgggaagagttccagaaggaccctgtgggcctgatgagccgggtggcccagcctgccagcaagaagatcgatcagaacaagctgaaacctgagatggacgagaagggcaacctgaccaccgccggctttgcctgctctcagtgtggccagcccctgttcgtgtacaagctggagcaggtgtctgagaagggcaaggcttacaccaactacttcggacggtgcaatgtggccgagcacgaaaagctgatcctgctggcccagctgaagcccgagaaggatagcgacgaagccgtgacatatagcctgggaaagtttgggcagagggccctggatttctacagcattcatgtgaccaaggagtccacccaccccgtgaagcccctggcccagatcgccggaaacagatacgcctccggacctgtgggaaaggccctgagcgacgcatgtatgggcacaatcgcctccttcctgtctaagtaccaggacatcatcatcgaacaccagaaggtggtgaagggcaaccagaagagactggagagcctgcgggagctggccggcaaggaaaacctggaataccctagcgtgaccctgccacctcagcctcacaccaaggagggcgttgatgcctacaacgaagtgatcgcccgggtgcgaatgtgggtgaacctgaacctgtggcagaagctgaagctaagcagagatgatgccaagcctctgctgagactgaagggattcccttcctttcctctggtcgagagacaggccaacgaagtggactggtgggacatggtgtgtaacgtgaagaagctgatcaacgagaaaaaggaggatggcaaggtgttttggcagaatctggctggctacaagagacaggaagccctgagaccatacctgagcagcgaggaagatcggaagaagggaaagaaattcgctcggtaccagctgggcgacctgctgctgcacctggaaaagaagcacggcgaggactggggaaaggtgtacgacgaggcctgggagcggattgacaagaaagtggaaggcctgagcaagcacatcaagctggaagaggaacggagaagcgaggacgcccagagcaaggccgccctgaccgactggctgcgggctaaggccagcttcgtgatcgagggcctgaaggaggccgacaaggacgagttctgcagatgcgagctgaagctgcagaagtggtacggggacctgcggggaaagcccttcgccatcgaagccgagaacagcatcctggacatcagcggcttcagcaagcagtacaactgtgccttcatctggcagaaggacggcgtgaagaagctgaacctgtacctgatcatcaactacttcaagggcggcaagctgcggttcaagaagatcaaacctgaagccttcgaagccaacagattctacaccgtgatcaacaaaaagagcggcgagatcgtgcccatggaggtgaacttcaacttcgacgaccccaacctgatcatcctgcctctggcctttggcaagagacagggcagagaattcatctggaacgacctgctgtccctggaaaccggcagcctgaagctggccaacggaagagtgatcgagaagacactgtacaacagaagaacccggcaggatgagcctgccctgttcgtggccctgaccttcgagcggcgggaggtcctggactcctccaatatcaaaccaatgaacctgatcggcgtggcaagaggcgaaaacatccccgccgtgatcgccctgaccgaccccgagggctgcccactgagccggtttaaggatagcctgggaaacccaacccacatcctgagaatcggcgagagctataaggagaagcagcggaccatccaggccaagaaggaggtggagcagcggagagccggcggctacagccggaagtacgccagcaaagccaagaatctggcagacgatatggtgagaaacaccgctagagatctgctgtactacgccgtgacccaggatgccatgctgatcttcgccaacctgagccggggcttcggccggcagggcaagcggaccttcatggccgagagacagtacacacggatggaggactggctgaccgccaagctggcctacgagggcctgagcaagacctacctgtccaagacactggcccagtacacctccaagacatgcagcaactgtgggtttaccatcaccagcgccgactacgacagggtgctggagaagctgaagaagacagcaacaggctggatgaccacaattaacggcaaggagctgaaggtggagggccagattacctactacaacagatacaagagacagaacgtagtcaaggacctgtccgtcgagctggatagactgagcgaagaatctgtgaacaacgacatctcctcctggacaaagggcagaagcggagaagctctgagcctcctgaagaaaagattctcccatagacccgtgcaggagaagttcgtgtgcctgaactgcggcttcgagacacacgcagccgagcaagccgccctgaacatcgccagatcctggctgttcctgcggagccaggagtacaagaaataccagacaaacaagacaaccggcaacaccgataagagagccttcgtcgagacctggcagtccttttaccggaagaagcttaaggaggtgtggaaacctgccgtgcggtctggcggatctggcggaggctccacaagcatgaacaactcccagggcagagtgaccttcgaggacgtgaccgtgaattttacacagggagagtggcagagactgaaccccgagcagagaaacctgtaccgggatgtgatgctggaaaactacagcaatctggtgtccgtgggccagggcgagaccacaaagcctgacgtgatcctgcgtctggagcagggcaaggaaccctggctggaggaggaggaggtgctgggaagcggacgggccgagaagaacggcgacatcggcggacagatctggaagcctaaggacgtgaaagaaagcctgaccagccccaagaaaaagagaaaagtcgactacaaggatgacgatgacaaggactacaaggatgacgacgacaagtaatagataagcggccgcttaattaagctgccttctgcggggcttgccttctggccatgcccttcttctctcccttgcacctgtacctcttggtctttgaataaagcctgagtaggaagtctagaaaaaaaaaaaaaaaaaaaaaaaaaaaaaaaaaaaaaaaaaaaaaaaaaaaaaaaaaaaaaaaaaaaaaaaaaaaaaaaa

SEQ ID NO: 2007 - RNA, 5543 nt, synthetic construct
  source 1..5543: mol_type = other RNA
  modified_base 1..5543: mod_base = OTHER; note = Each t is m1f
aaataagagagaaaagaagagtaagaagaaatataagagccaccatggcccctaagaagaagcgtaaagtgagccgggtgaacggcagcggcagcggcggcggcatgaaccacgaccaggagttcgacccccctaaggtgtaccctcccgtccccgccgagaagagaaagcccatccgggtcctgagcctgttcgatggcatcgccaccggtctgctggtgctgaaggacctgggcatccaggtggataggtacattgcctccgaggtgtgcgaggactccatcaccgtgggaatggtgcgtcatcagggcaagatcatgtacgtgggcgacgtgcggagcgtgacacagaagcatatccaggagtggggccctttcgacctggtgatcggcggcagcccttgcaatgacctgagcatcgtgaacccagcccggaagggcctgtacgagggaaccggcagactgttcttcgagttttacagactgctgcacgacgcccggcctaaggaaggcgacgaccggcccttcttttggctgttcgagaatgtggtggccatgggagtcagcgacaagcgggatattagccggttcctggagagcaaccccgtgatgatcgatgccaaggaagtgagcgccgcccaccgggccagatacttctggggcaatctgcctggcatgaacagacccctggccagcaccgtgaacgacaagctggagctgcaggagtgcctggagcacggccggatcgccaagttcagcaaggtgagaaccatcaccacccgaagcaacagcatcaaacaaggcaaggaccagcactttcctgtgttcatgaacgagaaggaggacatcctgtggtgtaccgagatggagagagtgttcgggttcccagtccactacacagatgtcagcaacatgtctagactggccagacagagactgctgggaagaagctggtccgtccctgtgatcagacacctgttcgcccctctgaaggagtacttcgcctgcgtgagcagcggcaacagcaacgccaacagccggggccccagcttctctagcggcctggtgccactgtccctgagagggagccacatgggccccatggagatctacaaaaccgtgagcgcctggaagcggcagcctgtgcgcgtgctgagcctgtttcggaatatcgataaagtcctgaaaagcctgggattcctggagagcggctctggctccggcggtggcaccctgaagtacgtggaggatgtgacaaacgtggtcagacgggatgtggagaagtggggccccttcgatctggtgtacggcagcacccaacccctgggcagctcttgtgaccggtgccctggctggtacatgtttcagttccaccggatcctgcagtacgccctgccgagacaggagtcccagcggccattcttttggattttcatggacaacttgctgctgaccgaggatgaccaggaaactaccactcggttcctgcagaccgaagccgtgaccctgcaggacgtgagaggccgggactaccagaacgccatgcgggtgtggtccaacatccctggactgaaaagcaagcacgcacctctgacccctaaagaagaggagtacctgcaggcccaggtgcggagcagaagcaagctggacgcccctaaggtggatctgctggtgaagaattgcctcctgcccctgagagagtacttcaagtatttcagccagaatagtctgcccctgggcggcccaagcagcggcgcccctcctcccagcggcggcagcccagccggctccccaacctctaccgaggagggcacctctgagtccgccacccccgagagcggccctggcacctccaccgagcccagcgagggcagcgcacccggcagccctgccggcagccccacctccacagaggagggaaccagcaccgagcccagcgaaggcagcgccccaggcaccagcaccgagcctagtgagggcggctctggcggcggcagcgcccaggagattaaacggatcaacaagatcagaagaagacttgtgaaagacagcaacaccaagaaggccggcaagacaggccccatgaaaaccctgctggttagagtgatgacacccgatctgagagagcggctggaaaacctgagaaagaagcctgaaaatatcccccagcccatcagcaatacatctagagccaacctgaataagctgctgaccgattacaccgaaatgaagaaggcgatcctgcatgtgtactgggaagagttccagaaggaccctgtgggcctgatgagccgggtggcccagcctgccagcaagaagatcgatcagaacaagctgaaacctgagatggacgagaagggcaacctgaccaccgccggctttgcctgctctcagtgtggccagcccctgttcgtgtacaagctggagcaggtgtctgagaagggcaaggcttacaccaactacttcggacggtgcaatgtggccgagcacgaaaagctgatcctgctggcccagctgaagcccgagaaggatagcgacgaagccgtgacatatagcctgggaaagtttgggcagagggccctggatttctacagcattcatgtgaccaaggagtccacccaccccgtgaagcccctggcccagatcgccggaaacagatacgcctccggacctgtgggaaaggccctgagcgacgcatgtatgggcacaatcgcctccttcctgtctaagtaccaggacatcatcatcgaacaccagaaggtggtgaagggcaaccagaagagactggagagcctgcgggagctggccggcaaggaaaacctggaataccctagcgtgaccctgccacctcagcctcacaccaaggagggcgttgatgcctacaacgaagtgatcgcccgggtgcgaatgtgggtgaacctgaacctgtggcagaagctgaagctaagcagagatgatgccaagcctctgctgagactgaagggattcccttcctttcctctggtcgagagacaggccaacgaagtggactggtgggacatggtgtgtaacgtgaagaagctgatcaacgagaaaaaggaggatggcaaggtgttttggcagaatctggctggctacaagagacaggaagccctgagaccatacctgagcagcgaggaagatcggaagaagggaaagaaattcgctcggtaccagctgggcgacctgctgctgcacctggaaaagaagcacggcgaggactggggaaaggtgtacgacgaggcctgggagcggattgacaagaaagtggaaggcctgagcaagcacatcaagctggaagaggaacggagaagcgaggacgcccagagcaaggccgccctgaccgactggctgcgggctaaggccagcttcgtgatcgagggcctgaaggaggccgacaaggacgagttctgcagatgcgagctgaagctgcagaagtggtacggggacctgcggggaaagcccttcgccatcgaagccgagaacagcatcctggacatcagcggcttcagcaagcagtacaactgtgccttcatctggcagaaggacggcgtgaagaagctgaacctgtacctgatcatcaactacttcaagggcggcaagctgcggttcaagaagatcaaacctgaagccttcgaagccaacagattctacaccgtgatcaacaaaaagagcggcgagatcgtgcccatggaggtgaacttcaacttcgacgaccccaacctgatcatcctgcctctggcctttggcaagagacagggcagagaattcatctggaacgacctgctgtccctggaaaccggcagcctgaagctggccaacggaagagtgatcgagaagacactgtacaacagaagaacccggcaggatgagcctgccctgttcgtggccctgaccttcgagcggcgggaggtcctggactcctccaatatcaaaccaatgaacctgatcggcgtggcaagaggcgaaaacatccccgccgtgatcgccctgaccgaccccgagggctgcccactgagccggtttaaggatagcctgggaaacccaacccacatcctgagaatcggcgagagctataaggagaagcagcggaccatccaggccaagaaggaggtggagcagcggagagccggcggctacagccggaagtacgccagcaaagccaagaatctggcagacgatatggtgagaaacaccgctagagatctgctgtactacgccgtgacccaggatgccatgctgatcttcgccaacctgagccggggcttcggccggcagggcaagcggaccttcatggccgagagacagtacacacggatggaggactggctgaccgccaagctggcctacgagggcctgagcaagacctacctgtccaagacactggcccagtacacctccaagacatgcagcaactgtgggtttaccatcaccagcgccgactacgacagggtgctggagaagctgaagaagacagcaacaggctggatgaccacaattaacggcaaggagctgaaggtggagggccagattacctactacaacagatacaagagacagaacgtagtcaaggacctgtccgtcgagctggatagactgagcgaagaatctgtgaacaacgacatctcctcctggacaaagggcagaagcggagaagctctgagcctcctgaagaaaagattctcccatagacccgtgcaggagaagttcgtgtgcctgaactgcggcttcgagacacacgcagccgagcaagccgccctgaacatcgccagatcctggctgttcctgcggagccaggagtacaagaaataccagacaaacaagacaaccggcaacaccgataagagagccttcgtcgagacctggcagtccttttaccggaagaagcttaaggaggtgtggaaacctgccgtgcggtctggcggatctggcggaggctccacaagcatgaacaactcccagggcagagtgaccttcgaggacgtgaccgtgaattttacacagggagagtggcagagactgaaccccgagcagagaaacctgtaccgggatgtgatgctggaaaactacagcaatctggtgtccgtgggccagggcgagaccacaaagcctgacgtgatcctgcgtctggagcagggcaaggaaccctggctggaggaggaggaggtgctgggaagcggacgggccgagaagaacggcgacatcggcggacagatctggaagcctaaggacgtgaaagaaagcctgaccagccccaagaaaaagagaaaagtcgactacaaggatgacgatgacaaggactacaaggatgacgacgacaagtaatagataagcggccgcttaattaagctgccttctgcggggcttgccttctggccatgcccttcttctctcccttgcacctgtacctcttggtctttgaataaagcctgagtaggaagtctagaaaaaaaaaaaaaaaaaaaaaaaaaaaaaaaaaaaaaaaaaaaaaaaaaaaaaaaaaaaaaaaaaaaaaaaaaaaaaaaa

SEQ ID NO: 2008 - protein, 1116 aa, synthetic construct
MAPKKKRKVSRGGSGGGSAQEIKRINKIRRRLVKDSNTKKAGKTGPMKTLLVRVMTPDLRERLENLRKKPENIPQPISNTSRANLNKLLTDYTEMKKAILHVYWEEFQKDPVGLMSRVAQPASKKIDQNKLKPEMDEKGNLTTAGFACSQCGQPLFVYKLEQVSEKGKAYTNYFGRCNVAEHEKLILLAQLKPEKDSDEAVTYSLGKFGQRALDFYSIHVTKESTHPVKPLAQIAGNRYASGPVGKALSDACMGTIASFLSKYQDIIIEHQKVVKGNQKRLESLRELAGKENLEYPSVTLPPQPHTKEGVDAYNEVIARVRMWVNLNLWQKLKLSRDDAKPLLRLKGFPSFPLVERQANEVDWWDMVCNVKKLINEKKEDGKVFWQNLAGYKRQEALRPYLSSEEDRKKGKKFARYQLGDLLLHLEKKHGEDWGKVYDEAWERIDKKVEGLSKHIKLEEERRSEDAQSKAALTDWLRAKASFVIEGLKEADKDEFCRCELKLQKWYGDLRGKPFAIEAENSILDISGFSKQYNCAFIWQKDGVKKLNLYLIINYFKGGKLRFKKIKPEAFEANRFYTVINKKSGEIVPMEVNFNFDDPNLIILPLAFGKRQGREFIWNDLLSLETGSLKLANGRVIEKTLYNRRTRQDEPALFVALTFERREVLDSSNIKPMNLIGVARGENIPAVIALTDPEGCPLSRFKDSLGNPTHILRIGESYKEKQRTIQAKKEVEQRRAGGYSRKYASKAKNLADDMVRNTARDLLYYAVTQDAMLIFANLSRGFGRQGKRTFMAERQYTRMEDWLTAKLAYEGLSKTYLSKTLAQYTSKTCSNCGFTITSADYDRVLEKLKKTATGWMTTINGKELKVEGQITYYNRYKRQNVVKDLSVELDRLSEESVNNDISSWTKGRSGEALSLLKKRFSHRPVQEKFVCLNCGFETHAAEQAALNIARSWLFLRSQEYKKYQTNKTTGNTDKRAFVETWQSFYRKKLKEVWKPAVRSGGSGGGSTSMNNSQGRVTFEDVTVNFTQGEWQRLNPEQRNLYRDVMLENYSNLVSVGQGETTKPDVILRLEQGKEPWLEEEEVLGSGRAEKNGDIGGQIWKPKDVKESLTSPKKKRKV

SEQ ID NO: 2009 - RNA, 20 nt, synthetic construct
  source 1..20: mol_type = other RNA
tcctggcttcctggtgaaga

SEQ ID NO: 2010 - RNA, 20 nt, synthetic construct
  source 1..20: mol_type = other RNA
gcctcgccctccccagacag

SEQ ID NO: 2011 - RNA, 20 nt, synthetic construct
  source 1..20: mol_type = other RNA
cgctacctgcctaaactttg

SEQ ID NO: 2012 - RNA, 20 nt, synthetic construct
  source 1..20: mol_type = other RNA
ccctccaacaatattaacta

SEQ ID NO: 2013 - RNA, 20 nt, synthetic construct
  source 1..20: mol_type = other RNA
ggggtctcccagccacccct

SEQ ID NO: 2014 - RNA, 20 nt, synthetic construct
  source 1..20: mol_type = other RNA
cccctcttaatccccactcc

SEQ ID NO: 2015 - RNA, 20 nt, synthetic construct
  source 1..20: mol_type = other RNA
ctctctctttctgaggctag

SEQ ID NO: 2016 - RNA, 20 nt, synthetic construct
  source 1..20: mol_type = other RNA
taatctccatcctcgtcctg

SEQ ID NO: 2017 - RNA, 14 nt, synthetic construct
  source 1..14: mol_type = other RNA
gaccggccgccacc

SEQ ID NO: 2018 - DNA, 60 bp, synthetic construct
  source 1..60: mol_type = other DNA
atggccccaaagaagaagcggaaggtctctagagttaacggatcaggctctggaggtgga

SEQ ID NO: 2019 - DNA, 906 bp, synthetic construct
  source 1..906: mol_type = other DNA
atgaaccatgaccaggaatttgaccccccaaaggtttacccacctgtgccagctgagaagaggaagcccatccgcgtgctgtctctctttgatgggattgctacagggctcctggtgctgaaggacctgggcatccaagtggaccgctacatcgcctccgaggtgtgtgaggactccatcacggtgggcatggtgcggcaccagggaaagatcatgtacgtcggggacgtccgcagcgtcacacagaagcatatccaggagtggggcccattcgacctggtgattggaggcagtccctgcaacgacctctccattgtcaaccctgcccgcaagggactttatgagggtactggccgcctcttctttgagttctaccgcctcctgcatgatgcgcggcccaaggagggagatgatcgccccttcttctggctctttgagaatgtggtggccatgggcgttagtgacaagagggacatctcgcgatttcttgagtctaaccccgtgatgattgacgccaaagaagtgtctgctgcacacagggcccgttacttctggggtaaccttcctggcatgaacaggcctttggcatccactgtgaatgataagctggagctgcaagagtgtctggagcacggcagaatagccaagttcagcaaagtgaggaccattaccaccaggtcaaactctataaagcagggcaaagaccagcatttccccgtcttcatgaacgagaaggaggacatcctgtggtgcactgaaatggaaagggtgtttggcttccccgtccactacacagacgtgtccaacatgagccgcttggcgaggcagagactgctgggccggtcgtggagcgtgccggtcatccgccacctcttcgctccgctgaaggaatattttgcttgtgtg

SEQ ID NO: 2020 - DNA, 645 bp, synthetic construct
  source 1..645: mol_type = other DNA
atgggccctatggagatatacaagacagtgtctgcatggaagagacagccagtgcgggtactgagcctcttcagaaacatcgacaaggtactaaagagtttgggcttcttggaaagcggttctggttctgggggaggaacgctgaagtacgtggaagatgtcacaaatgtcgtgaggagggacgtggagaaatggggcccctttgacctggtgtacggctcgacgcagcccctaggcagctcttgtgatcgctgtcccggctggtacatgttccagttccaccggatcctgcagtatgcgctgcctcgccaggagagtcagcggcccttcttctggatattcatggacaatctgctgctgactgaggatgaccaagagacaactacccgcttccttcagacagaggctgtgaccctccaggatgtccgtggcagagactaccagaatgctatgcgggtgtggagcaacattccagggctgaagagcaagcatgcgcccctgaccccaaaggaagaagagtatctgcaagcccaagtcagaagcaggagcaagctggacgccccgaaagttgacctcctggtgaagaactgccttctcccgctgagagagtacttcaagtatttttctcaaaactcacttcctctt

SEQ ID NO: 2021 - DNA, 24 bp, synthetic construct
  source 1..24: mol_type = other DNA
ggcggttccggcggaggaagcgct

SEQ ID NO: 2022 - DNA, 300 bp, synthetic construct
  source 1..300: mol_type = other DNA
atgaacaattcccagggaagagtgaccttcgaggatgtcactgtgaacttcacccagggggagtggcagcggctgaatcccgaacagagaaacttgtacagggatgtgatgctggagaattacagcaaccttgtctctgtgggacaaggggaaaccaccaaacccgatgtgatcttgaggttggaacaaggaaaggagccatggttggaggaagaggaagtgctgggaagtggccgtgcagaaaaaaatggggacattggagggcagatttggaagccaaaggatgtgaaagagagtctc

SEQ ID NO: 2023 - DNA, 27 bp, synthetic construct
  source 1..27: mol_type = other DNA
actagtccaaaaaagaagagaaaggta

SEQ ID NO: 2024 - DNA, 48 bp, synthetic construct
  source 1..48: mol_type = other DNA
gattacaaagatgacgatgacaaagactacaaggatgatgatgataag

SEQ ID NO: 2025 - DNA, 11 bp, synthetic construct
  source 1..11: mol_type = other DNA
ggatccggctg

SEQ ID NO: 2026 - RNA, 121 nt, synthetic construct
  source 1..121: mol_type = other RNA
aaaaaaaaaaaaaaaaaaaaaaaaaaaaaaaaaaaaaaaaaaaaaaaaaaaaaaaaaaaaaaaaaaaaaaaaaaaaaaaaaaaaaaaaaaaaaaaaaaaaaaaaaaaaaaaaaaaaaaaaa

SEQ ID NO: 2027 - DNA, 21 bp, synthetic construct
  source 1..21: mol_type = other DNA
ccaaaaaagaagagaaaggta

SEQ ID NO: 2028 - RNA, 5441 nt, synthetic construct
  source 1..5441: mol_type = other RNA
  modified_base 1..5441: mod_base = OTHER; note = Each t is m1f
gaccggccgccaccatggccccaaagaagaagcggaaggtctctagagttaacggatcaggctctggaggtggaatgaaccatgaccaggaatttgaccccccaaaggtttacccacctgtgccagctgagaagaggaagcccatccgcgtgctgtctctctttgatgggattgctacagggctcctggtgctgaaggacctgggcatccaagtggaccgctacatcgcctccgaggtgtgtgaggactccatcacggtgggcatggtgcggcaccagggaaagatcatgtacgtcggggacgtccgcagcgtcacacagaagcatatccaggagtggggcccattcgacctggtgattggaggcagtccctgcaacgacctctccattgtcaaccctgcccgcaagggactttatgagggtactggccgcctcttctttgagttctaccgcctcctgcatgatgcgcggcccaaggagggagatgatcgccccttcttctggctctttgagaatgtggtggccatgggcgttagtgacaagagggacatctcgcgatttcttgagtctaaccccgtgatgattgacgccaaagaagtgtctgctgcacacagggcccgttacttctggggtaaccttcctggcatgaacaggcctttggcatccactgtgaatgataagctggagctgcaagagtgtctggagcacggcagaatagccaagttcagcaaagtgaggaccattaccaccaggtcaaactctataaagcagggcaaagaccagcatttccccgtcttcatgaacgagaaggaggacatcctgtggtgcactgaaatggaaagggtgtttggcttccccgtccactacacagacgtgtccaacatgagccgcttggcgaggcagagactgctgggccggtcgtggagcgtgccggtcatccgccacctcttcgctccgctgaaggaatattttgcttgtgtgtctagcggcaatagtaacgctaacagccgcgggccgagcttcagcagcggcctggtgccgttaagcttgcgcggcagccatatgggccctatggagatatacaagacagtgtctgcatggaagagacagccagtgcgggtactgagcctcttcagaaacatcgacaaggtactaaagagtttgggcttcttggaaagcggttctggttctgggggaggaacgctgaagtacgtggaagatgtcacaaatgtcgtgaggagggacgtggagaaatggggcccctttgacctggtgtacggctcgacgcagcccctaggcagctcttgtgatcgctgtcccggctggtacatgttccagttccaccggatcctgcagtatgcgctgcctcgccaggagagtcagcggcccttcttctggatattcatggacaatctgctgctgactgaggatgaccaagagacaactacccgcttccttcagacagaggctgtgaccctccaggatgtccgtggcagagactaccagaatgctatgcgggtgtggagcaacattccagggctgaagagcaagcatgcgcccctgaccccaaaggaagaagagtatctgcaagcccaagtcagaagcaggagcaagctggacgccccgaaagttgacctcctggtgaagaactgccttctcccgctgagagagtacttcaagtatttttctcaaaactcacttcctcttggagggccgagctctggcgcacccccaccaagtggagggtctcctgccgggtccccaacatctactgaagaaggcaccagcgaatccgcaacgcccgagtcaggccctggtacctccacagaaccatctgaaggtagtgcgcctggttccccagctggaagccctacttccaccgaagaaggcacgtcaaccgaaccaagtgaaggatctgcccctgggaccagcactgaaccatctgagggcggttccggcggaggaagcgctcaagagatcaagagaatcaacaagatcagaaggagactggtcaaggacagcaacacaaagaaggccggcaagacaggccccatgaaaaccctgctcgtcagagtgatgacccctgacctgagagagcggctggaaaacctgagaaagaagcccgagaacatccctcagcctatcagcaacaccagcagggccaacctgaacaagctgctgaccgactacaccgagatgaagaaagccatcctgcacgtgtactgggaagagttccagaaagaccccgtgggcctgatgagcagagttgctcagcctgccagcaagaagatcgaccagaacaagctgaagcccgagatggacgagaagggcaatctgaccacagccggctttgcctgctctcagtgtggccagcctctgttcgtgtacaagctggaacaggtgtccgagaaaggcaaggcctacaccaactacttcggcagatgtaacgtggccgagcacgagaagctgattctgctggcccagctgaaacctgagaaggactctgatgaggccgtgacctacagcctgggcaagtttggacagagagccctggacttctacagcatccacgtgaccaaagaaagcacacaccccgtgaagcccctggctcagatcgccggcaatagatacgcctctggacctgtgggcaaagccctgtccgatgcctgcatgggaacaatcgccagcttcctgagcaagtaccaggacatcatcatcgagcaccagaaggtggtcaagggcaaccagaagagactggaaagcctgagggagctggccggcaaagagaacctggaataccccagcgtgaccctgcctcctcagcctcacacaaaagaaggcgtggacgcctacaacgaagtgatcgccagagtgagaatgtgggtcaacctgaacctgtggcagaagctgaaactgtccagggacgacgccaagcctctgctgagactgaagggcttccctagcttccctctggtggaaagacaggccaatgaagtggattggtgggacatggtctgcaacgtgaagaagctgatcaacgagaagaaagaggatggcaaggttttctggcagaacctggccggctacaagagacaagaagccctgaggccttacctgagcagcgaagaggaccggaagaagggcaagaagttcgccagataccagctgggcgacctgctgctgcacctggaaaagaagcacggcgaggactggggcaaagtgtacgatgaggcctgggagagaatcgacaagaaggtggaaggcctgagcaagcacattaagctggaagaggaaagaaggagcgaggacgcccaatctaaagccgctctgaccgattggctgagagccaaggccagctttgtgatcgagggcctgaaagaggccgacaaggacgagttctgcagatgcgagctgaagctgcagaagtggtacggcgatctgagaggcaagcccttcgccattgaggccgagaacagcatcctggacatcagcggcttcagcaagcagtacaactgcgccttcatttggcagaaagacggcgtcaagaaactgaacctgtacctgatcatcaattacttcaaaggcggcaagctgcggttcaagaagatcaaacccgaggccttcgaggctaacagattctacaccgtgatcaacaaaaagtccggcgagatcgtgcccatggaagtgaacttcaacttcgacgaccccaacctgattatcctgcctctggccttcggcaagagacagggcagagagttcatctggaacgatctgctgagcctggaaaccggctctctgaagctggccaatggcagagtgatcgagaaaaccctgtacaacaggagaaccagacaggacgagcctgctctgtttgtggccctgaccttcgagagaagagaggtgctggacagcagcaacatcaagcccatgaacctgatcggcgtggcccggggcgagaatatccctgctgtgatcgccctgacagaccctgaaggatgcccactgagcagattcaaggactccctgggcaaccctacacacatcctgagaatcggcgagagctacaaagagaagcagaggacaatccaggccaagaaagaggtggaacagagaagagccggcggatactctaggaagtacgccagcaaggccaagaatctggccgacgacatggtccgaaacaccgccagagatctgctgtactacgccgtgacacaggacgccatgctgatcttcgcgaatctgagcagaggcttcggccggcagggcaagagaacctttatggccgagaggcagtacaccagaatggaagattggctcacagctaaactggcctacgagggactgagcaagacctacctgtccaaaacactggcccagtatacctccaagacctgcagcaattgcggcttcaccatcaccagcgccgactacgacagagtgctggaaaagctcaagaaaaccgccaccggctggatgaccaccatcaacggcaaagagctgaaggttgagggccagatcacctactacaacaggtacaagaggcagaacgtcgtgaaggatctgagcgtggaactggacagactgagcgaagagagcgtgaacaacgacatcagcagctggacaaagggcagatcaggcgaggctctgagcctgctgaagaagaggtttagccacagacctgtgcaagagaagttcgtgtgcctgaactgcggcttcgagacacacgccgctgaacaggctgccctgaacattgccagaagctggctgttcctgagaagccaagagtacaagaagtaccagaccaacaagaccaccggcaacaccgacaagagggcctttgtggaaacctggcagagcttctacagaaaaaagctgaaagaagtctggaagcccgccgtgcgatcgggcggttccggcggaggttccactagtatgaacaattcccagggaagagtgaccttcgaggatgtcactgtgaacttcacccagggggagtggcagcggctgaatcccgaacagagaaacttgtacagggatgtgatgctggagaattacagcaaccttgtctctgtgggacaaggggaaaccaccaaacccgatgtgatcttgaggttggaacaaggaaaggagccatggttggaggaagaggaagtgctgggaagtggccgtgcagaaaaaaatggggacattggagggcagatttggaagccaaaggatgtgaaagagagtctcactagtccaaaaaagaagagaaaggtagattacaaagatgacgatgacaaagactacaaggatgatgatgataagggatccggctgaaaaaaaaaaaaaaaaaaaaaaaaaaaaaaaaaaaaaaaaaaaaaaaaaaaaaaaaaaaaaaaaaaaaaaaaaaaaaaaaaaaaaaaaaaaaaaaaaaaaaaaaaaaaaaaaaaaaaaaaa

SEQ ID NO: 2029 - RNA, 5402 nt, synthetic construct
  source 1..5402: mol_type = other RNA
  modified_base 1..5402: mod_base = OTHER; note = Each t is m1f
gaccggccgccaccatggccccaaagaagaagcggaaggtctctagaatgaaccatgaccaggaatttgaccccccaaaggtttacccacctgtgccagctgagaagaggaagcccatccgcgtgctgtctctctttgatgggattgctacagggctcctggtgctgaaggacctgggcatccaagtggaccgctacatcgcctccgaggtgtgtgaggactccatcacggtgggcatggtgcggcaccagggaaagatcatgtacgtcggggacgtccgcagcgtcacacagaagcatatccaggagtggggcccattcgacctggtgattggaggcagtccctgcaacgacctctccattgtcaaccctgcccgcaagggactttatgagggtactggccgcctcttctttgagttctaccgcctcctgcatgatgcgcggcccaaggagggagatgatcgccccttcttctggctctttgagaatgtggtggccatgggcgttagtgacaagagggacatctcgcgatttcttgagtctaaccccgtgatgattgacgccaaagaagtgtctgctgcacacagggcccgttacttctggggtaaccttcctggcatgaacaggcctttggcatccactgtgaatgataagctggagctgcaagagtgtctggagcacggcagaatagccaagttcagcaaagtgaggaccattaccaccaggtcaaactctataaagcagggcaaagaccagcatttccccgtcttcatgaacgagaaggaggacatcctgtggtgcactgaaatggaaagggtgtttggcttccccgtccactacacagacgtgtccaacatgagccgcttggcgaggcagagactgctgggccggtcgtggagcgtgccggtcatccgccacctcttcgctccgctgaaggaatattttgcttgtgtgtctagcggcaatagtaacgctaacagccgcgggccgagcttcagcagcggcctggtgccgttaagcttgcgcggcagccatatgggccctatggagatatacaagacagtgtctgcatggaagagacagccagtgcgggtactgagcctcttcagaaacatcgacaaggtactaaagagtttgggcttcttggaaagcggttctggttctgggggaggaacgctgaagtacgtggaagatgtcacaaatgtcgtgaggagggacgtggagaaatggggcccctttgacctggtgtacggctcgacgcagcccctaggcagctcttgtgatcgctgtcccggctggtacatgttccagttccaccggatcctgcagtatgcgctgcctcgccaggagagtcagcggcccttcttctggatattcatggacaatctgctgctgactgaggatgaccaagagacaactacccgcttccttcagacagaggctgtgaccctccaggatgtccgtggcagagactaccagaatgctatgcgggtgtggagcaacattccagggctgaagagcaagcatgcgcccctgaccccaaaggaagaagagtatctgcaagcccaagtcagaagcaggagcaagctggacgccccgaaagttgacctcctggtgaagaactgccttctcccgctgagagagtacttcaagtatttttctcaaaactcacttcctcttggcggttccggcggaggaatgaacaattcccagggaagagtgaccttcgaggatgtcactgtgaacttcacccagggggagtggcagcggctgaatcccgaacagagaaacttgtacagggatgtgatgctggagaattacagcaaccttgtctctgtgggacaaggggaaaccaccaaacccgatgtgatcttgaggttggaacaaggaaaggagccatggttggaggaagaggaagtgctgggaagtggccgtgcagaaaaaaatggggacattggagggcagatttggaagccaaaggatgtgaaagagagtctcggagggccgagctctggcgcacccccaccaagtggagggtctcctgccgggtccccaacatctactgaagaaggcaccagcgaatccgcaacgcccgagtcaggccctggtacctccacagaaccatctgaaggtagtgcgcctggttccccagctggaagccctacttccaccgaagaaggcacgtcaaccgaaccaagtgaaggatctgcccctgggaccagcactgaaccatctgagcaagagatcaagagaatcaacaagatcagaaggagactggtcaaggacagcaacacaaagaaggccggcaagacaggccccatgaaaaccctgctcgtcagagtgatgacccctgacctgagagagcggctggaaaacctgagaaagaagcccgagaacatccctcagcctatcagcaacaccagcagggccaacctgaacaagctgctgaccgactacaccgagatgaagaaagccatcctgcacgtgtactgggaagagttccagaaagaccccgtgggcctgatgagcagagttgctcagcctgccagcaagaagatcgaccagaacaagctgaagcccgagatggacgagaagggcaatctgaccacagccggctttgcctgctctcagtgtggccagcctctgttcgtgtacaagctggaacaggtgtccgagaaaggcaaggcctacaccaactacttcggcagatgtaacgtggccgagcacgagaagctgattctgctggcccagctgaaacctgagaaggactctgatgaggccgtgacctacagcctgggcaagtttggacagagagccctggacttctacagcatccacgtgaccaaagaaagcacacaccccgtgaagcccctggctcagatcgccggcaatagatacgcctctggacctgtgggcaaagccctgtccgatgcctgcatgggaacaatcgccagcttcctgagcaagtaccaggacatcatcatcgagcaccagaaggtggtcaagggcaaccagaagagactggaaagcctgagggagctggccggcaaagagaacctggaataccccagcgtgaccctgcctcctcagcctcacacaaaagaaggcgtggacgcctacaacgaagtgatcgccagagtgagaatgtgggtcaacctgaacctgtggcagaagctgaaactgtccagggacgacgccaagcctctgctgagactgaagggcttccctagcttccctctggtggaaagacaggccaatgaagtggattggtgggacatggtctgcaacgtgaagaagctgatcaacgagaagaaagaggatggcaaggttttctggcagaacctggccggctacaagagacaagaagccctgaggccttacctgagcagcgaagaggaccggaagaagggcaagaagttcgccagataccagctgggcgacctgctgctgcacctggaaaagaagcacggcgaggactggggcaaagtgtacgatgaggcctgggagagaatcgacaagaaggtggaaggcctgagcaagcacattaagctggaagaggaaagaaggagcgaggacgcccaatctaaagccgctctgaccgattggctgagagccaaggccagctttgtgatcgagggcctgaaagaggccgacaaggacgagttctgcagatgcgagctgaagctgcagaagtggtacggcgatctgagaggcaagcccttcgccattgaggccgagaacagcatcctggacatcagcggcttcagcaagcagtacaactgcgccttcatttggcagaaagacggcgtcaagaaactgaacctgtacctgatcatcaattacttcaaaggcggcaagctgcggttcaagaagatcaaacccgaggccttcgaggctaacagattctacaccgtgatcaacaaaaagtccggcgagatcgtgcccatggaagtgaacttcaacttcgacgaccccaacctgattatcctgcctctggccttcggcaagagacagggcagagagttcatctggaacgatctgctgagcctggaaaccggctctctgaagctggccaatggcagagtgatcgagaaaaccctgtacaacaggagaaccagacaggacgagcctgctctgtttgtggccctgaccttcgagagaagagaggtgctggacagcagcaacatcaagcccatgaacctgatcggcgtggcccggggcgagaatatccctgctgtgatcgccctgacagaccctgaaggatgcccactgagcagattcaaggactccctgggcaaccctacacacatcctgagaatcggcgagagctacaaagagaagcagaggacaatccaggccaagaaagaggtggaacagagaagagccggcggatactctaggaagtacgccagcaaggccaagaatctggccgacgacatggtccgaaacaccgccagagatctgctgtactacgccgtgacacaggacgccatgctgatcttcgcgaatctgagcagaggcttcggccggcagggcaagagaacctttatggccgagaggcagtacaccagaatggaagattggctcacagctaaactggcctacgagggactgagcaagacctacctgtccaaaacactggcccagtatacctccaagacctgcagcaattgcggcttcaccatcaccagcgccgactacgacagagtgctggaaaagctcaagaaaaccgccaccggctggatgaccaccatcaacggcaaagagctgaaggttgagggccagatcacctactacaacaggtacaagaggcagaacgtcgtgaaggatctgagcgtggaactggacagactgagcgaagagagcgtgaacaacgacatcagcagctggacaaagggcagatcaggcgaggctctgagcctgctgaagaagaggtttagccacagacctgtgcaagagaagttcgtgtgcctgaactgcggcttcgagacacacgccgctgaacaggctgccctgaacattgccagaagctggctgttcctgagaagccaagagtacaagaagtaccagaccaacaagaccaccggcaacaccgacaagagggcctttgtggaaacctggcagagcttctacagaaaaaagctgaaagaagtctggaagcccgccgtgcgatcgggcggttccggcggaggttccactagtccaaaaaagaagagaaaggtagattacaaagatgacgatgacaaagactacaaggatgatgatgataagggatccggctgaaaaaaaaaaaaaaaaaaaaaaaaaaaaaaaaaaaaaaaaaaaaaaaaaaaaaaaaaaaaaaaaaaaaaaaaaaaaaaaaaaaaaaaaaaaaaaaaaaaaaaaaaaaaaaaaaaaaaaaaa

SEQ ID NO: 2030 - RNA, 20 nt, synthetic construct
  source 1..20: mol_type = other RNA
cacgccaccccgagccccat

SEQ ID NO: 2031 - RNA, 20 nt, synthetic construct
  source 1..20: mol_type = other RNA
cagcctgcgcgtccacgtga

SEQ ID NO: 2032 - DNA, 20 bp, synthetic construct
  source 1..20: mol_type = other DNA
cagcgctgggagccgccgcc

SEQ ID NO: 2033 - DNA, 20 bp, synthetic construct
  source 1..20: mol_type = other DNA
gcccaggggtcccgggacgc

SEQ ID NO: 2034 - DNA, 20 bp, synthetic construct
  source 1..20: mol_type = other DNA
ctccgcccgcagcagccccc

SEQ ID NO: 2035 - DNA, 20 bp, synthetic construct
  source 1..20: mol_type = other DNA
gacctgccgagcgcccgccg

SEQ ID NO: 2036 - DNA, 19 bp, synthetic construct
  source 1..19: mol_type = other DNA
accacgcgtccgagtccgg

SEQ ID NO: 2037 - DNA, 19 bp, synthetic construct
  source 1..19: mol_type = other DNA
tgctcattgtccctggaca

SEQ ID NO: 2038 - DNA, 19 bp, synthetic construct
  source 1..19: mol_type = other DNA
ggacaccctgctcattgtc

SEQ ID NO: 2039 - RNA, 20 nt, synthetic construct
  source 1..20: mol_type = other RNA
cagcgctgggagccgccgcc

SEQ ID NO: 2040 - RNA, 20 nt, synthetic construct
  source 1..20: mol_type = other RNA
gcccaggggtcccgggacgc

SEQ ID NO: 2041 - RNA, 20 nt, synthetic construct
  source 1..20: mol_type = other RNA
ctccgcccgcagcagccccc

SEQ ID NO: 2042 - RNA, 20 nt, synthetic construct
  source 1..20: mol_type = other RNA
gacctgccgagcgcccgccg

SEQ ID NO: 2043 - RNA, 19 nt, synthetic construct
  source 1..19: mol_type = other RNA
accacgcgtccgagtccgg

SEQ ID NO: 2044 - RNA, 19 nt, synthetic construct
  source 1..19: mol_type = other RNA
tgctcattgtccctggaca

SEQ ID NO: 2045 - RNA, 19 nt, synthetic construct
  source 1..19: mol_type = other RNA
ggacaccctgctcattgtc

SEQ ID NO: 2046 - DNA, 20 bp, synthetic construct
  source 1..20: mol_type = other DNA
ggccgagatgtctcgctccg

SEQ ID NO: 2047 - DNA, 20 bp, synthetic construct
  source 1..20: mol_type = other DNA
taaacatcacgagactctaa

SEQ ID NO: 2048 - DNA, 20 bp, synthetic construct
  source 1..20: mol_type = other DNA
aggacttcaggctggaggca

SEQ ID NO: 2049 - DNA, 20 bp, synthetic construct
  source 1..20: mol_type = other DNA
cgaatgaaaaatgcaggtcc

SEQ ID NO: 2050 - DNA, 20 bp, synthetic construct
  source 1..20: mol_type = other DNA
gtttataactacagcttggg

SEQ ID NO: 2051 - DNA, 20 bp, synthetic construct
  source 1..20: mol_type = other DNA
ctgagctgtcctcaggatgc

SEQ ID NO: 2052 - DNA, 20 bp, synthetic construct
  source 1..20: mol_type = other DNA
tccctatgtccttgctgttt

SEQ ID NO: 2053 - DNA, 20 bp, synthetic construct
  source 1..20: mol_type = other DNA
agcgccctctaggtacatca

SEQ ID NO: 2054 - DNA, 20 bp, synthetic construct
  source 1..20: mol_type = other DNA
gtttactgagtacctactat

SEQ ID NO: 2055 - RNA, 20 nt, synthetic construct
  source 1..20: mol_type = other RNA
aggacttcaggctggaggca

SEQ ID NO: 2056 - RNA, 20 nt, synthetic construct
  source 1..20: mol_type = other RNA
cgaatgaaaaatgcaggtcc

SEQ ID NO: 2057 - RNA, 20 nt, synthetic construct
  source 1..20: mol_type = other RNA
gtttataactacagcttggg

SEQ ID NO: 2058 - RNA, 20 nt, synthetic construct
  source 1..20: mol_type = other RNA
ctgagctgtcctcaggatgc

SEQ ID NO: 2059 - RNA, 20 nt, synthetic construct
  source 1..20: mol_type = other RNA
agcgccctctaggtacatca

SEQ ID NO: 2060 - RNA, 20 nt, synthetic construct
  source 1..20: mol_type = other RNA
gtttactgagtacctactat

SEQ ID NO: 2061 - protein, 326 aa, synthetic construct
MDAKSLTAWSRTLVTFKDVFVDFTREEWKLLDTAQQIVYRNVMLENYKNLVSLGYQLTKPDVILRLEKGEEPWLVSGGGSGGSGSSPKKKRKVEASVQVKRVLEKSPGKLLVKMPFQASPGGKGEGGGATTSAQVMVIKRPGRKRKAEADPQAIPKKRGRKPGSVVAAAAAEAKKKAVKESSIRSVQETVLPIKKRKTRETVSIEVKEVVKPLLVSTLGEKSGKGLKTCKSPGRKSKESSPKGRSSSASSPPKKEHHHHHHHAESPKAPMPLLPPPPPPEPQSSEDPISPPEPQDLSSSICKEEKMPRAGSLESDGCPKEPAKTQP

SEQ ID NO: 2062 - protein, 80 aa, synthetic construct
KMKKFQIPVSFQDLTVNFTQEEWQQLDPAQRLLYRDVMLENYSNLVSVGYHVSKPDVIFKLEQGEEPWIVEEFSNQNYPD

SEQ ID NO: 2063 - DNA, 20 bp, synthetic construct
  source 1..20: mol_type = other DNA
cgcgagcacagctaaggcca

SEQ ID NO: 2064 - protein, 1088 aa, synthetic construct
MAPKKKRKVSRGGSGGGSAQEIKRINKIRRRLVKDSNTKKAGKTGPMKTLLVRVMTPDLRERLENLRKKPENIPQPISNTSRANLNKLLTDYTEMKKAILHVYWEEFQKDPVGLMSRVAQPASKKIDQNKLKPEMDEKGNLTTAGFACSQCGQPLFVYKLEQVSEKGKAYTNYFGRCNVAEHEKLILLAQLKPEKDSDEAVTYSLGKFGQRALDFYSIHVTKESTHPVKPLAQIAGNRYASGPVGKALSDACMGTIASFLSKYQDIIIEHQKVVKGNQKRLESLRELAGKENLEYPSVTLPPQPHTKEGVDAYNEVIARVRMWVNLNLWQKLKLSRDDAKPLLRLKGFPSFPLVERQANEVDWWDMVCNVKKLINEKKEDGKVFWQNLAGYKRQEALRPYLSSEEDRKKGKKFARYQLGDLLLHLEKKHGEDWGKVYDEAWERIDKKVEGLSKHIKLEEERRSEDAQSKAALTDWLRAKASFVIEGLKEADKDEFCRCELKLQKWYGDLRGKPFAIEAENSILDISGFSKQYNCAFIWQKDGVKKLNLYLIINYFKGGKLRFKKIKPEAFEANRFYTVINKKSGEIVPMEVNFNFDDPNLIILPLAFGKRQGREFIWNDLLSLETGSLKLANGRVIEKTLYNRRTRQDEPALFVALTFERREVLDSSNIKPMNLIGVARGENIPAVIALTDPEGCPLSRFKDSLGNPTHILRIGESYKEKQRTIQAKKEVEQRRAGGYSRKYASKAKNLADDMVRNTARDLLYYAVTQDAMLIFANLSRGFGRQGKRTFMAERQYTRMEDWLTAKLAYEGLSKTYLSKTLAQYTSKTCSNCGFTITSADYDRVLEKLKKTATGWMTTINGKELKVEGQITYYNRYKRQNVVKDLSVELDRLSEESVNNDISSWTKGRSGEALSLLKKRFSHRPVQEKFVCLNCGFETHAAEQAALNIARSWLFLRSQEYKKYQTNKTTGNTDKRAFVETWQSFYRKKLKEVWKPAVRSGGSGGGSTSMDAKSLTAWSRTLVTFKDVFVDFTREEWKLLDTAQQIVYRNVMLENYKNLVSLGYQLTKPDVILRLEKGEEPTSPKKKRKV

SEQ ID NO: 2065 - protein, 1399 aa, synthetic construct
MAPKKKRKVSRGGSGGGSAQEIKRINKIRRRLVKDSNTKKAGKTGPMKTLLVRVMTPDLRERLENLRKKPENIPQPISNTSRANLNKLLTDYTEMKKAILHVYWEEFQKDPVGLMSRVAQPASKKIDQNKLKPEMDEKGNLTTAGFACSQCGQPLFVYKLEQVSEKGKAYTNYFGRCNVAEHEKLILLAQLKPEKDSDEAVTYSLGKFGQRALDFYSIHVTKESTHPVKPLAQIAGNRYASGPVGKALSDACMGTIASFLSKYQDIIIEHQKVVKGNQKRLESLRELAGKENLEYPSVTLPPQPHTKEGVDAYNEVIARVRMWVNLNLWQKLKLSRDDAKPLLRLKGFPSFPLVERQANEVDWWDMVCNVKKLINEKKEDGKVFWQNLAGYKRQEALRPYLSSEEDRKKGKKFARYQLGDLLLHLEKKHGEDWGKVYDEAWERIDKKVEGLSKHIKLEEERRSEDAQSKAALTDWLRAKASFVIEGLKEADKDEFCRCELKLQKWYGDLRGKPFAIEAENSILDISGFSKQYNCAFIWQKDGVKKLNLYLIINYFKGGKLRFKKIKPEAFEANRFYTVINKKSGEIVPMEVNFNFDDPNLIILPLAFGKRQGREFIWNDLLSLETGSLKLANGRVIEKTLYNRRTRQDEPALFVALTFERREVLDSSNIKPMNLIGVARGENIPAVIALTDPEGCPLSRFKDSLGNPTHILRIGESYKEKQRTIQAKKEVEQRRAGGYSRKYASKAKNLADDMVRNTARDLLYYAVTQDAMLIFANLSRGFGRQGKRTFMAERQYTRMEDWLTAKLAYEGLSKTYLSKTLAQYTSKTCSNCGFTITSADYDRVLEKLKKTATGWMTTINGKELKVEGQITYYNRYKRQNVVKDLSVELDRLSEESVNNDISSWTKGRSGEALSLLKKRFSHRPVQEKFVCLNCGFETHAAEQAALNIARSWLFLRSQEYKKYQTNKTTGNTDKRAFVETWQSFYRKKLKEVWKPAVRSGGSGGGSTSMDAKSLTAWSRTLVTFKDVFVDFTREEWKLLDTAQQIVYRNVMLENYKNLVSLGYQLTKPDVILRLEKGEEPWLVSGGGSGGSGSSPKKKRKVEASVQVKRVLEKSPGKLLVKMPFQASPGGKGEGGGATTSAQVMVIKRPGRKRKAEADPQAIPKKRGRKPGSVVAAAAAEAKKKAVKESSIRSVQETVLPIKKRKTRETVSIEVKEVVKPLLVSTLGEKSGKGLKTCKSPGRKSKESSPKGRSSSASSPPKKEHHHHHHHAESPKAPMPLLPPPPPPEPQSSEDPISPPEPQDLSSSICKEEKMPRAGSLESDGCPKEPAKTQPMVAAAATTTTTTTTTVAEKYKHRGEGERKDIVSSSMPRPNREEPVDSRTPVTERVSRTSPKKKRKV

SEQ ID NO: 2066 - protein, 1096 aa, synthetic construct
MAPKKKRKVSRGGSGGGSAQEIKRINKIRRRLVKDSNTKKAGKTGPMKTLLVRVMTPDLRERLENLRKKPENIPQPISNTSRANLNKLLTDYTEMKKAILHVYWEEFQKDPVGLMSRVAQPASKKIDQNKLKPEMDEKGNLTTAGFACSQCGQPLFVYKLEQVSEKGKAYTNYFGRCNVAEHEKLILLAQLKPEKDSDEAVTYSLGKFGQRALDFYSIHVTKESTHPVKPLAQIAGNRYASGPVGKALSDACMGTIASFLSKYQDIIIEHQKVVKGNQKRLESLRELAGKENLEYPSVTLPPQPHTKEGVDAYNEVIARVRMWVNLNLWQKLKLSRDDAKPLLRLKGFPSFPLVERQANEVDWWDMVCNVKKLINEKKEDGKVFWQNLAGYKRQEALRPYLSSEEDRKKGKKFARYQLGDLLLHLEKKHGEDWGKVYDEAWERIDKKVEGLSKHIKLEEERRSEDAQSKAALTDWLRAKASFVIEGLKEADKDEFCRCELKLQKWYGDLRGKPFAIEAENSILDISGFSKQYNCAFIWQKDGVKKLNLYLIINYFKGGKLRFKKIKPEAFEANRFYTVINKKSGEIVPMEVNFNFDDPNLIILPLAFGKRQGREFIWNDLLSLETGSLKLANGRVIEKTLYNRRTRQDEPALFVALTFERREVLDSSNIKPMNLIGVARGENIPAVIALTDPEGCPLSRFKDSLGNPTHILRIGESYKEKQRTIQAKKEVEQRRAGGYSRKYASKAKNLADDMVRNTARDLLYYAVTQDAMLIFANLSRGFGRQGKRTFMAERQYTRMEDWLTAKLAYEGLSKTYLSKTLAQYTSKTCSNCGFTITSADYDRVLEKLKKTATGWMTTINGKELKVEGQITYYNRYKRQNVVKDLSVELDRLSEESVNNDISSWTKGRSGEALSLLKKRFSHRPVQEKFVCLNCGFETHAAEQAALNIARSWLFLRSQEYKKYQTNKTTGNTDKRAFVETWQSFYRKKLKEVWKPAVRSGGSGGGSTSKMKKFQIPVSFQDLTVNFTQEEWQQLDPAQRLLYRDVMLENYSNLVSVGYHVSKPDVIFKLEQGEEPWIVEEFSNQNYPDTSPKKKRKV

SEQ ID NO: 2067 - RNA, 20 nt, synthetic construct
  source 1..20: mol_type = other RNA
aattacaggcaacaggaagg

SEQ ID NO: 2068 - RNA, 20 nt, synthetic construct
  source 1..20: mol_type = other RNA
ccccatgtaagagaggaagt

SEQ ID NO: 2069 - RNA, 20 nt, synthetic construct
  source 1..20: mol_type = other RNA
cagtttctgcctcgccgcgg

SEQ ID NO: 2070 - RNA, 20 nt, synthetic construct
  source 1..20: mol_type = other RNA
gcctcgccgcggcacaggtg

SEQ ID NO: 2071 - RNA, 20 nt, synthetic construct
  source 1..20: mol_type = other RNA
cccacctgtgccgcggcgag

SEQ ID NO: 2072 - RNA, 20 nt, synthetic construct
  source 1..20: mol_type = other RNA
ctccttcacccacctgtgcc

SEQ ID NO: 2073 - RNA, 20 nt, synthetic construct
  source 1..20: mol_type = other RNA
aggcattcactccttcaccc

SEQ ID NO: 2074 - RNA, 20 nt, synthetic construct
  source 1..20: mol_type = other RNA
ctgtgcctggtgcagttccc

SEQ ID NO: 2075 - RNA, 20 nt, synthetic construct
  source 1..20: mol_type = other RNA
gtgtcataaagaaattgcct

SEQ ID NO: 2076 - RNA, 20 nt, synthetic construct
  source 1..20: mol_type = other RNA
ttatgacacagaactcatgc

SEQ ID NO: 2077 - RNA, 20 nt, synthetic construct
  source 1..20: mol_type = other RNA
accgctgcgccaaggtgcgg

SEQ ID NO: 2078 - RNA, 20 nt, synthetic construct
  source 1..20: mol_type = other RNA
gccaggccgtcctcctcgga

SEQ ID NO: 2079 - RNA, 20 nt, synthetic construct
  source 1..20: mol_type = other RNA
gtgctcgggtgcttcggcca

SEQ ID NO: 2080 - RNA, 20 nt, synthetic construct
  source 1..20: mol_type = other RNA
actttgtttgcaaagacctc

SEQ ID NO: 2081 - RNA, 20 nt, synthetic construct
  source 1..20: mol_type = other RNA
gagtgaaatggcctgctctg

SEQ ID NO: 2082 - RNA, 20 nt, synthetic construct
  source 1..20: mol_type = other RNA
gagcaggccatttcactcgg

SEQ ID NO: 2083 - RNA, 20 nt, synthetic construct
  source 1..20: mol_type = other RNA
ctcggaatctgctgtgcatc

SEQ ID NO: 2084 - RNA, 20 nt, synthetic construct
  source 1..20: mol_type = other RNA
ggaagggctgtcgatactgg

SEQ ID NO: 2085 - RNA, 20 nt, synthetic construct
  source 1..20: mol_type = other RNA
tcccagtatcgacagccctt

SEQ ID NO: 2086 - RNA, 20 nt, synthetic construct
  source 1..20: mol_type = other RNA
cagtatcgacagcccttcca

SEQ ID NO: 2087 - RNA, 20 nt, synthetic construct
  source 1..20: mol_type = other RNA
agaaatcaactggacaagca

SEQ ID NO: 2088 - RNA, 20 nt, synthetic construct
  source 1..20: mol_type = other RNA
tgaacatggtgtgtaaaagg

SEQ ID NO: 2089 - RNA, 20 nt, synthetic construct
  source 1..20: mol_type = other RNA
agaagattcaatttgcaaag

SEQ ID NO: 2090 - RNA, 20 nt, synthetic construct
  source 1..20: mol_type = other RNA
atggtaggcacaagctcagc

SEQ ID NO: 2091 - RNA, 20 nt, synthetic construct
  source 1..20: mol_type = other RNA
gaattctatggtaggcacaa

SEQ ID NO: 2092 - RNA, 20 nt, synthetic construct
  source 1..20: mol_type = other RNA
ggaaagctgagcttgtgcct

SEQ ID NO: 2093 - RNA, 20 nt, synthetic construct
  source 1..20: mol_type = other RNA
aggagcagctagttggtaag

SEQ ID NO: 2094 - RNA, 20 nt, synthetic construct
  source 1..20: mol_type = other RNA
aaacttagcctggaccccct

SEQ ID NO: 2095 - RNA, 20 nt, synthetic construct
  source 1..20: mol_type = other RNA
actggccttaacctggcagc

SEQ ID NO: 2096 - RNA, 20 nt, synthetic construct
  source 1..20: mol_type = other RNA
ttccactggccttaacctgg

SEQ ID NO: 2097 - RNA, 20 nt, synthetic construct
  source 1..20: mol_type = other RNA
gaatcaatcctactgtggac

SEQ ID NO: 2098 - RNA, 20 nt, synthetic construct
  source 1..20: mol_type = other RNA
gtgggcagcgaggagtccac

SEQ ID NO: 2099 - RNA, 20 nt, synthetic construct
  source 1..20: mol_type = other RNA
tgggtccaccttgtctcctg

SEQ ID NO: 2100 - RNA, 20 nt, synthetic construct
  source 1..20: mol_type = other RNA
gaagtctcactggtcagcag

SEQ ID NO: 2101 - RNA, 20 nt, synthetic construct
  source 1..20: mol_type = other RNA
gtgtttcctgggtccacctt

SEQ ID NO: 2102 - RNA, 20 nt, synthetic construct
  source 1..20: mol_type = other RNA
agcccagttaggatttggga

SEQ ID NO: 2103 - RNA, 20 nt, synthetic construct
  source 1..20: mol_type = other RNA
tccctctgcgcgtaatctga

SEQ ID NO: 2104 - RNA, 20 nt, synthetic construct
  source 1..20: mol_type = other RNA
ctctgcgcgtaatctgacgc

SEQ ID NO: 2105 - RNA, 20 nt, synthetic construct
  source 1..20: mol_type = other RNA
gcctcgccctccccaaacag

SEQ ID NO: 2106 - RNA, 20 nt, synthetic construct
  source 1..20: mol_type = other RNA
agggtgtgggtgcttgacgc

SEQ ID NO: 2107 - RNA, 20 nt, synthetic construct
  source 1..20: mol_type = other RNA
gcagcgacgtcgaggcgctc

SEQ ID NO: 2108 - RNA, 20 nt, synthetic construct
  source 1..20: mol_type = other RNA
ggagcagggcgcgtgaaggg

SEQ ID NO: 2109 - RNA, 20 nt, synthetic construct
  source 1..20: mol_type = other RNA
gcgcgccccttcacgcgccc

SEQ ID NO: 2110 - RNA, 20 nt, synthetic construct
  source 1..20: mol_type = other RNA
cgcgccctgctcctgaactt

SEQ ID NO: 2111 - RNA, 20 nt, synthetic construct
  source 1..20: mol_type = other RNA
gctcctgcacagtcctcccc

SEQ ID NO: 2112 - RNA, 20 nt, synthetic construct
  source 1..20: mol_type = other RNA
cactgaatagcgcagccgca

SEQ ID NO: 2113 - RNA, 20 nt, synthetic construct
  source 1..20: mol_type = other RNA
gtgggaaggttcgcggggtt

SEQ ID NO: 2114 - RNA, 20 nt, synthetic construct
  source 1..20: mol_type = other RNA
cggggttgggagacccggag

SEQ ID NO: 2115 - RNA, 20 nt, synthetic construct
  source 1..20: mol_type = other RNA
tcggcctccgggtctcccaa

SEQ ID NO: 2116 - RNA, 20 nt, synthetic construct
  source 1..20: mol_type = other RNA
cagtacgttccaggcattca

SEQ ID NO: 2117 - RNA, 20 nt, synthetic construct
  source 1..20: mol_type = other RNA
aaaccaaatcggaacccact

SEQ ID NO: 2118 - RNA, 20 nt, synthetic construct
  source 1..20: mol_type = other RNA
tgttgcctgtaattggaatt

SEQ ID NO: 2119 - RNA, 20 nt, synthetic construct
  source 1..20: mol_type = other RNA
ccttcctgttgcctgtaatt

SEQ ID NO: 2120 - RNA, 20 nt, synthetic construct
  source 1..20: mol_type = other RNA
cctttgtttcttcccagtat

SEQ ID NO: 2121 - RNA, 20 nt, synthetic construct
  source 1..20: mol_type = other RNA
tcctcctgcctggtacacaa

SEQ ID NO: 2122 - RNA, 20 nt, synthetic construct
  source 1..20: mol_type = other RNA
gaatgtacctatatgacgtc

SEQ ID NO: 2123 - RNA, 20 nt, synthetic construct
  source 1..20: mol_type = other RNA
ccccggcctcccatccctac

SEQ ID NO: 2124 - RNA, 20 nt, synthetic construct
  source 1..20: mol_type = other RNA
cttggcacgatcttggggac

SEQ ID NO: 2125 - RNA, 20 nt, synthetic construct
  source 1..20: mol_type = other RNA
gatttggtttggaaaacatg

SEQ ID NO: 2126 - RNA, 20 nt, synthetic construct
  source 1..20: mol_type = other RNA
ctccaggccctccaccctcc

SEQ ID NO: 2127 - RNA, 20 nt, synthetic construct
  source 1..20: mol_type = other RNA
caccccgcccctgtctcggg

SEQ ID NO: 2128 - RNA, 20 nt, synthetic construct
  source 1..20: mol_type = other RNA
cccctgccccttcagctggt

SEQ ID NO: 2129 - RNA, 20 nt, synthetic construct
  source 1..20: mol_type = other RNA
tccctcaccaattacccctc

SEQ ID NO: 2130 - protein, 7 aa, synthetic construct
GSGSGSG

SEQ ID NO: 2131 - protein, 8 aa, synthetic construct
GGSGGGSA

SEQ ID NO: 2132 - protein, 9 aa, synthetic construct
TSPKKKRKV

SEQ ID NO: 2133 - protein, 14 aa, synthetic construct
DVAVYFSPEEWGCL

SEQ ID NO: 2134 - protein, 15 aa, synthetic construct
  VARIANT 1: note = D or E
  VARIANT 6: note = N or T
  VARIANT 8: note = A, E, G, Q, R, or S
  VARIANT 9: note = H or N
  VARIANT 10: note = L, M, or V
  VARIANT 11: note = A, L, or V
  VARIANT 13: note = L or V
  VARIANT 14: note = A, G, or V
  VARIANT 15: note = C, F, or L
XVMLEXYXXXXSXXX

SEQ ID NO: 2135 - RNA, 109 nt, synthetic construct
  source 1..109: mol_type = other RNA
actggcgcttttatctgattactttgagagccatcaccagcgactatgtcgtagtgggtaaagctccctcttcggagggagcatcaaagnnnnnnnnnnnnnnnnnnnn

SEQ ID NO: 2136 - RNA, 109 nt, synthetic construct; identical to SEQ ID NO: 2135
  modified_base 1..4: mod_base = OTHER; note = linked via phosphorothioate
  modified_base 1: mod_base = OTHER; note = 2 -O-methyladenosine
  modified_base 2: mod_base = cm
  modified_base 3: mod_base = um
  modified_base 107..109: mod_base = OTHER; note = linked via phosphorothioate
  modified_base 107: mod_base = OTHER; note = any 2 -O-methyl ribonucelotide
  modified_base 108: mod_base = OTHER; note = any 2 -O-methyl ribonucelotide
  modified_base 109: mod_base = OTHER; note = any 2 -O-methyl ribonucelotide
  source 1..109: mol_type = other RNA

SEQ ID NO: 2137 - RNA, 112 nt, synthetic construct
  modified_base 1..4: mod_base = OTHER; note = linked via phosphorothioate
  modified_base 1: mod_base = OTHER; note = 2 -O-methyladenosine
  modified_base 2: mod_base = cm
  modified_base 3: mod_base = um
  modified_base 109..112: mod_base = OTHER; note = linked via phosphorothioate
  modified_base 110: mod_base = um
  modified_base 111: mod_base = um
  modified_base 112: mod_base = um
  source 1..112: mol_type = other RNA
actggcgcttttatctgattactttgagagccatcaccagcgactatgtcgtagtgggtaaagctccctcttcggagggagcatcaaagnnnnnnnnnnnnnnnnnnnnttt

SEQ ID NO: 2138 - RNA, 109 nt, synthetic construct; identical to SEQ ID NO: 2135
  modified_base 1..4: mod_base = OTHER; note = linked via phosphorothioate
  modified_base 1: mod_base = OTHER; note = 2 -O-methyladenosine
  modified_base 2: mod_base = cm
  modified_base 3: mod_base = um
  modified_base 4: mod_base = gm
  modified_base 5: mod_base = gm
  modified_base 6: mod_base = cm
  modified_base 7: mod_base = gm
  modified_base 8: mod_base = cm
  modified_base 9: mod_base = um
  modified_base 10: mod_base = um
  modified_base 11: mod_base = um
  modified_base 12: mod_base = um
  modified_base 13: mod_base = OTHER; note = 2 -O-methyladenosine
  modified_base 14: mod_base = um
  modified_base 15: mod_base = cm
  modified_base 16: mod_base = um
  modified_base 17: mod_base = gm
  modified_base 18: mod_base = OTHER; note = 2 -O-methyladenosine
  modified_base 19: mod_base = um
  modified_base 27: mod_base = OTHER; note = 2 -O-methyladenosine
  modified_base 28: mod_base = gm
  modified_base 29: mod_base = OTHER; note = 2 -O-methyladenosine
  modified_base 30: mod_base = gm
  modified_base 31: mod_base = cm
  modified_base 32: mod_base = cm
  modified_base 33: mod_base = OTHER; note = 2 -O-methyladenosine
  modified_base 34: mod_base = um
  modified_base 35: mod_base = cm
  modified_base 36: mod_base = OTHER; note = 2 -O-methyladenosine
  modified_base 37: mod_base = cm
  modified_base 38: mod_base = cm
  modified_base 44: mod_base = cm
  modified_base 45: mod_base = um
  modified_base 48: mod_base = gm
  modified_base 49: mod_base = um
  modified_base 50: mod_base = cm
  modified_base 51: mod_base = gm
  modified_base 57: mod_base = gm
  modified_base 58: mod_base = gm
  modified_base 59: mod_base = um
  modified_base 60: mod_base = OTHER; note = 2 -O-methyladenosine
  modified_base 61: mod_base = OTHER; note = 2 -O-methyladenosine
  modified_base 62: mod_base = OTHER; note = 2 -O-methyladenosine
  modified_base 63: mod_base = gm
  modified_base 64: mod_base = cm
  modified_base 65: mod_base = um
  modified_base 66: mod_base = cm
  modified_base 67: mod_base = cm
  modified_base 68: mod_base = cm
  modified_base 69: mod_base = um
  modified_base 70: mod_base = cm
  modified_base 71: mod_base = um
  modified_base 72: mod_base = um
  modified_base 73: mod_base = cm
  modified_base 74: mod_base = gm
  modified_base 75: mod_base = gm
  modified_base 76: mod_base = OTHER; note = 2 -O-methyladenosine
  modified_base 77: mod_base = gm
  modified_base 78: mod_base = gm
  modified_base 79: mod_base = gm
  modified_base 80: mod_base = OTHER; note = 2 -O-methyladenosine
  modified_base 81: mod_base = gm
  modified_base 82: mod_base = cm
  modified_base 83: mod_base = OTHER; note = 2 -O-methyladenosine
  modified_base 84: mod_base = um
  modified_base 85: mod_base = cm
  modified_base 86: mod_base = OTHER; note = 2 -O-methyladenosine
  modified_base 107: mod_base = OTHER; note = any 2 -O-methyl ribonucelotide
  modified_base 107..109: mod_base = OTHER; note = linked via phosphorothioate
  modified_base 108: mod_base = OTHER; note = any 2 -O-methyl ribonucelotide
  modified_base 109: mod_base = OTHER; note = any 2 -O-methyl ribonucelotide
  source 1..109: mol_type = other RNA

SEQ ID NO: 2139 - RNA, 109 nt, synthetic construct; identical to SEQ ID NO: 2135
  modified_base 1..4: mod_base = OTHER; note = linked via phosphorothioate
  modified_base 1: mod_base = OTHER; note = 2 -O-methyladenosine
  modified_base 2: mod_base = cm
  modified_base 3: mod_base = um
  modified_base 4: mod_base = gm
  modified_base 5: mod_base = gm
  modified_base 6: mod_base = cm
  modified_base 7: mod_base = gm
  modified_base 8: mod_base = cm
  modified_base 13: mod_base = OTHER; note = 2 -O-methyladenosine
  modified_base 14: mod_base = um
  modified_base 15: mod_base = cm
  modified_base 16: mod_base = um
  modified_base 17: mod_base = gm
  modified_base 18: mod_base = OTHER; note = 2 -O-methyladenosine
  modified_base 19: mod_base = um
  modified_base 27: mod_base = OTHER; note = 2 -O-methyladenosine
  modified_base 28: mod_base = gm
  modified_base 29: mod_base = OTHER; note = 2 -O-methyladenosine
  modified_base 30: mod_base = gm
  modified_base 31: mod_base = cm
  modified_base 32: mod_base = cm
  modified_base 33: mod_base = OTHER; note = 2 -O-methyladenosine
  modified_base 34: mod_base = um
  modified_base 35: mod_base = cm
  modified_base 36: mod_base = OTHER; note = 2 -O-methyladenosine
  modified_base 37: mod_base = cm
  modified_base 38: mod_base = cm
  modified_base 44: mod_base = cm
  modified_base 45: mod_base = um
  modified_base 48: mod_base = gm
  modified_base 49: mod_base = um
  modified_base 50: mod_base = cm
  modified_base 51: mod_base = gm
  modified_base 57: mod_base = gm
  modified_base 58: mod_base = gm
  modified_base 59: mod_base = um
  modified_base 60: mod_base = OTHER; note = 2 -O-methyladenosine
  modified_base 61: mod_base = OTHER; note = 2 -O-methyladenosine
  modified_base 62: mod_base = OTHER; note = 2 -O-methyladenosine
  modified_base 63: mod_base = gm
  modified_base 64: mod_base = cm
  modified_base 65: mod_base = um
  modified_base 66: mod_base = cm
  modified_base 67: mod_base = cm
  modified_base 68: mod_base = cm
  modified_base 69: mod_base = um
  modified_base 70: mod_base = cm
  modified_base 71: mod_base = um
  modified_base 72: mod_base = um
  modified_base 73: mod_base = cm
  modified_base 74: mod_base = gm
  modified_base 75: mod_base = gm
  modified_base 76: mod_base = OTHER; note = 2 -O-methyladenosine
  modified_base 77: mod_base = gm
  modified_base 78: mod_base = gm
  modified_base 79: mod_base = gm
  modified_base 80: mod_base = OTHER; note = 2 -O-methyladenosine
  modified_base 81: mod_base = gm
  modified_base 82: mod_base = cm
  modified_base 83: mod_base = OTHER; note = 2 -O-methyladenosine
  modified_base 84: mod_base = um
  modified_base 107: mod_base = OTHER; note = any 2 -O-methyl ribonucelotide
  modified_base 107..109: mod_base = OTHER; note = linked via phosphorothioate
  modified_base 108: mod_base = OTHER; note = any 2 -O-methyl ribonucelotide
  modified_base 109: mod_base = OTHER; note = any 2 -O-methyl ribonucelotide
  source 1..109: mol_type = other RNA

SEQ ID NO: 2140 - RNA, 109 nt, synthetic construct; identical to SEQ ID NO: 2135
  modified_base 1..4: mod_base = OTHER; note = linked via phosphorothioate
  modified_base 1: mod_base = OTHER; note = 2 -O-methyladenosine
  modified_base 2: mod_base = cm
  modified_base 3: mod_base = um
  modified_base 44: mod_base = cm
  modified_base 45: mod_base = um
  modified_base 48: mod_base = gm
  modified_base 49: mod_base = um
  modified_base 50: mod_base = cm
  modified_base 51: mod_base = gm
  modified_base 63: mod_base = gm
  modified_base 64: mod_base = cm
  modified_base 65: mod_base = um
  modified_base 66: mod_base = cm
  modified_base 67: mod_base = cm
  modified_base 68: mod_base = cm
  modified_base 69: mod_base = um
  modified_base 70: mod_base = cm
  modified_base 71: mod_base = um
  modified_base 72: mod_base = um
  modified_base 73: mod_base = cm
  modified_base 74: mod_base = gm
  modified_base 75: mod_base = gm
  modified_base 76: mod_base = OTHER; note = 2 -O-methyladenosine
  modified_base 77: mod_base = gm
  modified_base 78: mod_base = gm
  modified_base 79: mod_base = gm
  modified_base 80: mod_base = OTHER; note = 2 -O-methyladenosine
  modified_base 81: mod_base = gm
  modified_base 82: mod_base = cm
  modified_base 107: mod_base = OTHER; note = any 2 -O-methyl ribonucelotide
  modified_base 107..109: mod_base = OTHER; note = linked via phosphorothioate
  modified_base 108: mod_base = OTHER; note = any 2 -O-methyl ribonucelotide
  modified_base 109: mod_base = OTHER; note = any 2 -O-methyl ribonucelotide
  source 1..109: mol_type = other RNA

SEQ ID NO: 2141 - RNA, 109 nt, synthetic construct; identical to SEQ ID NO: 2135
  modified_base 1..4: mod_base = OTHER; note = linked via phosphorothioate
  modified_base 1: mod_base = OTHER; note = 2 -O-methyladenosine
  modified_base 2: mod_base = cm
  modified_base 3: mod_base = um
  modified_base 63: mod_base = gm
  modified_base 64: mod_base = cm
  modified_base 65: mod_base = um
  modified_base 66: mod_base = cm
  modified_base 67: mod_base = cm
  modified_base 68: mod_base = cm
  modified_base 69: mod_base = um
  modified_base 70: mod_base = cm
  modified_base 71: mod_base = um
  modified_base 72: mod_base = um
  modified_base 73: mod_base = cm
  modified_base 74: mod_base = gm
  modified_base 75: mod_base = gm
  modified_base 76: mod_base = OTHER; note = 2 -O-methyladenosine
  modified_base 77: mod_base = gm
  modified_base 78: mod_base = gm
  modified_base 79: mod_base = gm
  modified_base 80: mod_base = OTHER; note = 2 -O-methyladenosine
  modified_base 81: mod_base = gm
  modified_base 82: mod_base = cm
  modified_base 107: mod_base = OTHER; note = any 2 -O-methyl ribonucelotide
  modified_base 107..109: mod_base = OTHER; note = linked via phosphorothioate
  modified_base 108: mod_base = OTHER; note = any 2 -O-methyl ribonucelotide
  modified_base 109: mod_base = OTHER; note = any 2 -O-methyl ribonucelotide
  source 1..109: mol_type = other RNA

SEQ ID NO: 2142 - RNA, 109 nt, synthetic construct; identical to SEQ ID NO: 2135
  modified_base 1..4: mod_base = OTHER; note = linked via phosphorothioate
  modified_base 1: mod_base = OTHER; note = 2 -O-methyladenosine
  modified_base 2: mod_base = cm
  modified_base 3: mod_base = um
  modified_base 6: mod_base = cm
  modified_base 8: mod_base = cm
  modified_base 9: mod_base = um
  modified_base 14: mod_base = um
  modified_base 15: mod_base = cm
  modified_base 27: mod_base = OTHER; note = 2 -O-methyladenosine
  modified_base 28: mod_base = gm
  modified_base 33: mod_base = OTHER; note = 2 -O-methyladenosine
  modified_base 34: mod_base = um
  modified_base 35: mod_base = cm
  modified_base 36: mod_base = OTHER; note = 2 -O-methyladenosine
  modified_base 37: mod_base = cm
  modified_base 42: mod_base = gm
  modified_base 43: mod_base = OTHER; note = 2 -O-methyladenosine
  modified_base 44: mod_base = cm
  modified_base 45: mod_base = um
  modified_base 48: mod_base = gm
  modified_base 49: mod_base = um
  modified_base 50: mod_base = cm
  modified_base 51: mod_base = gm
  modified_base 58: mod_base = gm
  modified_base 59: mod_base = um
  modified_base 61: mod_base = OTHER; note = 2 -O-methyladenosine
  modified_base 62: mod_base = OTHER; note = 2 -O-methyladenosine
  modified_base 63: mod_base = gm
  modified_base 64: mod_base = cm
  modified_base 65: mod_base = um
  modified_base 66: mod_base = cm
  modified_base 67: mod_base = cm
  modified_base 68: mod_base = cm
  modified_base 69: mod_base = um
  modified_base 70: mod_base = cm
  modified_base 71: mod_base = um
  modified_base 72: mod_base = um
  modified_base 73: mod_base = cm
  modified_base 74: mod_base = gm
  modified_base 75: mod_base = gm
  modified_base 76: mod_base = OTHER; note = 2 -O-methyladenosine
  modified_base 77: mod_base = gm
  modified_base 78: mod_base = gm
  modified_base 79: mod_base = gm
  modified_base 80: mod_base = OTHER; note = 2 -O-methyladenosine
  modified_base 81: mod_base = gm
  modified_base 82: mod_base = cm
  modified_base 83: mod_base = OTHER; note = 2 -O-methyladenosine
  modified_base 84: mod_base = um
  modified_base 106..109: mod_base = OTHER; note = linked via phosphorothioate
  modified_base 107: mod_base = OTHER; note = any 2 -O-methyl ribonucelotide
  modified_base 108: mod_base = OTHER; note = any 2 -O-methyl ribonucelotide
  modified_base 109: mod_base = OTHER; note = any 2 -O-methyl ribonucelotide
  source 1..109: mol_type = other RNA

SEQ ID NO: 2143 - RNA, 109 nt, synthetic construct; identical to SEQ ID NO: 2135
  modified_base 1..4: mod_base = OTHER; note = linked via phosphorothioate
  modified_base 1: mod_base = OTHER; note = 2 -O-methyladenosine
  modified_base 2: mod_base = cm
  modified_base 3: mod_base = um
  modified_base 33: mod_base = OTHER; note = 2 -O-methyladenosine
  modified_base 34: mod_base = um
  modified_base 35: mod_base = cm
  modified_base 36: mod_base = OTHER; note = 2 -O-methyladenosine
  modified_base 37: mod_base = cm
  modified_base 42: mod_base = gm
  modified_base 43: mod_base = OTHER; note = 2 -O-methyladenosine
  modified_base 44: mod_base = cm
  modified_base 45: mod_base = um
  modified_base 48: mod_base = gm
  modified_base 49: mod_base = um
  modified_base 50: mod_base = cm
  modified_base 51: mod_base = gm
  modified_base 58: mod_base = gm
  modified_base 59: mod_base = um
  modified_base 60: mod_base = OTHER; note = 2 -O-methyladenosine
  modified_base 61: mod_base = OTHER; note = 2 -O-methyladenosine
  modified_base 63: mod_base = gm
  modified_base 64: mod_base = cm
  modified_base 65: mod_base = um
  modified_base 66: mod_base = cm
  modified_base 67: mod_base = cm
  modified_base 68: mod_base = cm
  modified_base 69: mod_base = um
  modified_base 70: mod_base = cm
  modified_base 71: mod_base = um
  modified_base 72: mod_base = um
  modified_base 73: mod_base = cm
  modified_base 74: mod_base = gm
  modified_base 75: mod_base = gm
  modified_base 76: mod_base = OTHER; note = 2 -O-methyladenosine
  modified_base 77: mod_base = gm
  modified_base 78: mod_base = gm
  modified_base 79: mod_base = gm
  modified_base 80: mod_base = OTHER; note = 2 -O-methyladenosine
  modified_base 81: mod_base = gm
  modified_base 82: mod_base = cm
  modified_base 83: mod_base = OTHER; note = 2 -O-methyladenosine
  modified_base 84: mod_base = um
  modified_base 106..109: mod_base = OTHER; note = linked via phosphorothioate
  modified_base 107: mod_base = OTHER; note = any 2 -O-methyl ribonucelotide
  modified_base 108: mod_base = OTHER; note = any 2 -O-methyl ribonucelotide
  modified_base 109: mod_base = OTHER; note = any 2 -O-methyl ribonucelotide
  source 1..109: mol_type = other RNA

SEQ ID NO: 2144 - RNA, 109 nt, synthetic construct; identical to SEQ ID NO: 2135
  modified_base 1..4: mod_base = OTHER; note = linked via phosphorothioate
  modified_base 1: mod_base = OTHER; note = 2 -O-methyladenosine
  modified_base 2: mod_base = cm
  modified_base 3: mod_base = um
  modified_base 6: mod_base = cm
  modified_base 7: mod_base = gm
  modified_base 9: mod_base = um
  modified_base 14: mod_base = um
  modified_base 15: mod_base = cm
  modified_base 27: mod_base = OTHER; note = 2 -O-methyladenosine
  modified_base 28: mod_base = gm
  modified_base 42: mod_base = gm
  modified_base 43: mod_base = OTHER; note = 2 -O-methyladenosine
  modified_base 44: mod_base = cm
  modified_base 45: mod_base = um
  modified_base 48: mod_base = gm
  modified_base 49: mod_base = um
  modified_base 50: mod_base = cm
  modified_base 51: mod_base = gm
  modified_base 63: mod_base = gm
  modified_base 64: mod_base = cm
  modified_base 65: mod_base = um
  modified_base 66: mod_base = cm
  modified_base 67: mod_base = cm
  modified_base 68: mod_base = cm
  modified_base 69: mod_base = um
  modified_base 70: mod_base = cm
  modified_base 71: mod_base = um
  modified_base 72: mod_base = um
  modified_base 73: mod_base = cm
  modified_base 74: mod_base = gm
  modified_base 75: mod_base = gm
  modified_base 76: mod_base = OTHER; note = 2 -O-methyladenosine
  modified_base 77: mod_base = gm
  modified_base 78: mod_base = gm
  modified_base 79: mod_base = gm
  modified_base 80: mod_base = OTHER; note = 2 -O-methyladenosine
  modified_base 81: mod_base = gm
  modified_base 82: mod_base = cm
  modified_base 106..109: mod_base = OTHER; note = linked via phosphorothioate
  modified_base 107: mod_base = OTHER; note = any 2 -O-methyl ribonucelotide
  modified_base 108: mod_base = OTHER; note = any 2 -O-methyl ribonucelotide
  modified_base 109: mod_base = OTHER; note = any 2 -O-methyl ribonucelotide
  source 1..109: mol_type = other RNA

SEQ ID NO: 2145 - RNA, 119 nt, synthetic construct
  source 1..119: mol_type = other RNA
actggcgcttctatctgattactctgagcgccatcaccagcgactatgtcgtagtgggtaaagccgcttacggacttcggtccgtaagaggcatcagagnnnnnnnnnnnnnnnnnnnn

SEQ ID NO: 2146 - RNA, 119 nt, synthetic construct; identical to SEQ ID NO: 2145
  modified_base 1..4: mod_base = OTHER; note = linked via phosphorothioate
  modified_base 1: mod_base = OTHER; note = 2 -O-methyladenosine
  modified_base 2: mod_base = cm
  modified_base 3: mod_base = um
  modified_base 117: mod_base = OTHER; note = any 2 -O-methyl ribonucelotide
  modified_base 117..119: mod_base = OTHER; note = linked via phosphorothioate
  modified_base 118: mod_base = OTHER; note = any 2 -O-methyl ribonucelotide
  modified_base 119: mod_base = OTHER; note = any 2 -O-methyl ribonucelotide
  source 1..119: mol_type = other RNA

SEQ ID NO: 2147 - RNA, 122 nt, synthetic construct
  modified_base 1..4: mod_base = OTHER; note = linked via phosphorothioate
  modified_base 1: mod_base = OTHER; note = 2 -O-methyladenosine
  modified_base 2: mod_base = cm
  modified_base 3: mod_base = um
  modified_base 119..122: mod_base = OTHER; note = linked via phosphorothioate
  modified_base 120: mod_base = um
  modified_base 121: mod_base = um
  modified_base 122: mod_base = um
  source 1..122: mol_type = other RNA
actggcgcttctatctgattactctgagcgccatcaccagcgactatgtcgtagtgggtaaagccgcttacggacttcggtccgtaagaggcatcagagnnnnnnnnnnnnnnnnnnnnttt

SEQ ID NO: 2148 - RNA, 119 nt, synthetic construct; identical to SEQ ID NO: 2145
  modified_base 1..4: mod_base = OTHER; note = linked via phosphorothioate
  modified_base 1: mod_base = OTHER; note = 2 -O-methyladenosine
  modified_base 2: mod_base = cm
  modified_base 3: mod_base = um
  modified_base 4: mod_base = gm
  modified_base 5: mod_base = gm
  modified_base 6: mod_base = cm
  modified_base 7: mod_base = gm
  modified_base 8: mod_base = cm
  modified_base 9: mod_base = um
  modified_base 10: mod_base = um
  modified_base 11: mod_base = cm
  modified_base 12: mod_base = um
  modified_base 13: mod_base = OTHER; note = 2 -O-methyladenosine
  modified_base 14: mod_base = um
  modified_base 15: mod_base = cm
  modified_base 16: mod_base = um
  modified_base 17: mod_base = gm
  modified_base 18: mod_base = OTHER; note = 2 -O-methyladenosine
  modified_base 19: mod_base = um
  modified_base 27: mod_base = OTHER; note = 2 -O-methyladenosine
  modified_base 28: mod_base = gm
  modified_base 29: mod_base = cm
  modified_base 30: mod_base = gm
  modified_base 31: mod_base = cm
  modified_base 32: mod_base = cm
  modified_base 33: mod_base = OTHER; note = 2 -O-methyladenosine
  modified_base 34: mod_base = um
  modified_base 35: mod_base = cm
  modified_base 36: mod_base = OTHER; note = 2 -O-methyladenosine
  modified_base 37: mod_base = cm
  modified_base 38: mod_base = cm
  modified_base 44: mod_base = cm
  modified_base 45: mod_base = um
  modified_base 48: mod_base = gm
  modified_base 49: mod_base = um
  modified_base 50: mod_base = cm
  modified_base 51: mod_base = gm
  modified_base 57: mod_base = gm
  modified_base 58: mod_base = gm
  modified_base 59: mod_base = um
  modified_base 60: mod_base = OTHER; note = 2 -O-methyladenosine
  modified_base 61: mod_base = OTHER; note = 2 -O-methyladenosine
  modified_base 62: mod_base = OTHER; note = 2 -O-methyladenosine
  modified_base 63: mod_base = gm
  modified_base 64: mod_base = cm
  modified_base 65: mod_base = cm
  modified_base 66: mod_base = gm
  modified_base 67: mod_base = cm
  modified_base 68: mod_base = um
  modified_base 69: mod_base = um
  modified_base 70: mod_base = OTHER; note = 2 -O-methyladenosine
  modified_base 71: mod_base = cm
  modified_base 72: mod_base = gm
  modified_base 73: mod_base = gm
  modified_base 74: mod_base = OTHER; note = 2 -O-methyladenosine
  modified_base 75: mod_base = cm
  modified_base 76: mod_base = um
  modified_base 77: mod_base = um
  modified_base 78: mod_base = cm
  modified_base 79: mod_base = gm
  modified_base 80: mod_base = gm
  modified_base 81: mod_base = um
  modified_base 82: mod_base = cm
  modified_base 83: mod_base = cm
  modified_base 84: mod_base = gm
  modified_base 85: mod_base = um
  modified_base 86: mod_base = OTHER; note = 2 -O-methyladenosine
  modified_base 87: mod_base = OTHER; note = 2 -O-methyladenosine
  modified_base 88: mod_base = gm
  modified_base 89: mod_base = OTHER; note = 2 -O-methyladenosine
  modified_base 90: mod_base = gm
  modified_base 91: mod_base = gm
  modified_base 92: mod_base = cm
  modified_base 93: mod_base = OTHER; note = 2 -O-methyladenosine
  modified_base 94: mod_base = um
  modified_base 95: mod_base = cm
  modified_base 96: mod_base = OTHER; note = 2 -O-methyladenosine
  modified_base 117: mod_base = OTHER; note = any 2 -O-methyl ribonucelotide
  modified_base 117..119: mod_base = OTHER; note = linked via phosphorothioate
  modified_base 118: mod_base = OTHER; note = any 2 -O-methyl ribonucelotide
  modified_base 119: mod_base = OTHER; note = any 2 -O-methyl ribonucelotide
  source 1..119: mol_type = other RNA

SEQ ID NO: 2149 - RNA, 119 nt, synthetic construct; identical to SEQ ID NO: 2145
  modified_base 1..4: mod_base = OTHER; note = linked via phosphorothioate
  modified_base 1: mod_base = OTHER; note = 2 -O-methyladenosine
  modified_base 2: mod_base = cm
  modified_base 3: mod_base = um
  modified_base 4: mod_base = gm
  modified_base 5: mod_base = gm
  modified_base 6: mod_base = cm
  modified_base 7: mod_base = gm
  modified_base 8: mod_base = cm
  modified_base 13: mod_base = OTHER; note = 2 -O-methyladenosine
  modified_base 14: mod_base = um
  modified_base 15: mod_base = cm
  modified_base 16: mod_base = um
  modified_base 17: mod_base = gm
  modified_base 18: mod_base = OTHER; note = 2 -O-methyladenosine
  modified_base 19: mod_base = um
  modified_base 27: mod_base = OTHER; note = 2 -O-methyladenosine
  modified_base 28: mod_base = gm
  modified_base 29: mod_base = cm
  modified_base 30: mod_base = gm
  modified_base 31: mod_base = cm
  modified_base 32: mod_base = cm
  modified_base 33: mod_base = OTHER; note = 2 -O-methyladenosine
  modified_base 34: mod_base = um
  modified_base 35: mod_base = cm
  modified_base 36: mod_base = OTHER; note = 2 -O-methyladenosine
  modified_base 37: mod_base = cm
  modified_base 38: mod_base = cm
  modified_base 44: mod_base = cm
  modified_base 45: mod_base = um
  modified_base 48: mod_base = gm
  modified_base 49: mod_base = um
  modified_base 50: mod_base = cm
  modified_base 51: mod_base = gm
  modified_base 57: mod_base = gm
  modified_base 58: mod_base = gm
  modified_base 59: mod_base = um
  modified_base 60: mod_base = OTHER; note = 2 -O-methyladenosine
  modified_base 61: mod_base = OTHER; note = 2 -O-methyladenosine
  modified_base 62: mod_base = OTHER; note = 2 -O-methyladenosine
  modified_base 63: mod_base = gm
  modified_base 64: mod_base = cm
  modified_base 65: mod_base = cm
  modified_base 66: mod_base = gm
  modified_base 67: mod_base = cm
  modified_base 68: mod_base = um
  modified_base 69: mod_base = um
  modified_base 70: mod_base = OTHER; note = 2 -O-methyladenosine
  modified_base 71: mod_base = cm
  modified_base 72: mod_base = gm
  modified_base 73: mod_base = gm
  modified_base 74: mod_base = OTHER; note = 2 -O-methyladenosine
  modified_base 75: mod_base = cm
  modified_base 76: mod_base = um
  modified_base 77: mod_base = um
  modified_base 78: mod_base = cm
  modified_base 79: mod_base = gm
  modified_base 80: mod_base = gm
  modified_base 81: mod_base = um
  modified_base 82: mod_base = cm
  modified_base 83: mod_base = cm
  modified_base 84: mod_base = gm
  modified_base 85: mod_base = um
  modified_base 86: mod_base = OTHER; note = 2 -O-methyladenosine
  modified_base 87: mod_base = OTHER; note = 2 -O-methyladenosine
  modified_base 88: mod_base = gm
  modified_base 89: mod_base = OTHER; note = 2 -O-methyladenosine
  modified_base 90: mod_base = gm
  modified_base 91: mod_base = gm
  modified_base 92: mod_base = cm
  modified_base 93: mod_base = OTHER; note = 2 -O-methyladenosine
  modified_base 94: mod_base = um
  modified_base 117: mod_base = OTHER; note = any 2 -O-methyl ribonucelotide
  modified_base 117..119: mod_base = OTHER; note = linked via phosphorothioate
  modified_base 118: mod_base = OTHER; note = any 2 -O-methyl ribonucelotide
  modified_base 119: mod_base = OTHER; note = any 2 -O-methyl ribonucelotide
  source 1..119: mol_type = other RNA

SEQ ID NO: 2150 - RNA, 119 nt, synthetic construct; identical to SEQ ID NO: 2145
  modified_base 1..4: mod_base = OTHER; note = linked via phosphorothioate
  modified_base 1: mod_base = OTHER; note = 2 -O-methyladenosine
  modified_base 2: mod_base = cm
  modified_base 3: mod_base = um
  modified_base 44: mod_base = cm
  modified_base 45: mod_base = um
  modified_base 48: mod_base = gm
  modified_base 49: mod_base = um
  modified_base 50: mod_base = cm
  modified_base 51: mod_base = gm
  modified_base 60: mod_base = OTHER; note = 2 -O-methyladenosine
  modified_base 61: mod_base = OTHER; note = 2 -O-methyladenosine
  modified_base 62: mod_base = OTHER; note = 2 -O-methyladenosine
  modified_base 63: mod_base = gm
  modified_base 64: mod_base = cm
  modified_base 65: mod_base = cm
  modified_base 66: mod_base = gm
  modified_base 67: mod_base = cm
  modified_base 68: mod_base = um
  modified_base 69: mod_base = um
  modified_base 70: mod_base = OTHER; note = 2 -O-methyladenosine
  modified_base 71: mod_base = cm
  modified_base 72: mod_base = gm
  modified_base 73: mod_base = gm
  modified_base 74: mod_base = OTHER; note = 2 -O-methyladenosine
  modified_base 75: mod_base = cm
  modified_base 76: mod_base = um
  modified_base 77: mod_base = um
  modified_base 78: mod_base = cm
  modified_base 79: mod_base = gm
  modified_base 80: mod_base = gm
  modified_base 81: mod_base = um
  modified_base 82: mod_base = cm
  modified_base 83: mod_base = cm
  modified_base 84: mod_base = gm
  modified_base 85: mod_base = um
  modified_base 86: mod_base = OTHER; note = 2 -O-methyladenosine
  modified_base 87: mod_base = OTHER; note = 2 -O-methyladenosine
  modified_base 88: mod_base = gm
  modified_base 89: mod_base = OTHER; note = 2 -O-methyladenosine
  modified_base 90: mod_base = gm
  modified_base 91: mod_base = gm
  modified_base 92: mod_base = cm
  modified_base 117: mod_base = OTHER; note = any 2 -O-methyl ribonucelotide
  modified_base 117..119: mod_base = OTHER; note = linked via phosphorothioate
  modified_base 118: mod_base = OTHER; note = any 2 -O-methyl ribonucelotide
  modified_base 119: mod_base = OTHER; note = any 2 -O-methyl ribonucelotide
  source 1..119: mol_type = other RNA

SEQ ID NO: 2151 - RNA, 119 nt, synthetic construct; identical to SEQ ID NO: 2145
  modified_base 1..4: mod_base = OTHER; note = linked via phosphorothioate
  modified_base 1: mod_base = OTHER; note = 2 -O-methyladenosine
  modified_base 2: mod_base = cm
  modified_base 3: mod_base = um
  modified_base 60: mod_base = OTHER; note = 2 -O-methyladenosine
  modified_base 61: mod_base = OTHER; note = 2 -O-methyladenosine
  modified_base 62: mod_base = OTHER; note = 2 -O-methyladenosine
  modified_base 63: mod_base = gm
  modified_base 64: mod_base = cm
  modified_base 65: mod_base = cm
  modified_base 66: mod_base = gm
  modified_base 67: mod_base = cm
  modified_base 68: mod_base = um
  modified_base 69: mod_base = um
  modified_base 70: mod_base = OTHER; note = 2 -O-methyladenosine
  modified_base 71: mod_base = cm
  modified_base 72: mod_base = gm
  modified_base 73: mod_base = gm
  modified_base 74: mod_base = OTHER; note = 2 -O-methyladenosine
  modified_base 75: mod_base = cm
  modified_base 76: mod_base = um
  modified_base 77: mod_base = um
  modified_base 78: mod_base = cm
  modified_base 79: mod_base = gm
  modified_base 80: mod_base = gm
  modified_base 81: mod_base = um
  modified_base 82: mod_base = cm
  modified_base 83: mod_base = cm
  modified_base 84: mod_base = gm
  modified_base 85: mod_base = um
  modified_base 86: mod_base = OTHER; note = 2 -O-methyladenosine
  modified_base 87: mod_base = OTHER; note = 2 -O-methyladenosine
  modified_base 88: mod_base = gm
  modified_base 89: mod_base = OTHER; note = 2 -O-methyladenosine
  modified_base 90: mod_base = gm
  modified_base 91: mod_base = gm
  modified_base 92: mod_base = cm
  modified_base 117: mod_base = OTHER; note = any 2 -O-methyl ribonucelotide
  modified_base 117..119: mod_base = OTHER; note = linked via phosphorothioate
  modified_base 118: mod_base = OTHER; note = any 2 -O-methyl ribonucelotide
  modified_base 119: mod_base = OTHER; note = any 2 -O-methyl ribonucelotide
  source 1..119: mol_type = other RNA

SEQ ID NO: 2152 - RNA, 119 nt, synthetic construct; identical to SEQ ID NO: 2145
  modified_base 1..4: mod_base = OTHER; note = linked via phosphorothioate
  modified_base 1: mod_base = OTHER; note = 2 -O-methyladenosine
  modified_base 2: mod_base = cm
  modified_base 3: mod_base = um
  modified_base 6: mod_base = cm
  modified_base 8: mod_base = cm
  modified_base 9: mod_base = um
  modified_base 14: mod_base = um
  modified_base 15: mod_base = cm
  modified_base 27: mod_base = OTHER; note = 2 -O-methyladenosine
  modified_base 28: mod_base = gm
  modified_base 33: mod_base = OTHER; note = 2 -O-methyladenosine
  modified_base 34: mod_base = um
  modified_base 35: mod_base = cm
  modified_base 36: mod_base = OTHER; note = 2 -O-methyladenosine
  modified_base 37: mod_base = cm
  modified_base 42: mod_base = gm
  modified_base 43: mod_base = OTHER; note = 2 -O-methyladenosine
  modified_base 44: mod_base = cm
  modified_base 45: mod_base = um
  modified_base 48: mod_base = gm
  modified_base 49: mod_base = um
  modified_base 50: mod_base = cm
  modified_base 51: mod_base = gm
  modified_base 58: mod_base = gm
  modified_base 59: mod_base = um
  modified_base 60: mod_base = OTHER; note = 2 -O-methyladenosine
  modified_base 61: mod_base = OTHER; note = 2 -O-methyladenosine
  modified_base 63: mod_base = gm
  modified_base 64: mod_base = cm
  modified_base 65: mod_base = cm
  modified_base 66: mod_base = gm
  modified_base 67: mod_base = cm
  modified_base 68: mod_base = um
  modified_base 69: mod_base = um
  modified_base 70: mod_base = OTHER; note = 2 -O-methyladenosine
  modified_base 71: mod_base = cm
  modified_base 72: mod_base = gm
  modified_base 73: mod_base = gm
  modified_base 74: mod_base = OTHER; note = 2 -O-methyladenosine
  modified_base 75: mod_base = cm
  modified_base 76: mod_base = um
  modified_base 77: mod_base = um
  modified_base 78: mod_base = cm
  modified_base 79: mod_base = gm
  modified_base 80: mod_base = gm
  modified_base 81: mod_base = um
  modified_base 82: mod_base = cm
  modified_base 83: mod_base = cm
  modified_base 84: mod_base = gm
  modified_base 85: mod_base = um
  modified_base 86: mod_base = OTHER; note = 2 -O-methyladenosine
  modified_base 87: mod_base = OTHER; note = 2 -O-methyladenosine
  modified_base 88: mod_base = gm
  modified_base 89: mod_base = OTHER; note = 2 -O-methyladenosine
  modified_base 90: mod_base = gm
  modified_base 91: mod_base = gm
  modified_base 92: mod_base = cm
  modified_base 93: mod_base = OTHER; note = 2 -O-methyladenosine
  modified_base 94: mod_base = um
  modified_base 116..119: mod_base = OTHER; note = linked via phosphorothioate
  modified_base 117: mod_base = OTHER; note = any 2 -O-methyl ribonucelotide
  modified_base 118: mod_base = OTHER; note = any 2 -O-methyl ribonucelotide
  modified_base 119: mod_base = OTHER; note = any 2 -O-methyl ribonucelotide
  source 1..119: mol_type = other RNA

SEQ ID NO: 2153 - RNA, 119 nt, synthetic construct; identical to SEQ ID NO: 2145
  modified_base 1..4: mod_base = OTHER; note = linked via phosphorothioate
  modified_base 1: mod_base = OTHER; note = 2 -O-methyladenosine
  modified_base 2: mod_base = cm
  modified_base 3: mod_base = um
  modified_base 33: mod_base = OTHER; note = 2 -O-methyladenosine
  modified_base 34: mod_base = um
  modified_base 35: mod_base = cm
  modified_base 36: mod_base = OTHER; note = 2 -O-methyladenosine
  modified_base 37: mod_base = cm
  modified_base 42: mod_base = gm
  modified_base 43: mod_base = OTHER; note = 2 -O-methyladenosine
  modified_base 44: mod_base = cm
  modified_base 45: mod_base = um
  modified_base 48: mod_base = gm
  modified_base 49: mod_base = um
  modified_base 50: mod_base = cm
  modified_base 51: mod_base = gm
  modified_base 58: mod_base = gm
  modified_base 59: mod_base = um
  modified_base 60: mod_base = OTHER; note = 2 -O-methyladenosine
  modified_base 61: mod_base = OTHER; note = 2 -O-methyladenosine
  modified_base 63: mod_base = gm
  modified_base 64: mod_base = cm
  modified_base 65: mod_base = cm
  modified_base 66: mod_base = gm
  modified_base 67: mod_base = cm
  modified_base 68: mod_base = um
  modified_base 69: mod_base = um
  modified_base 70: mod_base = OTHER; note = 2 -O-methyladenosine
  modified_base 71: mod_base = cm
  modified_base 72: mod_base = gm
  modified_base 73: mod_base = gm
  modified_base 74: mod_base = OTHER; note = 2 -O-methyladenosine
  modified_base 75: mod_base = cm
  modified_base 76: mod_base = um
  modified_base 77: mod_base = um
  modified_base 78: mod_base = cm
  modified_base 79: mod_base = gm
  modified_base 80: mod_base = gm
  modified_base 81: mod_base = um
  modified_base 82: mod_base = cm
  modified_base 83: mod_base = cm
  modified_base 84: mod_base = gm
  modified_base 85: mod_base = um
  modified_base 86: mod_base = OTHER; note = 2 -O-methyladenosine
  modified_base 87: mod_base = OTHER; note = 2 -O-methyladenosine
  modified_base 88: mod_base = gm
  modified_base 89: mod_base = OTHER; note = 2 -O-methyladenosine
  modified_base 90: mod_base = gm
  modified_base 91: mod_base = gm
  modified_base 92: mod_base = cm
  modified_base 93: mod_base = OTHER; note = 2 -O-methyladenosine
  modified_base 94: mod_base = um
  modified_base 116..119: mod_base = OTHER; note = linked via phosphorothioate
  modified_base 117: mod_base = OTHER; note = any 2 -O-methyl ribonucelotide
  modified_base 118: mod_base = OTHER; note = any 2 -O-methyl ribonucelotide
  modified_base 119: mod_base = OTHER; note = any 2 -O-methyl ribonucelotide
  source 1..119: mol_type = other RNA

SEQ ID NO: 2154 - RNA, 119 nt, synthetic construct; identical to SEQ ID NO: 2145
  modified_base 1..4: mod_base = OTHER; note = linked via phosphorothioate
  modified_base 1: mod_base = OTHER; note = 2 -O-methyladenosine
  modified_base 2: mod_base = cm
  modified_base 3: mod_base = um
  modified_base 6: mod_base = cm
  modified_base 8: mod_base = cm
  modified_base 9: mod_base = um
  modified_base 14: mod_base = um
  modified_base 15: mod_base = cm
  modified_base 27: mod_base = OTHER; note = 2 -O-methyladenosine
  modified_base 28: mod_base = gm
  modified_base 42: mod_base = gm
  modified_base 43: mod_base = OTHER; note = 2 -O-methyladenosine
  modified_base 44: mod_base = cm
  modified_base 45: mod_base = um
  modified_base 48: mod_base = gm
  modified_base 49: mod_base = um
  modified_base 50: mod_base = cm
  modified_base 51: mod_base = gm
  modified_base 63: mod_base = gm
  modified_base 64: mod_base = cm
  modified_base 65: mod_base = cm
  modified_base 66: mod_base = gm
  modified_base 67: mod_base = cm
  modified_base 68: mod_base = um
  modified_base 69: mod_base = um
  modified_base 70: mod_base = OTHER; note = 2 -O-methyladenosine
  modified_base 71: mod_base = cm
  modified_base 72: mod_base = gm
  modified_base 73: mod_base = gm
  modified_base 74: mod_base = OTHER; note = 2 -O-methyladenosine
  modified_base 75: mod_base = cm
  modified_base 76: mod_base = um
  modified_base 77: mod_base = um
  modified_base 78: mod_base = cm
  modified_base 79: mod_base = gm
  modified_base 80: mod_base = gm
  modified_base 81: mod_base = um
  modified_base 82: mod_base = cm
  modified_base 83: mod_base = cm
  modified_base 84: mod_base = gm
  modified_base 85: mod_base = um
  modified_base 86: mod_base = OTHER; note = 2 -O-methyladenosine
  modified_base 87: mod_base = OTHER; note = 2 -O-methyladenosine
  modified_base 88: mod_base = gm
  modified_base 89: mod_base = OTHER; note = 2 -O-methyladenosine
  modified_base 90: mod_base = gm
  modified_base 91: mod_base = gm
  modified_base 92: mod_base = cm
  modified_base 116..119: mod_base = OTHER; note = linked via phosphorothioate
  modified_base 117: mod_base = OTHER; note = any 2 -O-methyl ribonucelotide
  modified_base 118: mod_base = OTHER; note = any 2 -O-methyl ribonucelotide
  modified_base 119: mod_base = OTHER; note = any 2 -O-methyl ribonucelotide
  source 1..119: mol_type = other RNA

SEQ ID NO: 2155 - RNA, 109 nt, synthetic construct
  source 1..109: mol_type = other RNA
actggcgcttctatctgattactctgagcgccatcaccagcgactatgtcgtagtgggtaaagctccctcttcggagggagcatcagagnnnnnnnnnnnnnnnnnnnn

SEQ ID NO: 2156 - RNA, 109 nt, synthetic construct; identical to SEQ ID NO: 2155
  modified_base 1..4: mod_base = OTHER; note = linked via phosphorothioate
  modified_base 1: mod_base = OTHER; note = 2 -O-methyladenosine
  modified_base 2: mod_base = cm
  modified_base 3: mod_base = um
  modified_base 106..109: mod_base = OTHER; note = linked via phosphorothioate
  modified_base 107: mod_base = OTHER; note = any 2 -O-methyl ribonucelotide
  modified_base 108: mod_base = OTHER; note = any 2 -O-methyl ribonucelotide
  modified_base 109: mod_base = OTHER; note = any 2 -O-methyl ribonucelotide
  source 1..109: mol_type = other RNA

SEQ ID NO: 2157 - RNA, 112 nt, synthetic construct
  modified_base 1..4: mod_base = OTHER; note = linked via phosphorothioate
  modified_base 1: mod_base = OTHER; note = 2 -O-methyladenosine
  modified_base 2: mod_base = cm
  modified_base 3: mod_base = um
  modified_base 109..112: mod_base = OTHER; note = linked via phosphorothioate
  modified_base 110: mod_base = um
  modified_base 111: mod_base = um
  modified_base 112: mod_base = um
  source 1..112: mol_type = other RNA
actggcgcttctatctgattactctgagcgccatcaccagcgactatgtcgtagtgggtaaagctccctcttcggagggagcatcagagnnnnnnnnnnnnnnnnnnnnttt

SEQ ID NO: 2158 - RNA, 109 nt, synthetic construct; identical to SEQ ID NO: 2155
  modified_base 1..4: mod_base = OTHER; note = linked via phosphorothioate
  modified_base 1: mod_base = OTHER; note = 2 -O-methyladenosine
  modified_base 2: mod_base = cm
  modified_base 3: mod_base = um
  modified_base 4: mod_base = gm
  modified_base 5: mod_base = gm
  modified_base 6: mod_base = cm
  modified_base 7: mod_base = gm
  modified_base 8: mod_base = cm
  modified_base 9: mod_base = um
  modified_base 10: mod_base = um
  modified_base 11: mod_base = cm
  modified_base 12: mod_base = um
  modified_base 13: mod_base = OTHER; note = 2 -O-methyladenosine
  modified_base 14: mod_base = um
  modified_base 15: mod_base = cm
  modified_base 16: mod_base = um
  modified_base 17: mod_base = gm
  modified_base 18: mod_base = OTHER; note = 2 -O-methyladenosine
  modified_base 19: mod_base = um
  modified_base 27: mod_base = OTHER; note = 2 -O-methyladenosine
  modified_base 28: mod_base = gm
  modified_base 29: mod_base = cm
  modified_base 30: mod_base = gm
  modified_base 31: mod_base = cm
  modified_base 32: mod_base = cm
  modified_base 33: mod_base = OTHER; note = 2 -O-methyladenosine
  modified_base 34: mod_base = um
  modified_base 35: mod_base = cm
  modified_base 36: mod_base = OTHER; note = 2 -O-methyladenosine
  modified_base 37: mod_base = cm
  modified_base 38: mod_base = cm
  modified_base 44: mod_base = cm
  modified_base 45: mod_base = um
  modified_base 48: mod_base = gm
  modified_base 49: mod_base = um
  modified_base 50: mod_base = cm
  modified_base 51: mod_base = gm
  modified_base 57: mod_base = gm
  modified_base 58: mod_base = gm
  modified_base 59: mod_base = um
  modified_base 60: mod_base = OTHER; note = 2 -O-methyladenosine
  modified_base 61: mod_base = OTHER; note = 2 -O-methyladenosine
  modified_base 62: mod_base = OTHER; note = 2 -O-methyladenosine
  modified_base 63: mod_base = gm
  modified_base 64: mod_base = cm
  modified_base 65: mod_base = um
  modified_base 66: mod_base = cm
  modified_base 67: mod_base = cm
  modified_base 68: mod_base = cm
  modified_base 69: mod_base = um
  modified_base 70: mod_base = cm
  modified_base 71: mod_base = um
  modified_base 72: mod_base = um
  modified_base 73: mod_base = cm
  modified_base 74: mod_base = gm
  modified_base 75: mod_base = gm
  modified_base 76: mod_base = OTHER; note = 2 -O-methyladenosine
  modified_base 77: mod_base = gm
  modified_base 78: mod_base = gm
  modified_base 79: mod_base = gm
  modified_base 80: mod_base = OTHER; note = 2 -O-methyladenosine
  modified_base 81: mod_base = gm
  modified_base 82: mod_base = cm
  modified_base 83: mod_base = OTHER; note = 2 -O-methyladenosine
  modified_base 84: mod_base = um
  modified_base 85: mod_base = cm
  modified_base 86: mod_base = OTHER; note = 2 -O-methyladenosine
  modified_base 106..109: mod_base = OTHER; note = linked via phosphorothioate
  modified_base 107: mod_base = OTHER; note = any 2 -O-methyl ribonucelotide
  modified_base 108: mod_base = OTHER; note = any 2 -O-methyl ribonucelotide
  modified_base 109: mod_base = OTHER; note = any 2 -O-methyl ribonucelotide
  source 1..109: mol_type = other RNA

SEQ ID NO: 2159 - RNA, 109 nt, synthetic construct; identical to SEQ ID NO: 2155
  modified_base 1..4: mod_base = OTHER; note = linked via phosphorothioate
  modified_base 1: mod_base = OTHER; note = 2 -O-methyladenosine
  modified_base 2: mod_base = cm
  modified_base 3: mod_base = um
  modified_base 4: mod_base = gm
  modified_base 5: mod_base = gm
  modified_base 6: mod_base = cm
  modified_base 7: mod_base = gm
  modified_base 8: mod_base = cm
  modified_base 13: mod_base = OTHER; note = 2 -O-methyladenosine
  modified_base 14: mod_base = um
  modified_base 15: mod_base = cm
  modified_base 16: mod_base = um
  modified_base 17: mod_base = gm
  modified_base 18: mod_base = OTHER; note = 2 -O-methyladenosine
  modified_base 19: mod_base = um
  modified_base 27: mod_base = OTHER; note = 2 -O-methyladenosine
  modified_base 28: mod_base = gm
  modified_base 29: mod_base = cm
  modified_base 30: mod_base = gm
  modified_base 31: mod_base = cm
  modified_base 32: mod_base = cm
  modified_base 33: mod_base = OTHER; note = 2 -O-methyladenosine
  modified_base 34: mod_base = um
  modified_base 35: mod_base = cm
  modified_base 36: mod_base = OTHER; note = 2 -O-methyladenosine
  modified_base 37: mod_base = cm
  modified_base 38: mod_base = cm
  modified_base 44: mod_base = cm
  modified_base 45: mod_base = um
  modified_base 48: mod_base = gm
  modified_base 49: mod_base = um
  modified_base 50: mod_base = cm
  modified_base 51: mod_base = gm
  modified_base 57: mod_base = gm
  modified_base 58: mod_base = gm
  modified_base 59: mod_base = um
  modified_base 60: mod_base = OTHER; note = 2 -O-methyladenosine
  modified_base 61: mod_base = OTHER; note = 2 -O-methyladenosine
  modified_base 62: mod_base = OTHER; note = 2 -O-methyladenosine
  modified_base 63: mod_base = gm
  modified_base 64: mod_base = cm
  modified_base 65: mod_base = um
  modified_base 66: mod_base = cm
  modified_base 67: mod_base = cm
  modified_base 68: mod_base = cm
  modified_base 69: mod_base = um
  modified_base 70: mod_base = cm
  modified_base 71: mod_base = um
  modified_base 72: mod_base = um
  modified_base 73: mod_base = cm
  modified_base 74: mod_base = gm
  modified_base 75: mod_base = gm
  modified_base 76: mod_base = OTHER; note = 2 -O-methyladenosine
  modified_base 77: mod_base = gm
  modified_base 78: mod_base = gm
  modified_base 79: mod_base = gm
  modified_base 80: mod_base = OTHER; note = 2 -O-methyladenosine
  modified_base 81: mod_base = gm
  modified_base 82: mod_base = cm
  modified_base 83: mod_base = OTHER; note = 2 -O-methyladenosine
  modified_base 84: mod_base = um
  modified_base 106..109: mod_base = OTHER; note = linked via phosphorothioate
  modified_base 107: mod_base = OTHER; note = any 2 -O-methyl ribonucelotide
  modified_base 108: mod_base = OTHER; note = any 2 -O-methyl ribonucelotide
  modified_base 109: mod_base = OTHER; note = any 2 -O-methyl ribonucelotide
  source 1..109: mol_type = other RNA

SEQ ID NO: 2160 - RNA, 109 nt, synthetic construct; identical to SEQ ID NO: 2155
  modified_base 1..4: mod_base = OTHER; note = linked via phosphorothioate
  modified_base 1: mod_base = OTHER; note = 2 -O-methyladenosine
  modified_base 2: mod_base = cm
  modified_base 3: mod_base = um
  modified_base 44: mod_base = cm
  modified_base 45: mod_base = um
  modified_base 48: mod_base = gm
  modified_base 49: mod_base = um
  modified_base 50: mod_base = cm
  modified_base 51: mod_base = gm
  modified_base 63: mod_base = gm
  modified_base 64: mod_base = cm
  modified_base 65: mod_base = um
  modified_base 66: mod_base = cm
  modified_base 67: mod_base = cm
  modified_base 68: mod_base = cm
  modified_base 69: mod_base = um
  modified_base 70: mod_base = cm
  modified_base 71: mod_base = um
  modified_base 72: mod_base = um
  modified_base 73: mod_base = cm
  modified_base 74: mod_base = gm
  modified_base 75: mod_base = gm
  modified_base 76: mod_base = OTHER; note = 2 -O-methyladenosine
  modified_base 77: mod_base = gm
  modified_base 78: mod_base = gm
  modified_base 79: mod_base = gm
  modified_base 80: mod_base = OTHER; note = 2 -O-methyladenosine
  modified_base 81: mod_base = gm
  modified_base 82: mod_base = cm
  modified_base 106..109: mod_base = OTHER; note = linked via phosphorothioate
  modified_base 107: mod_base = OTHER; note = any 2 -O-methyl ribonucelotide
  modified_base 108: mod_base = OTHER; note = any 2 -O-methyl ribonucelotide
  modified_base 109: mod_base = OTHER; note = any 2 -O-methyl ribonucelotide
  source 1..109: mol_type = other RNA

SEQ ID NO: 2161 - RNA, 109 nt, synthetic construct; identical to SEQ ID NO: 2155
  modified_base 1..4: mod_base = OTHER; note = linked via phosphorothioate
  modified_base 1: mod_base = OTHER; note = 2 -O-methyladenosine
  modified_base 2: mod_base = cm
  modified_base 3: mod_base = um
  modified_base 63: mod_base = gm
  modified_base 64: mod_base = cm
  modified_base 65: mod_base = um
  modified_base 66: mod_base = cm
  modified_base 67: mod_base = cm
  modified_base 68: mod_base = cm
  modified_base 69: mod_base = um
  modified_base 70: mod_base = cm
  modified_base 71: mod_base = um
  modified_base 72: mod_base = um
  modified_base 73: mod_base = cm
  modified_base 74: mod_base = gm
  modified_base 75: mod_base = gm
  modified_base 76: mod_base = OTHER; note = 2 -O-methyladenosine
  modified_base 77: mod_base = gm
  modified_base 78: mod_base = gm
  modified_base 79: mod_base = gm
  modified_base 80: mod_base = OTHER; note = 2 -O-methyladenosine
  modified_base 81: mod_base = gm
  modified_base 82: mod_base = cm
  modified_base 106..109: mod_base = OTHER; note = linked via phosphorothioate
  modified_base 107: mod_base = OTHER; note = any 2 -O-methyl ribonucelotide
  modified_base 108: mod_base = OTHER; note = any 2 -O-methyl ribonucelotide
  modified_base 109: mod_base = OTHER; note = any 2 -O-methyl ribonucelotide
  source 1..109: mol_type = other RNA

SEQ ID NO: 2162 - RNA, 109 nt, synthetic construct; identical to SEQ ID NO: 2155
  modified_base 1..4: mod_base = OTHER; note = linked via phosphorothioate
  modified_base 1: mod_base = OTHER; note = 2 -O-methyladenosine
  modified_base 2: mod_base = cm
  modified_base 3: mod_base = um
  modified_base 6: mod_base = cm
  modified_base 8: mod_base = cm
  modified_base 9: mod_base = um
  modified_base 14: mod_base = um
  modified_base 15: mod_base = cm
  modified_base 27: mod_base = OTHER; note = 2 -O-methyladenosine
  modified_base 28: mod_base = gm
  modified_base 33: mod_base = OTHER; note = 2 -O-methyladenosine
  modified_base 34: mod_base = um
  modified_base 35: mod_base = cm
  modified_base 36: mod_base = OTHER; note = 2 -O-methyladenosine
  modified_base 37: mod_base = cm
  modified_base 42: mod_base = gm
  modified_base 43: mod_base = OTHER; note = 2 -O-methyladenosine
  modified_base 44: mod_base = cm
  modified_base 45: mod_base = um
  modified_base 48: mod_base = gm
  modified_base 49: mod_base = um
  modified_base 50: mod_base = cm
  modified_base 51: mod_base = gm
  modified_base 58: mod_base = gm
  modified_base 59: mod_base = um
  modified_base 60: mod_base = OTHER; note = 2 -O-methyladenosine
  modified_base 61: mod_base = OTHER; note = 2 -O-methyladenosine
  modified_base 63: mod_base = gm
  modified_base 64: mod_base = cm
  modified_base 65: mod_base = um
  modified_base 66: mod_base = cm
  modified_base 67: mod_base = cm
  modified_base 68: mod_base = cm
  modified_base 69: mod_base = um
  modified_base 70: mod_base = cm
  modified_base 71: mod_base = um
  modified_base 72: mod_base = um
  modified_base 73: mod_base = cm
  modified_base 74: mod_base = gm
  modified_base 75: mod_base = gm
  modified_base 76: mod_base = OTHER; note = 2 -O-methyladenosine
  modified_base 77: mod_base = gm
  modified_base 78: mod_base = gm
  modified_base 79: mod_base = gm
  modified_base 80: mod_base = OTHER; note = 2 -O-methyladenosine
  modified_base 81: mod_base = gm
  modified_base 82: mod_base = cm
  modified_base 83: mod_base = OTHER; note = 2 -O-methyladenosine
  modified_base 84: mod_base = um
  modified_base 106..109: mod_base = OTHER; note = linked via phosphorothioate
  modified_base 107: mod_base = OTHER; note = any 2 -O-methyl ribonucelotide
  modified_base 108: mod_base = OTHER; note = any 2 -O-methyl ribonucelotide
  modified_base 109: mod_base = OTHER; note = any 2 -O-methyl ribonucelotide
  source 1..109: mol_type = other RNA

SEQ ID NO: 2163 - RNA, 109 nt, synthetic construct; identical to SEQ ID NO: 2155
  modified_base 1..4: mod_base = OTHER; note = linked via phosphorothioate
  modified_base 1: mod_base = OTHER; note = 2 -O-methyladenosine
  modified_base 2: mod_base = cm
  modified_base 3: mod_base = um
  modified_base 33: mod_base = OTHER; note = 2 -O-methyladenosine
  modified_base 34: mod_base = um
  modified_base 35: mod_base = cm
  modified_base 36: mod_base = OTHER; note = 2 -O-methyladenosine
  modified_base 37: mod_base = cm
  modified_base 42: mod_base = gm
  modified_base 43: mod_base = OTHER; note = 2 -O-methyladenosine
  modified_base 44: mod_base = cm
  modified_base 45: mod_base = um
  modified_base 48: mod_base = gm
  modified_base 49: mod_base = um
  modified_base 50: mod_base = cm
  modified_base 51: mod_base = gm
  modified_base 58: mod_base = gm
  modified_base 59: mod_base = um
  modified_base 60: mod_base = OTHER; note = 2 -O-methyladenosine
  modified_base 61: mod_base = OTHER; note = 2 -O-methyladenosine
  modified_base 63: mod_base = gm
  modified_base 64: mod_base = cm
  modified_base 65: mod_base = um
  modified_base 66: mod_base = cm
  modified_base 67: mod_base = cm
  modified_base 68: mod_base = cm
  modified_base 69: mod_base = um
  modified_base 70: mod_base = cm
  modified_base 71: mod_base = um
  modified_base 72: mod_base = um
  modified_base 73: mod_base = cm
  modified_base 74: mod_base = gm
  modified_base 75: mod_base = gm
  modified_base 76: mod_base = OTHER; note = 2 -O-methyladenosine
  modified_base 77: mod_base = gm
  modified_base 78: mod_base = gm
  modified_base 79: mod_base = gm
  modified_base 80: mod_base = OTHER; note = 2 -O-methyladenosine
  modified_base 81: mod_base = gm
  modified_base 82: mod_base = cm
  modified_base 83: mod_base = OTHER; note = 2 -O-methyladenosine
  modified_base 84: mod_base = um
  modified_base 106..109: mod_base = OTHER; note = linked via phosphorothioate
  modified_base 107: mod_base = OTHER; note = any 2 -O-methyl ribonucelotide
  modified_base 108: mod_base = OTHER; note = any 2 -O-methyl ribonucelotide
  modified_base 109: mod_base = OTHER; note = any 2 -O-methyl ribonucelotide
  source 1..109: mol_type = other RNA

SEQ ID NO: 2164 - RNA, 109 nt, synthetic construct; identical to SEQ ID NO: 2155
  modified_base 1..4: mod_base = OTHER; note = linked via phosphorothioate
  modified_base 1: mod_base = OTHER; note = 2 -O-methyladenosine
  modified_base 2: mod_base = cm
  modified_base 3: mod_base = um
  modified_base 6: mod_base = cm
  modified_base 8: mod_base = cm
  modified_base 9: mod_base = um
  modified_base 14: mod_base = um
  modified_base 15: mod_base = cm
  modified_base 27: mod_base = OTHER; note = 2 -O-methyladenosine
  modified_base 28: mod_base = gm
  modified_base 42: mod_base = gm
  modified_base 43: mod_base = OTHER; note = 2 -O-methyladenosine
  modified_base 44: mod_base = cm
  modified_base 45: mod_base = um
  modified_base 48: mod_base = gm
  modified_base 49: mod_base = um
  modified_base 50: mod_base = cm
  modified_base 51: mod_base = gm
  modified_base 63: mod_base = gm
  modified_base 64: mod_base = cm
  modified_base 65: mod_base = um
  modified_base 66: mod_base = cm
  modified_base 67: mod_base = cm
  modified_base 68: mod_base = cm
  modified_base 69: mod_base = um
  modified_base 70: mod_base = cm
  modified_base 71: mod_base = um
  modified_base 72: mod_base = um
  modified_base 73: mod_base = cm
  modified_base 74: mod_base = gm
  modified_base 75: mod_base = gm
  modified_base 76: mod_base = OTHER; note = 2 -O-methyladenosine
  modified_base 77: mod_base = gm
  modified_base 78: mod_base = gm
  modified_base 79: mod_base = gm
  modified_base 80: mod_base = OTHER; note = 2 -O-methyladenosine
  modified_base 81: mod_base = gm
  modified_base 82: mod_base = cm
  modified_base 106..109: mod_base = OTHER; note = linked via phosphorothioate
  modified_base 107: mod_base = OTHER; note = any 2 -O-methyl ribonucelotide
  modified_base 108: mod_base = OTHER; note = any 2 -O-methyl ribonucelotide
  modified_base 109: mod_base = OTHER; note = any 2 -O-methyl ribonucelotide
  source 1..109: mol_type = other RNA

SEQ ID NO: 2165 - RNA, 109 nt, synthetic construct
  source 1..109: mol_type = other RNA
actggcgcttttatctgattactttgagagccatcaccagcgactatgtcgtagtgggtaaagctccctcttcggagggagcatcaaagtcctggcttcctggtgaaga

SEQ ID NO: 2166 - RNA, 109 nt, synthetic construct; identical to SEQ ID NO: 2165
  modified_base 1..4: mod_base = OTHER; note = linked via phosphorothioate
  modified_base 1: mod_base = OTHER; note = 2 -O-methyladenosine
  modified_base 2: mod_base = cm
  modified_base 3: mod_base = um
  modified_base 107: mod_base = OTHER; note = 2 -O-methyladenosine
  modified_base 107..109: mod_base = OTHER; note = linked via phosphorothioate
  modified_base 108: mod_base = gm
  modified_base 109: mod_base = OTHER; note = 2 -O-methyladenosine
  source 1..109: mol_type = other RNA

SEQ ID NO: 2167 - RNA, 109 nt, synthetic construct
  source 1..109: mol_type = other RNA
actggcgcttttatctgattactttgagagccatcaccagcgactatgtcgtagtgggtaaagctccctcttcggagggagcatcaaagtggcttcctggtgaagatga

SEQ ID NO: 2168 - RNA, 109 nt, synthetic construct; identical to SEQ ID NO: 2167
  modified_base 1..4: mod_base = OTHER; note = linked via phosphorothioate
  modified_base 1: mod_base = OTHER; note = 2 -O-methyladenosine
  modified_base 2: mod_base = cm
  modified_base 3: mod_base = um
  modified_base 107: mod_base = um
  modified_base 107..109: mod_base = OTHER; note = linked via phosphorothioate
  modified_base 108: mod_base = gm
  modified_base 109: mod_base = OTHER; note = 2 -O-methyladenosine
  source 1..109: mol_type = other RNA

SEQ ID NO: 2169 - RNA, 109 nt, synthetic construct
  source 1..109: mol_type = other RNA
actggcgcttttatctgattactttgagagccatcaccagcgactatgtcgtagtgggtaaagctccctcttcggagggagcatcaaaggtgtagtacaagagatagaa

SEQ ID NO: 2170 - RNA, 109 nt, synthetic construct; identical to SEQ ID NO: 2169
  modified_base 1..4: mod_base = OTHER; note = linked via phosphorothioate
  modified_base 1: mod_base = OTHER; note = 2 -O-methyladenosine
  modified_base 2: mod_base = cm
  modified_base 3: mod_base = um
  modified_base 107: mod_base = gm
  modified_base 107..109: mod_base = OTHER; note = linked via phosphorothioate
  modified_base 108: mod_base = OTHER; note = 2 -O-methyladenosine
  modified_base 109: mod_base = OTHER; note = 2 -O-methyladenosine
  source 1..109: mol_type = other RNA

SEQ ID NO: 2171 - RNA, 109 nt, synthetic construct
  source 1..109: mol_type = other RNA
actggcgcttctatctgattactctgagcgccatcaccagcgactatgtcgtagtgggtaaagctccctcttcggagggagcatcagagtcctggcttcctggtgaaga

SEQ ID NO: 2172 - RNA, 109 nt, synthetic construct; identical to SEQ ID NO: 2171
  modified_base 1..4: mod_base = OTHER; note = linked via phosphorothioate
  modified_base 1: mod_base = OTHER; note = 2 -O-methyladenosine
  modified_base 2: mod_base = cm
  modified_base 3: mod_base = um
  modified_base 107: mod_base = OTHER; note = 2 -O-methyladenosine
  modified_base 107..109: mod_base = OTHER; note = linked via phosphorothioate
  modified_base 108: mod_base = gm
  modified_base 109: mod_base = OTHER; note = 2 -O-methyladenosine
  source 1..109: mol_type = other RNA

SEQ ID NO: 2173 - RNA, 109 nt, synthetic construct
  source 1..109: mol_type = other RNA
actggcgcttctatctgattactctgagcgccatcaccagcgactatgtcgtagtgggtaaagctccctcttcggagggagcatcagagtggcttcctggtgaagatga

SEQ ID NO: 2174 - RNA, 109 nt, synthetic construct; identical to SEQ ID NO: 2173
  modified_base 1..4: mod_base = OTHER; note = linked via phosphorothioate
  modified_base 1: mod_base = OTHER; note = 2 -O-methyladenosine
  modified_base 2: mod_base = cm
  modified_base 3: mod_base = um
  modified_base 107: mod_base = um
  modified_base 107..109: mod_base = OTHER; note = linked via phosphorothioate
  modified_base 108: mod_base = gm
  modified_base 109: mod_base = OTHER; note = 2 -O-methyladenosine
  source 1..109: mol_type = other RNA

SEQ ID NO: 2175 - RNA, 109 nt, synthetic construct
  source 1..109: mol_type = other RNA
actggcgcttctatctgattactctgagcgccatcaccagcgactatgtcgtagtgggtaaagctccctcttcggagggagcatcagaggtgtagtacaagagatagaa

SEQ ID NO: 2176 - RNA, 109 nt, synthetic construct; identical to SEQ ID NO: 2175
  modified_base 1..4: mod_base = OTHER; note = linked via phosphorothioate
  modified_base 1: mod_base = OTHER; note = 2 -O-methyladenosine
  modified_base 2: mod_base = cm
  modified_base 3: mod_base = um
  modified_base 107: mod_base = gm
  modified_base 107..109: mod_base = OTHER; note = linked via phosphorothioate
  modified_base 108: mod_base = OTHER; note = 2 -O-methyladenosine
  modified_base 109: mod_base = OTHER; note = 2 -O-methyladenosine
  source 1..109: mol_type = other RNA

SEQ ID NO: 2177 - RNA, 107 nt, synthetic construct
  source 1..107: mol_type = other RNA
actggcgcttttatctgattactttgagagccatcaccagcgactatgtcgtagtgggtaaagctccctcttcggagggagcatcaaagggccgagatgtctcgctc

SEQ ID NO: 2178 - RNA, 107 nt, synthetic construct; identical to SEQ ID NO: 2177
  modified_base 1..4: mod_base = OTHER; note = linked via phosphorothioate
  modified_base 1: mod_base = OTHER; note = 2 -O-methyladenosine
  modified_base 2: mod_base = cm
  modified_base 3: mod_base = um
  modified_base 105: mod_base = cm
  modified_base 105..107: mod_base = OTHER; note = linked via phosphorothioate
  modified_base 106: mod_base = um
  modified_base 107: mod_base = cm
  source 1..107: mol_type = other RNA

SEQ ID NO: 2179 - RNA, 119 nt, synthetic construct
  source 1..119: mol_type = other RNA
actggcgcttctatctgattactctgagcgccatcaccagcgactatgtcgtagtgggtaaagccgcttacggacttcggtccgtaagaggcatcagagtcctggcttcctggtgaaga

SEQ ID NO: 2180 - RNA, 119 nt, synthetic construct; identical to SEQ ID NO: 2179
  modified_base 1..4: mod_base = OTHER; note = linked via phosphorothioate
  modified_base 1: mod_base = OTHER; note = 2 -O-methyladenosine
  modified_base 2: mod_base = cm
  modified_base 3: mod_base = um
  modified_base 117: mod_base = OTHER; note = 2 -O-methyladenosine
  modified_base 117..119: mod_base = OTHER; note = linked via phosphorothioate
  modified_base 118: mod_base = gm
  modified_base 119: mod_base = OTHER; note = 2 -O-methyladenosine
  source 1..119: mol_type = other RNA

SEQ ID NO: 2181 - RNA, 123 nt, synthetic construct
  modified_base 1..4: mod_base = OTHER; note = linked via phosphorothioate
  modified_base 1: mod_base = OTHER; note = 2 -O-methyladenosine
  modified_base 2: mod_base = cm
  modified_base 3: mod_base = um
  modified_base 120..123: mod_base = OTHER; note = linked via phosphorothioate
  modified_base 121: mod_base = um
  modified_base 122: mod_base = um
  modified_base 123: mod_base = um
  source 1..123: mol_type = other RNA
actggcgcttctatctgattactctgagcgccatcaccagcgactatgtcgtagtgggtaaagccgcttacggacttcggtccgtaagaggcatcagagtcctggcttcctggtgaagatttt

SEQ ID NO: 2182 - RNA, 119 nt, synthetic construct; identical to SEQ ID NO: 2179
  modified_base 1..4: mod_base = OTHER; note = linked via phosphorothioate
  modified_base 1: mod_base = OTHER; note = 2 -O-methyladenosine
  modified_base 2: mod_base = cm
  modified_base 3: mod_base = um
  modified_base 4: mod_base = gm
  modified_base 5: mod_base = gm
  modified_base 6: mod_base = cm
  modified_base 7: mod_base = gm
  modified_base 8: mod_base = cm
  modified_base 9: mod_base = um
  modified_base 10: mod_base = um
  modified_base 11: mod_base = cm
  modified_base 12: mod_base = um
  modified_base 13: mod_base = OTHER; note = 2 -O-methyladenosine
  modified_base 14: mod_base = um
  modified_base 15: mod_base = cm
  modified_base 16: mod_base = um
  modified_base 17: mod_base = gm
  modified_base 18: mod_base = OTHER; note = 2 -O-methyladenosine
  modified_base 19: mod_base = um
  modified_base 27: mod_base = OTHER; note = 2 -O-methyladenosine
  modified_base 28: mod_base = gm
  modified_base 29: mod_base = cm
  modified_base 30: mod_base = gm
  modified_base 31: mod_base = cm
  modified_base 32: mod_base = cm
  modified_base 33: mod_base = OTHER; note = 2 -O-methyladenosine
  modified_base 34: mod_base = um
  modified_base 35: mod_base = cm
  modified_base 36: mod_base = OTHER; note = 2 -O-methyladenosine
  modified_base 37: mod_base = cm
  modified_base 38: mod_base = cm
  modified_base 44: mod_base = cm
  modified_base 45: mod_base = um
  modified_base 48: mod_base = gm
  modified_base 49: mod_base = um
  modified_base 50: mod_base = cm
  modified_base 51: mod_base = gm
  modified_base 57: mod_base = gm
  modified_base 58: mod_base = gm
  modified_base 59: mod_base = um
  modified_base 60: mod_base = OTHER; note = 2 -O-methyladenosine
  modified_base 61: mod_base = OTHER; note = 2 -O-methyladenosine
  modified_base 62: mod_base = OTHER; note = 2 -O-methyladenosine
  modified_base 63: mod_base = gm
  modified_base 64: mod_base = cm
  modified_base 65: mod_base = cm
  modified_base 66: mod_base = gm
  modified_base 67: mod_base = cm
  modified_base 68: mod_base = um
  modified_base 69: mod_base = um
  modified_base 70: mod_base = OTHER; note = 2 -O-methyladenosine
  modified_base 71: mod_base = cm
  modified_base 72: mod_base = gm
  modified_base 73: mod_base = gm
  modified_base 74: mod_base = OTHER; note = 2 -O-methyladenosine
  modified_base 75: mod_base = cm
  modified_base 76: mod_base = um
  modified_base 77: mod_base = um
  modified_base 78: mod_base = cm
  modified_base 79: mod_base = gm
  modified_base 80: mod_base = gm
  modified_base 81: mod_base = um
  modified_base 82: mod_base = cm
  modified_base 83: mod_base = cm
  modified_base 84: mod_base = gm
  modified_base 85: mod_base = um
  modified_base 86: mod_base = OTHER; note = 2 -O-methyladenosine
  modified_base 87: mod_base = OTHER; note = 2 -O-methyladenosine
  modified_base 88: mod_base = gm
  modified_base 89: mod_base = OTHER; note = 2 -O-methyladenosine
  modified_base 90: mod_base = gm
  modified_base 91: mod_base = gm
  modified_base 92: mod_base = cm
  modified_base 93: mod_base = OTHER; note = 2 -O-methyladenosine
  modified_base 94: mod_base = um
  modified_base 95: mod_base = cm
  modified_base 96: mod_base = OTHER; note = 2 -O-methyladenosine
  modified_base 117: mod_base = OTHER; note = 2 -O-methyladenosine
  modified_base 117..119: mod_base = OTHER; note = linked via phosphorothioate
  modified_base 118: mod_base = gm
  modified_base 119: mod_base = OTHER; note = 2 -O-methyladenosine
  source 1..119: mol_type = other RNA

SEQ ID NO: 2183 - RNA, 119 nt, synthetic construct; identical to SEQ ID NO: 2179
  modified_base 1..4: mod_base = OTHER; note = linked via phosphorothioate
  modified_base 1: mod_base = OTHER; note = 2 -O-methyladenosine
  modified_base 2: mod_base = cm
  modified_base 3: mod_base = um
  modified_base 4: mod_base = gm
  modified_base 5: mod_base = gm
  modified_base 6: mod_base = cm
  modified_base 7: mod_base = gm
  modified_base 8: mod_base = cm
  modified_base 13: mod_base = OTHER; note = 2 -O-methyladenosine
  modified_base 14: mod_base = um
  modified_base 15: mod_base = cm
  modified_base 16: mod_base = um
  modified_base 17: mod_base = gm
  modified_base 18: mod_base = OTHER; note = 2 -O-methyladenosine
  modified_base 19: mod_base = um
  modified_base 27: mod_base = OTHER; note = 2 -O-methyladenosine
  modified_base 28: mod_base = gm
  modified_base 29: mod_base = cm
  modified_base 30: mod_base = gm
  modified_base 31: mod_base = cm
  modified_base 32: mod_base = cm
  modified_base 33: mod_base = OTHER; note = 2 -O-methyladenosine
  modified_base 34: mod_base = um
  modified_base 35: mod_base = cm
  modified_base 36: mod_base = OTHER; note = 2 -O-methyladenosine
  modified_base 37: mod_base = cm
  modified_base 38: mod_base = cm
  modified_base 44: mod_base = cm
  modified_base 45: mod_base = um
  modified_base 48: mod_base = gm
  modified_base 49: mod_base = um
  modified_base 50: mod_base = cm
  modified_base 51: mod_base = gm
  modified_base 57: mod_base = gm
  modified_base 58: mod_base = gm
  modified_base 59: mod_base = um
  modified_base 60: mod_base = OTHER; note = 2 -O-methyladenosine
  modified_base 61: mod_base = OTHER; note = 2 -O-methyladenosine
  modified_base 62: mod_base = OTHER; note = 2 -O-methyladenosine
  modified_base 63: mod_base = gm
  modified_base 64: mod_base = cm
  modified_base 65: mod_base = cm
  modified_base 66: mod_base = gm
  modified_base 67: mod_base = cm
  modified_base 68: mod_base = um
  modified_base 69: mod_base = um
  modified_base 70: mod_base = OTHER; note = 2 -O-methyladenosine
  modified_base 71: mod_base = cm
  modified_base 72: mod_base = gm
  modified_base 73: mod_base = gm
  modified_base 74: mod_base = OTHER; note = 2 -O-methyladenosine
  modified_base 75: mod_base = cm
  modified_base 76: mod_base = um
  modified_base 77: mod_base = um
  modified_base 78: mod_base = cm
  modified_base 79: mod_base = gm
  modified_base 80: mod_base = gm
  modified_base 81: mod_base = um
  modified_base 82: mod_base = cm
  modified_base 83: mod_base = cm
  modified_base 84: mod_base = gm
  modified_base 85: mod_base = um
  modified_base 86: mod_base = OTHER; note = 2 -O-methyladenosine
  modified_base 87: mod_base = OTHER; note = 2 -O-methyladenosine
  modified_base 88: mod_base = gm
  modified_base 89: mod_base = OTHER; note = 2 -O-methyladenosine
  modified_base 90: mod_base = gm
  modified_base 91: mod_base = gm
  modified_base 92: mod_base = cm
  modified_base 93: mod_base = OTHER; note = 2 -O-methyladenosine
  modified_base 94: mod_base = um
  modified_base 117: mod_base = OTHER; note = 2 -O-methyladenosine
  modified_base 117..119: mod_base = OTHER; note = linked via phosphorothioate
  modified_base 118: mod_base = gm
  modified_base 119: mod_base = OTHER; note = 2 -O-methyladenosine
  source 1..119: mol_type = other RNA

SEQ ID NO: 2184 - RNA, 119 nt, synthetic construct; identical to SEQ ID NO: 2179
  modified_base 1..4: mod_base = OTHER; note = linked via phosphorothioate
  modified_base 1: mod_base = OTHER; note = 2 -O-methyladenosine
  modified_base 2: mod_base = cm
  modified_base 3: mod_base = um
  modified_base 44: mod_base = cm
  modified_base 45: mod_base = um
  modified_base 48: mod_base = gm
  modified_base 49: mod_base = um
  modified_base 50: mod_base = cm
  modified_base 51: mod_base = gm
  modified_base 60: mod_base = OTHER; note = 2 -O-methyladenosine
  modified_base 61: mod_base = OTHER; note = 2 -O-methyladenosine
  modified_base 62: mod_base = OTHER; note = 2 -O-methyladenosine
  modified_base 63: mod_base = gm
  modified_base 64: mod_base = cm
  modified_base 65: mod_base = cm
  modified_base 66: mod_base = gm
  modified_base 67: mod_base = cm
  modified_base 68: mod_base = um
  modified_base 69: mod_base = um
  modified_base 70: mod_base = OTHER; note = 2 -O-methyladenosine
  modified_base 71: mod_base = cm
  modified_base 72: mod_base = gm
  modified_base 73: mod_base = gm
  modified_base 74: mod_base = OTHER; note = 2 -O-methyladenosine
  modified_base 75: mod_base = cm
  modified_base 76: mod_base = um
  modified_base 77: mod_base = um
  modified_base 78: mod_base = cm
  modified_base 79: mod_base = gm
  modified_base 80: mod_base = gm
  modified_base 81: mod_base = um
  modified_base 82: mod_base = cm
  modified_base 83: mod_base = cm
  modified_base 84: mod_base = gm
  modified_base 85: mod_base = um
  modified_base 86: mod_base = OTHER; note = 2 -O-methyladenosine
  modified_base 87: mod_base = OTHER; note = 2 -O-methyladenosine
  modified_base 88: mod_base = gm
  modified_base 89: mod_base = OTHER; note = 2 -O-methyladenosine
  modified_base 90: mod_base = gm
  modified_base 91: mod_base = gm
  modified_base 92: mod_base = cm
  modified_base 117: mod_base = OTHER; note = 2 -O-methyladenosine
  modified_base 117..119: mod_base = OTHER; note = linked via phosphorothioate
  modified_base 118: mod_base = gm
  modified_base 119: mod_base = OTHER; note = 2 -O-methyladenosine
  source 1..119: mol_type = other RNA

SEQ ID NO: 2185 - RNA, 119 nt, synthetic construct; identical to SEQ ID NO: 2179
  modified_base 1..4: mod_base = OTHER; note = linked via phosphorothioate
  modified_base 1: mod_base = OTHER; note = 2 -O-methyladenosine
  modified_base 2: mod_base = cm
  modified_base 3: mod_base = um
  modified_base 60: mod_base = OTHER; note = 2 -O-methyladenosine
  modified_base 61: mod_base = OTHER; note = 2 -O-methyladenosine
  modified_base 62: mod_base = OTHER; note = 2 -O-methyladenosine
  modified_base 63: mod_base = gm
  modified_base 64: mod_base = cm
  modified_base 65: mod_base = cm
  modified_base 66: mod_base = gm
  modified_base 67: mod_base = cm
  modified_base 68: mod_base = um
  modified_base 69: mod_base = um
  modified_base 70: mod_base = OTHER; note = 2 -O-methyladenosine
  modified_base 71: mod_base = cm
  modified_base 72: mod_base = gm
  modified_base 73: mod_base = gm
  modified_base 74: mod_base = OTHER; note = 2 -O-methyladenosine
  modified_base 75: mod_base = cm
  modified_base 76: mod_base = um
  modified_base 77: mod_base = um
  modified_base 78: mod_base = cm
  modified_base 79: mod_base = gm
  modified_base 80: mod_base = gm
  modified_base 81: mod_base = um
  modified_base 82: mod_base = cm
  modified_base 83: mod_base = cm
  modified_base 84: mod_base = gm
  modified_base 85: mod_base = um
  modified_base 86: mod_base = OTHER; note = 2 -O-methyladenosine
  modified_base 87: mod_base = OTHER; note = 2 -O-methyladenosine
  modified_base 88: mod_base = gm
  modified_base 89: mod_base = OTHER; note = 2 -O-methyladenosine
  modified_base 90: mod_base = gm
  modified_base 91: mod_base = gm
  modified_base 92: mod_base = cm
  modified_base 117: mod_base = OTHER; note = 2 -O-methyladenosine
  modified_base 117..119: mod_base = OTHER; note = linked via phosphorothioate
  modified_base 118: mod_base = gm
  modified_base 119: mod_base = OTHER; note = 2 -O-methyladenosine
  source 1..119: mol_type = other RNA

SEQ ID NO: 2186 - RNA, 119 nt, synthetic construct
  source 1..119: mol_type = other RNA
actggcgcttctatctgattactctgagcgccatcaccagcgactatgtcgtagtgggtaaagccgcttacggacttcggtccgtaagaggcatcagagtggcttcctggtgaagatga

SEQ ID NO: 2187 - RNA, 119 nt, synthetic construct; identical to SEQ ID NO: 2186
  modified_base 1..4: mod_base = OTHER; note = linked via phosphorothioate
  modified_base 1: mod_base = OTHER; note = 2 -O-methyladenosine
  modified_base 2: mod_base = cm
  modified_base 3: mod_base = um
  modified_base 117: mod_base = um
  modified_base 117..119: mod_base = OTHER; note = linked via phosphorothioate
  modified_base 118: mod_base = gm
  modified_base 119: mod_base = OTHER; note = 2 -O-methyladenosine
  source 1..119: mol_type = other RNA

SEQ ID NO: 2188 - RNA, 122 nt, synthetic construct
  modified_base 1..4: mod_base = OTHER; note = linked via phosphorothioate
  modified_base 1: mod_base = OTHER; note = 2 -O-methyladenosine
  modified_base 2: mod_base = cm
  modified_base 3: mod_base = um
  modified_base 119..122: mod_base = OTHER; note = linked via phosphorothioate
  modified_base 120: mod_base = um
  modified_base 121: mod_base = um
  modified_base 122: mod_base = um
  source 1..122: mol_type = other RNA
actggcgcttctatctgattactctgagcgccatcaccagcgactatgtcgtagtgggtaaagccgcttacggacttcggtccgtaagaggcatcagagtggcttcctggtgaagatgattt

SEQ ID NO: 2189 - RNA, 119 nt, synthetic construct; identical to SEQ ID NO: 2186
  modified_base 1..4: mod_base = OTHER; note = linked via phosphorothioate
  modified_base 1: mod_base = OTHER; note = 2 -O-methyladenosine
  modified_base 2: mod_base = cm
  modified_base 3: mod_base = um
  modified_base 4: mod_base = gm
  modified_base 5: mod_base = gm
  modified_base 6: mod_base = cm
  modified_base 7: mod_base = gm
  modified_base 8: mod_base = cm
  modified_base 9: mod_base = um
  modified_base 10: mod_base = um
  modified_base 11: mod_base = cm
  modified_base 12: mod_base = um
  modified_base 13: mod_base = OTHER; note = 2 -O-methyladenosine
  modified_base 14: mod_base = um
  modified_base 15: mod_base = cm
  modified_base 16: mod_base = um
  modified_base 17: mod_base = gm
  modified_base 18: mod_base = OTHER; note = 2 -O-methyladenosine
  modified_base 19: mod_base = um
  modified_base 27: mod_base = OTHER; note = 2 -O-methyladenosine
  modified_base 28: mod_base = gm
  modified_base 29: mod_base = cm
  modified_base 30: mod_base = gm
  modified_base 31: mod_base = cm
  modified_base 32: mod_base = cm
  modified_base 33: mod_base = OTHER; note = 2 -O-methyladenosine
  modified_base 34: mod_base = um
  modified_base 35: mod_base = cm
  modified_base 36: mod_base = OTHER; note = 2 -O-methyladenosine
  modified_base 37: mod_base = cm
  modified_base 38: mod_base = cm
  modified_base 44: mod_base = cm
  modified_base 45: mod_base = um
  modified_base 48: mod_base = gm
  modified_base 49: mod_base = um
  modified_base 50: mod_base = cm
  modified_base 51: mod_base = gm
  modified_base 57: mod_base = gm
  modified_base 58: mod_base = gm
  modified_base 59: mod_base = um
  modified_base 60: mod_base = OTHER; note = 2 -O-methyladenosine
  modified_base 61: mod_base = OTHER; note = 2 -O-methyladenosine
  modified_base 62: mod_base = OTHER; note = 2 -O-methyladenosine
  modified_base 63: mod_base = gm
  modified_base 64: mod_base = cm
  modified_base 65: mod_base = cm
  modified_base 66: mod_base = gm
  modified_base 67: mod_base = cm
  modified_base 68: mod_base = um
  modified_base 69: mod_base = um
  modified_base 70: mod_base = OTHER; note = 2 -O-methyladenosine
  modified_base 71: mod_base = cm
  modified_base 72: mod_base = gm
  modified_base 73: mod_base = gm
  modified_base 74: mod_base = OTHER; note = 2 -O-methyladenosine
  modified_base 75: mod_base = cm
  modified_base 76: mod_base = um
  modified_base 77: mod_base = um
  modified_base 78: mod_base = cm
  modified_base 79: mod_base = gm
  modified_base 80: mod_base = gm
  modified_base 81: mod_base = um
  modified_base 82: mod_base = cm
  modified_base 83: mod_base = cm
  modified_base 84: mod_base = gm
  modified_base 85: mod_base = um
  modified_base 86: mod_base = OTHER; note = 2 -O-methyladenosine
  modified_base 87: mod_base = OTHER; note = 2 -O-methyladenosine
  modified_base 88: mod_base = gm
  modified_base 89: mod_base = OTHER; note = 2 -O-methyladenosine
  modified_base 90: mod_base = gm
  modified_base 91: mod_base = gm
  modified_base 92: mod_base = cm
  modified_base 93: mod_base = OTHER; note = 2 -O-methyladenosine
  modified_base 94: mod_base = um
  modified_base 95: mod_base = cm
  modified_base 96: mod_base = OTHER; note = 2 -O-methyladenosine
  modified_base 117: mod_base = um
  modified_base 117..119: mod_base = OTHER; note = linked via phosphorothioate
  modified_base 118: mod_base = gm
  modified_base 119: mod_base = OTHER; note = 2 -O-methyladenosine
  source 1..119: mol_type = other RNA

SEQ ID NO: 2190 - RNA, 119 nt, synthetic construct; identical to SEQ ID NO: 2186
  modified_base 1..4: mod_base = OTHER; note = linked via phosphorothioate
  modified_base 1: mod_base = OTHER; note = 2 -O-methyladenosine
  modified_base 2: mod_base = cm
  modified_base 3: mod_base = um
  modified_base 4: mod_base = gm
  modified_base 5: mod_base = gm
  modified_base 6: mod_base = cm
  modified_base 7: mod_base = gm
  modified_base 8: mod_base = cm
  modified_base 13: mod_base = OTHER; note = 2 -O-methyladenosine
  modified_base 14: mod_base = um
  modified_base 15: mod_base = cm
  modified_base 16: mod_base = um
  modified_base 17: mod_base = gm
  modified_base 18: mod_base = OTHER; note = 2 -O-methyladenosine
  modified_base 19: mod_base = um
  modified_base 27: mod_base = OTHER; note = 2 -O-methyladenosine
  modified_base 28: mod_base = gm
  modified_base 29: mod_base = cm
  modified_base 30: mod_base = gm
  modified_base 31: mod_base = cm
  modified_base 32: mod_base = cm
  modified_base 33: mod_base = OTHER; note = 2 -O-methyladenosine
  modified_base 34: mod_base = um
  modified_base 35: mod_base = cm
  modified_base 36: mod_base = OTHER; note = 2 -O-methyladenosine
  modified_base 37: mod_base = cm
  modified_base 38: mod_base = cm
  modified_base 44: mod_base = cm
  modified_base 45: mod_base = um
  modified_base 48: mod_base = gm
  modified_base 49: mod_base = um
  modified_base 50: mod_base = cm
  modified_base 51: mod_base = gm
  modified_base 57: mod_base = gm
  modified_base 58: mod_base = gm
  modified_base 59: mod_base = um
  modified_base 60: mod_base = OTHER; note = 2 -O-methyladenosine
  modified_base 61: mod_base = OTHER; note = 2 -O-methyladenosine
  modified_base 62: mod_base = OTHER; note = 2 -O-methyladenosine
  modified_base 63: mod_base = gm
  modified_base 64: mod_base = cm
  modified_base 65: mod_base = cm
  modified_base 66: mod_base = gm
  modified_base 67: mod_base = cm
  modified_base 68: mod_base = um
  modified_base 69: mod_base = um
  modified_base 70: mod_base = OTHER; note = 2 -O-methyladenosine
  modified_base 71: mod_base = cm
  modified_base 72: mod_base = gm
  modified_base 73: mod_base = gm
  modified_base 74: mod_base = OTHER; note = 2 -O-methyladenosine
  modified_base 75: mod_base = cm
  modified_base 76: mod_base = um
  modified_base 77: mod_base = um
  modified_base 78: mod_base = cm
  modified_base 79: mod_base = gm
  modified_base 80: mod_base = gm
  modified_base 81: mod_base = um
  modified_base 82: mod_base = cm
  modified_base 83: mod_base = cm
  modified_base 84: mod_base = gm
  modified_base 85: mod_base = um
  modified_base 86: mod_base = OTHER; note = 2 -O-methyladenosine
  modified_base 87: mod_base = OTHER; note = 2 -O-methyladenosine
  modified_base 88: mod_base = gm
  modified_base 89: mod_base = OTHER; note = 2 -O-methyladenosine
  modified_base 90: mod_base = gm
  modified_base 91: mod_base = gm
  modified_base 92: mod_base = cm
  modified_base 93: mod_base = OTHER; note = 2 -O-methyladenosine
  modified_base 94: mod_base = um
  modified_base 117: mod_base = um
  modified_base 117..119: mod_base = OTHER; note = linked via phosphorothioate
  modified_base 118: mod_base = gm
  modified_base 119: mod_base = OTHER; note = 2 -O-methyladenosine
  source 1..119: mol_type = other RNA

SEQ ID NO: 2191 - RNA, 119 nt, synthetic construct; identical to SEQ ID NO: 2186
  modified_base 1..4: mod_base = OTHER; note = linked via phosphorothioate
  modified_base 1: mod_base = OTHER; note = 2 -O-methyladenosine
  modified_base 2: mod_base = cm
  modified_base 3: mod_base = um
  modified_base 44: mod_base = cm
  modified_base 45: mod_base = um
  modified_base 48: mod_base = gm
  modified_base 49: mod_base = um
  modified_base 50: mod_base = cm
  modified_base 51: mod_base = gm
  modified_base 60: mod_base = OTHER; note = 2 -O-methyladenosine
  modified_base 61: mod_base = OTHER; note = 2 -O-methyladenosine
  modified_base 62: mod_base = OTHER; note = 2 -O-methyladenosine
  modified_base 63: mod_base = gm
  modified_base 64: mod_base = cm
  modified_base 65: mod_base = cm
  modified_base 66: mod_base = gm
  modified_base 67: mod_base = cm
  modified_base 68: mod_base = um
  modified_base 69: mod_base = um
  modified_base 70: mod_base = OTHER; note = 2 -O-methyladenosine
  modified_base 71: mod_base = cm
  modified_base 72: mod_base = gm
  modified_base 73: mod_base = gm
  modified_base 74: mod_base = OTHER; note = 2 -O-methyladenosine
  modified_base 75: mod_base = cm
  modified_base 76: mod_base = um
  modified_base 77: mod_base = um
  modified_base 78: mod_base = cm
  modified_base 79: mod_base = gm
  modified_base 80: mod_base = gm
  modified_base 81: mod_base = um
  modified_base 82: mod_base = cm
  modified_base 83: mod_base = cm
  modified_base 84: mod_base = gm
  modified_base 85: mod_base = um
  modified_base 86: mod_base = OTHER; note = 2 -O-methyladenosine
  modified_base 87: mod_base = OTHER; note = 2 -O-methyladenosine
  modified_base 88: mod_base = gm
  modified_base 89: mod_base = OTHER; note = 2 -O-methyladenosine
  modified_base 90: mod_base = gm
  modified_base 91: mod_base = gm
  modified_base 92: mod_base = cm
  modified_base 117: mod_base = um
  modified_base 117..119: mod_base = OTHER; note = linked via phosphorothioate
  modified_base 118: mod_base = gm
  modified_base 119: mod_base = OTHER; note = 2 -O-methyladenosine
  source 1..119: mol_type = other RNA

SEQ ID NO: 2192 - RNA, 119 nt, synthetic construct; identical to SEQ ID NO: 2186
  modified_base 1..4: mod_base = OTHER; note = linked via phosphorothioate
  modified_base 1: mod_base = OTHER; note = 2 -O-methyladenosine
  modified_base 2: mod_base = cm
  modified_base 3: mod_base = um
  modified_base 60: mod_base = OTHER; note = 2 -O-methyladenosine
  modified_base 61: mod_base = OTHER; note = 2 -O-methyladenosine
  modified_base 62: mod_base = OTHER; note = 2 -O-methyladenosine
  modified_base 63: mod_base = gm
  modified_base 64: mod_base = cm
  modified_base 65: mod_base = cm
  modified_base 66: mod_base = gm
  modified_base 67: mod_base = cm
  modified_base 68: mod_base = um
  modified_base 69: mod_base = um
  modified_base 70: mod_base = OTHER; note = 2 -O-methyladenosine
  modified_base 71: mod_base = cm
  modified_base 72: mod_base = gm
  modified_base 73: mod_base = gm
  modified_base 74: mod_base = OTHER; note = 2 -O-methyladenosine
  modified_base 75: mod_base = cm
  modified_base 76: mod_base = um
  modified_base 77: mod_base = um
  modified_base 78: mod_base = cm
  modified_base 79: mod_base = gm
  modified_base 80: mod_base = gm
  modified_base 81: mod_base = um
  modified_base 82: mod_base = cm
  modified_base 83: mod_base = cm
  modified_base 84: mod_base = gm
  modified_base 85: mod_base = um
  modified_base 86: mod_base = OTHER; note = 2 -O-methyladenosine
  modified_base 87: mod_base = OTHER; note = 2 -O-methyladenosine
  modified_base 88: mod_base = gm
  modified_base 89: mod_base = OTHER; note = 2 -O-methyladenosine
  modified_base 90: mod_base = gm
  modified_base 91: mod_base = gm
  modified_base 92: mod_base = cm
  modified_base 117: mod_base = um
  modified_base 117..119: mod_base = OTHER; note = linked via phosphorothioate
  modified_base 118: mod_base = gm
  modified_base 119: mod_base = OTHER; note = 2 -O-methyladenosine
  source 1..119: mol_type = other RNA

SEQ ID NO: 2193 - RNA, 109 nt, synthetic construct
  source 1..109: mol_type = other RNA
actggcgcttctatctgattactctgagcgccatcaccagcgactatgtcgtagtgggtaaagctccctcttcggagggagcatcagagctggcttcttggtgaagatg

SEQ ID NO: 2194 - RNA, 109 nt, synthetic construct; identical to SEQ ID NO: 2193
  modified_base 1..4: mod_base = OTHER; note = linked via phosphorothioate
  modified_base 1: mod_base = OTHER; note = 2 -O-methyladenosine
  modified_base 2: mod_base = cm
  modified_base 3: mod_base = um
  modified_base 106..109: mod_base = OTHER; note = linked via phosphorothioate
  modified_base 107: mod_base = OTHER; note = 2 -O-methyladenosine
  modified_base 108: mod_base = um
  modified_base 109: mod_base = gm
  source 1..109: mol_type = other RNA

SEQ ID NO: 2195 - RNA, 109 nt, synthetic construct; identical to SEQ ID NO: 2193
  modified_base 1..4: mod_base = OTHER; note = linked via phosphorothioate
  modified_base 1: mod_base = OTHER; note = 2 -O-methyladenosine
  modified_base 2: mod_base = cm
  modified_base 3: mod_base = um
  modified_base 6: mod_base = cm
  modified_base 8: mod_base = cm
  modified_base 9: mod_base = um
  modified_base 14: mod_base = um
  modified_base 15: mod_base = cm
  modified_base 27: mod_base = OTHER; note = 2 -O-methyladenosine
  modified_base 28: mod_base = gm
  modified_base 33: mod_base = OTHER; note = 2 -O-methyladenosine
  modified_base 34: mod_base = um
  modified_base 35: mod_base = cm
  modified_base 36: mod_base = OTHER; note = 2 -O-methyladenosine
  modified_base 37: mod_base = cm
  modified_base 42: mod_base = gm
  modified_base 43: mod_base = OTHER; note = 2 -O-methyladenosine
  modified_base 44: mod_base = cm
  modified_base 45: mod_base = um
  modified_base 48: mod_base = gm
  modified_base 49: mod_base = um
  modified_base 50: mod_base = cm
  modified_base 51: mod_base = gm
  modified_base 58: mod_base = gm
  modified_base 59: mod_base = um
  modified_base 60: mod_base = OTHER; note = 2 -O-methyladenosine
  modified_base 61: mod_base = OTHER; note = 2 -O-methyladenosine
  modified_base 63: mod_base = gm
  modified_base 64: mod_base = cm
  modified_base 65: mod_base = um
  modified_base 66: mod_base = cm
  modified_base 67: mod_base = cm
  modified_base 68: mod_base = cm
  modified_base 69: mod_base = um
  modified_base 70: mod_base = cm
  modified_base 71: mod_base = um
  modified_base 72: mod_base = um
  modified_base 73: mod_base = cm
  modified_base 74: mod_base = gm
  modified_base 75: mod_base = gm
  modified_base 76: mod_base = OTHER; note = 2 -O-methyladenosine
  modified_base 77: mod_base = gm
  modified_base 78: mod_base = gm
  modified_base 79: mod_base = gm
  modified_base 80: mod_base = OTHER; note = 2 -O-methyladenosine
  modified_base 81: mod_base = gm
  modified_base 82: mod_base = cm
  modified_base 83: mod_base = OTHER; note = 2 -O-methyladenosine
  modified_base 84: mod_base = um
  modified_base 106..109: mod_base = OTHER; note = linked via phosphorothioate
  modified_base 107: mod_base = OTHER; note = 2 -O-methyladenosine
  modified_base 108: mod_base = um
  modified_base 109: mod_base = gm
  source 1..109: mol_type = other RNA

SEQ ID NO: 2196 - RNA, 109 nt, synthetic construct; identical to SEQ ID NO: 2193
  modified_base 1..4: mod_base = OTHER; note = linked via phosphorothioate
  modified_base 1: mod_base = OTHER; note = 2 -O-methyladenosine
  modified_base 2: mod_base = cm
  modified_base 3: mod_base = um
  modified_base 33: mod_base = OTHER; note = 2 -O-methyladenosine
  modified_base 34: mod_base = um
  modified_base 35: mod_base = cm
  modified_base 36: mod_base = OTHER; note = 2 -O-methyladenosine
  modified_base 37: mod_base = cm
  modified_base 42: mod_base = gm
  modified_base 43: mod_base = OTHER; note = 2 -O-methyladenosine
  modified_base 44: mod_base = cm
  modified_base 45: mod_base = um
  modified_base 48: mod_base = gm
  modified_base 49: mod_base = um
  modified_base 50: mod_base = cm
  modified_base 51: mod_base = gm
  modified_base 58: mod_base = gm
  modified_base 59: mod_base = um
  modified_base 60: mod_base = OTHER; note = 2 -O-methyladenosine
  modified_base 61: mod_base = OTHER; note = 2 -O-methyladenosine
  modified_base 63: mod_base = gm
  modified_base 64: mod_base = cm
  modified_base 65: mod_base = um
  modified_base 66: mod_base = cm
  modified_base 67: mod_base = cm
  modified_base 68: mod_base = cm
  modified_base 69: mod_base = um
  modified_base 70: mod_base = cm
  modified_base 71: mod_base = um
  modified_base 72: mod_base = um
  modified_base 73: mod_base = cm
  modified_base 74: mod_base = gm
  modified_base 75: mod_base = gm
  modified_base 76: mod_base = OTHER; note = 2 -O-methyladenosine
  modified_base 77: mod_base = gm
  modified_base 78: mod_base = gm
  modified_base 79: mod_base = gm
  modified_base 80: mod_base = OTHER; note = 2 -O-methyladenosine
  modified_base 81: mod_base = gm
  modified_base 82: mod_base = cm
  modified_base 83: mod_base = OTHER; note = 2 -O-methyladenosine
  modified_base 84: mod_base = um
  modified_base 106..109: mod_base = OTHER; note = linked via phosphorothioate
  modified_base 107: mod_base = OTHER; note = 2 -O-methyladenosine
  modified_base 108: mod_base = um
  modified_base 109: mod_base = gm
  source 1..109: mol_type = other RNA

SEQ ID NO: 2197 - RNA, 109 nt, synthetic construct; identical to SEQ ID NO: 2193
  modified_base 1..4: mod_base = OTHER; note = linked via phosphorothioate
  modified_base 1: mod_base = OTHER; note = 2 -O-methyladenosine
  modified_base 2: mod_base = cm
  modified_base 3: mod_base = um
  modified_base 6: mod_base = cm
  modified_base 8: mod_base = cm
  modified_base 9: mod_base = um
  modified_base 14: mod_base = um
  modified_base 15: mod_base = cm
  modified_base 27: mod_base = OTHER; note = 2 -O-methyladenosine
  modified_base 28: mod_base = gm
  modified_base 42: mod_base = gm
  modified_base 43: mod_base = OTHER; note = 2 -O-methyladenosine
  modified_base 44: mod_base = cm
  modified_base 45: mod_base = um
  modified_base 48: mod_base = gm
  modified_base 49: mod_base = um
  modified_base 50: mod_base = cm
  modified_base 51: mod_base = gm
  modified_base 63: mod_base = gm
  modified_base 64: mod_base = cm
  modified_base 65: mod_base = um
  modified_base 66: mod_base = cm
  modified_base 67: mod_base = cm
  modified_base 68: mod_base = cm
  modified_base 69: mod_base = um
  modified_base 70: mod_base = cm
  modified_base 71: mod_base = um
  modified_base 72: mod_base = um
  modified_base 73: mod_base = cm
  modified_base 74: mod_base = gm
  modified_base 75: mod_base = gm
  modified_base 76: mod_base = OTHER; note = 2 -O-methyladenosine
  modified_base 77: mod_base = gm
  modified_base 78: mod_base = gm
  modified_base 79: mod_base = gm
  modified_base 80: mod_base = OTHER; note = 2 -O-methyladenosine
  modified_base 81: mod_base = gm
  modified_base 82: mod_base = cm
  modified_base 105..109: mod_base = OTHER; note = linked via phosphorothioate
  modified_base 106: mod_base = gm
  modified_base 107: mod_base = OTHER; note = 2 -O-methyladenosine
  modified_base 108: mod_base = um
  modified_base 109: mod_base = gm
  source 1..109: mol_type = other RNA

SEQ ID NO: 2198 - RNA, 109 nt, synthetic construct
  source 1..109: mol_type = other RNA
actggcgcttttatctgattactttgagagccatcaccagcgactatgtcgtagtgggtaaagctccctcttcggagggagcatcaaagagaagatgggcgggagtctt

SEQ ID NO: 2199 - RNA, 112 nt, synthetic construct
  modified_base 1..4: mod_base = OTHER; note = linked via phosphorothioate
  modified_base 1: mod_base = OTHER; note = 2 -O-methyladenosine
  modified_base 2: mod_base = cm
  modified_base 3: mod_base = um
  modified_base 109..112: mod_base = OTHER; note = linked via phosphorothioate
  modified_base 110: mod_base = um
  modified_base 111: mod_base = um
  modified_base 112: mod_base = um
  source 1..112: mol_type = other RNA
actggcgcttttatctgattactttgagagccatcaccagcgactatgtcgtagtgggtaaagctccctcttcggagggagcatcaaagagaagatgggcgggagtcttttt

SEQ ID NO: 2200 - RNA, 109 nt, synthetic construct
  source 1..109: mol_type = other RNA
actggcgcttctatctgattactctgagcgccatcaccagcgactatgtcgtagtgggtaaagctccctcttcggagggagcatcagagagaagatgggcgggagtctt

SEQ ID NO: 2201 - RNA, 109 nt, synthetic construct; identical to SEQ ID NO: 2200
  modified_base 1..4: mod_base = OTHER; note = linked via phosphorothioate
  modified_base 1: mod_base = OTHER; note = 2 -O-methyladenosine
  modified_base 2: mod_base = cm
  modified_base 3: mod_base = um
  modified_base 106..109: mod_base = OTHER; note = linked via phosphorothioate
  modified_base 107: mod_base = cm
  modified_base 108: mod_base = um
  modified_base 109: mod_base = um
  source 1..109: mol_type = other RNA

SEQ ID NO: 2202 - RNA, 109 nt, synthetic construct; identical to SEQ ID NO: 2200
  modified_base 1..4: mod_base = OTHER; note = linked via phosphorothioate
  modified_base 1: mod_base = OTHER; note = 2 -O-methyladenosine
  modified_base 2: mod_base = cm
  modified_base 3: mod_base = um
  modified_base 44: mod_base = cm
  modified_base 45: mod_base = um
  modified_base 48: mod_base = gm
  modified_base 49: mod_base = um
  modified_base 50: mod_base = cm
  modified_base 51: mod_base = gm
  modified_base 63: mod_base = gm
  modified_base 64: mod_base = cm
  modified_base 65: mod_base = um
  modified_base 66: mod_base = cm
  modified_base 67: mod_base = cm
  modified_base 68: mod_base = cm
  modified_base 69: mod_base = um
  modified_base 70: mod_base = cm
  modified_base 71: mod_base = um
  modified_base 72: mod_base = um
  modified_base 73: mod_base = cm
  modified_base 74: mod_base = gm
  modified_base 75: mod_base = gm
  modified_base 76: mod_base = OTHER; note = 2 -O-methyladenosine
  modified_base 77: mod_base = gm
  modified_base 78: mod_base = gm
  modified_base 79: mod_base = gm
  modified_base 80: mod_base = OTHER; note = 2 -O-methyladenosine
  modified_base 81: mod_base = gm
  modified_base 82: mod_base = cm
  modified_base 106..109: mod_base = OTHER; note = linked via phosphorothioate
  modified_base 107: mod_base = cm
  modified_base 108: mod_base = um
  modified_base 109: mod_base = um
  source 1..109: mol_type = other RNA

SEQ ID NO: 2203 - DNA, 60 bp, synthetic construct
  source 1..60: mol_type = other DNA
  misc_feature 1: note = IRDye700 moiety conjugated
catgtcttccatggccttcttcctggcttcctggtgaagatgagtggcgacctgctggag

SEQ ID NO: 2204 - DNA, 60 bp, synthetic construct
  source 1..60: mol_type = other DNA
  misc_feature 1: note = IRDye800 moiety conjugated
ctccagcaggtcgccactcatcttcaccaggaagccaggaagaaggccatggaagacatg

SEQ ID NO: 2205 - DNA, 39 bp, synthetic construct
  source 1..39: mol_type = other DNA
atggccccagcggccaaacgggtgaagctggactctaga

SEQ ID NO: 2206 - DNA, 2931 bp, synthetic construct
  source 1..2931: mol_type = other DNA
caagagatcaagagaatcaacaagatcagaaggagactggtcaaggacagcaacacaaagaaggccggcaagacaggccccatgaaaaccctgctcgtcagagtgatgacccctgacctgagagagcggctggaaaacctgagaaagaagcccgagaacatccctcagcctatcagcaacaccagcagggccaacctgaacaagctgctgaccgactacaccgagatgaagaaagccatcctgcacgtgtactgggaagagttccagaaagaccccgtgggcctgatgagcagagttgctcagcctgccagcaagaagatcgaccagaacaagctgaagcccgagatggacgagaagggcaatctgaccacagccggctttgcctgctctcagtgtggccagcctctgttcgtgtacaagctggaacaggtgtccgagaaaggcaaggcctacaccaactacttcggcagatgtaacgtggccgagcacgagaagctgattctgctggcccagctgaaacctgagaaggactctgatgaggccgtgacctacagcctgggcaagtttggacagagagccctggacttctacagcatccacgtgaccaaagaaagcacacaccccgtgaagcccctggctcagatcgccggcaatagatacgcctctggacctgtgggcaaagccctgtccgatgcctgcatgggaacaatcgccagcttcctgagcaagtaccaggacatcatcatcgagcaccagaaggtggtcaagggcaaccagaagagactggaaagcctgagggagctggccggcaaagagaacctggaataccccagcgtgaccctgcctcctcagcctcacacaaaagaaggcgtggacgcctacaacgaagtgatcgccagagtgagaatgtgggtcaacctgaacctgtggcagaagctgaaactgtccagggacgacgccaagcctctgctgagactgaagggcttccctagcttccctctggtggaaagacaggccaatgaagtggattggtgggacatggtctgcaacgtgaagaagctgatcaacgagaagaaagaggatggcaaggttttctggcagaacctggccggctacaagagacaagaagccctgaggccttacctgagcagcgaagaggaccggaagaagggcaagaagttcgccagataccagctgggcgacctgctgctgcacctggaaaagaagcacggcgaggactggggcaaagtgtacgatgaggcctgggagagaatcgacaagaaggtggaaggcctgagcaagcacattaagctggaagaggaaagaaggagcgaggacgcccaatctaaagccgctctgaccgattggctgagagccaaggccagctttgtgatcgagggcctgaaagaggccgacaaggacgagttctgcagatgcgagctgaagctgcagaagtggtacggcgatctgagaggcaagcccttcgccattgaggccgagaacagcatcctggacatcagcggcttcagcaagcagtacaactgcgccttcatttggcagaaagacggcgtcaagaaactgaacctgtacctgatcatcaattacttcaaaggcggcaagctgcggttcaagaagatcaaacccgaggccttcgaggctaacagattctacaccgtgatcaacaaaaagtccggcgagatcgtgcccatggaagtgaacttcaacttcgacgaccccaacctgattatcctgcctctggccttcggcaagagacagggcagagagttcatctggaacgatctgctgagcctggaaaccggctctctgaagctggccaatggcagagtgatcgagaaaaccctgtacaacaggagaaccagacaggacgagcctgctctgtttgtggccctgaccttcgagagaagagaggtgctggacagcagcaacatcaagcccatgaacctgatcggcgtggaccggggcgagaatatccctgctgtgatcgccctgacagaccctgaaggatgcccactgagcagattcaaggactccctgggcaaccctacacacatcctgagaatcggcgagagctacaaagagaagcagaggacaatccaggccaagaaagaggtggaacagcgcagagccggcggatactctaggaagtacgccagcaaggccaagaatctggccgacgacatggtccgaaacaccgccagagatctgctgtactacgccgtgacacaggacgccatgctgatcttcgagaatctgagcagaggcttcggccggcagggcaagagaacctttatggccgagaggcagtacaccagaatggaagattggctcacagctaaactggcctacgagggactgagcaagacctacctgtccaaaacactggcccagtatacctccaagacctgcagcaattgcggcttcaccatcaccagcgccgactacgacagagtgctggaaaagctcaagaaaaccgccaccggctggatgaccaccatcaacggcaaagagctgaaggttgagggccagatcacctactacaacaggtacaagaggcagaacgtcgtgaaggatctgagcgtggaactggacagactgagcgaagagagcgtgaacaacgacatcagcagctggacaaagggcagatcaggcgaggctctgagcctgctgaagaagaggtttagccacagacctgtgcaagagaagttcgtgtgcctgaactgcggcttcgagacacacgccgatgaacaggctgccctgaacattgccagaagctggctgttcctgagaagccaagagtacaagaagtaccagaccaacaagaccaccggcaacaccgacaagagggcctttgtggaaacctggcagagcttctacagaaaaaagctgaaagaagtctggaagcccgccgtg

SEQ ID NO: 2207 - DNA, 42 bp, synthetic construct
  source 1..42: mol_type = other DNA
ggctcccccgccgcgaagcgagtgaaactggacggatccggc

SEQ ID NO: 2208 - DNA, 756 bp, synthetic construct
  source 1..756: mol_type = other DNA
gcaacaaacttctctctgctgaaacaagccggagatgtcgaagagaatcctggaccgatggtatcaaagggtgaggcggtcattaaggaattcatgcggttcaaagttcacatggaggggagtatgaatggtcacgaatttgagatcgagggtgagggagagggtagaccttacgaaggcacccagacagcaaaactcaaagtcactaagggcggcccactccctttctcatgggatatactgagtcctcaatttatgtatggctcccgggcctttatcaagcatccagccgacatacccgattactataaacagtcattccccgagggattcaaatgggagagagtgatgaattttgaagacgggggtgccgtgaccgtaactcaagatacctctttggaagatggtaccctcatttacaaggttaagcttagaggaactaatttcccaccagacggacccgttatgcagaaaaaaaccatgggttgggaggctagcaccgaacggctgtatccagaggatggagttttgaaaggtgatattaagatggccctgcgcctgaaagacggagggcggtacctcgcagatttcaaaactacctacaaagctaagaaaccggtccaaatgccgggtgcttataacgtcgataggaagctggatataacatcacacaacgaagactatacggttgtcgaacagtatgagcgatctgaggggaggcacagcacgggcgggatggatgagctttacaagtga

SEQ ID NO: 2209 - DNA, 40 bp, synthetic construct
  source 1..40: mol_type = other DNA
actcttctggtccccacagactcagagagaacccgccacc

SEQ ID NO: 2210 - DNA, 111 bp, synthetic construct
  source 1..111: mol_type = other DNA
gctggagcctcggtggccatgcttcttgccccttgggcctccccccagcccctcctccccttcctgcacccgtacccccgtggtctttgaataaagtctgagtgggcggca

SEQ ID NO: 2211 - RNA, 2934 nt, synthetic construct
  source 1..2934: mol_type = other RNA
caggagatcaagcggattaataaaattcggagaagactggtgaaggattctaacacaaagaaggctggcaagacaggccctatgaagacactgctggtgagagtgatgacacccgacctgagagaaagactggaaaacctgagaaagaagcctgagaatatcccccagcccatcagcaacacaagccgggccaacctgaataagctgctgaccgactacaccgaaatgaagaaggccatcctgcacgtgtattgggaagagttccagaaagacccagtcggcctgatgagcagagtggctcagcctgccagcaagaagatcgatcagaacaagctgaagcccgaaatggacgagaaggggaacctgacaaccgccggctttgcctgtagccagtgcggccagcccctgtttgtgtacaaactggaacaggtgagcgaaaagggcaaggcttacacgaattacttcggcagatgcaacgtggccgagcacgagaagctgatcctgctggcccagctgaagcctgagaaggatagcgatgaggcagtgacatattccctgggcaagttcggacagcgggccctggatttttattccattcatgtgaccaaggaatccacccaccccgtcaagcctcttgcccaaattgccggcaacagatacgccagcggccccgtgggcaaggccctgagcgacgcctgtatgggcaccatcgccagcttcctgtctaagtaccaggacattatcatcgagcaccagaaggtggtgaagggcaaccagaagagactggagagcctgcgcgagctggccggcaaggaaaacctggagtatcctagcgtgaccctgcctcctcagcctcatacaaaggagggcgtggatgcctacaacgaagtgatcgcccgggtgcggatgtgggtgaacctgaatctgtggcagaagctgaagctgtctagagacgacgccaagcccctgctgagactgaagggcttccccagcttccctctggtggagagacaggcaaatgaagtggactggtgggacatggtgtgtaacgtgaagaagctgatcaatgagaagaaggaggacggcaaagtgttctggcagaatctggccggctacaagcgtcaggaggccctgcggccctacctgagcagcgaggaagacagaaagaagggcaagaagttcgcccggtatcagctgggggacctgctgctgcacctcgagaagaagcacggcgaagactgggggaaggtgtacgatgaggcctgggagcggatcgataagaaggtggagggcctgagcaagcacatcaagctggaggaggaacggagatctgaggacgcccagagcaaggccgccctgaccgactggctgagagccaaggccagcttcgtcatcgaggggctgaaggaggccgacaaggacgagttctgccggtgcgaactgaagctgcagaagtggtacggagatctgagaggcaaacctttcgccatcgaggccgagaacagcatcctggacatcagcggcttcagcaagcagtacaactgcgcctttatttggcagaaggacggagtgaagaagctgaacctgtacctgatcatcaactatttcaagggcggcaagctgagattcaagaagatcaagcctgaagccttcgaggccaacagattctacaccgtgattaacaagaaaagcggagagatcgtgccaatggaagtgaacttcaacttcgacgaccctaacctgatcatcctgcccctggcatttggcaagcggcagggcagagagttcatctggaacgacctgctgtctctggagaccggcagcctgaagctggccaacggcagagtgatcgagaagacactgtacaacagacgaaccagacaagacgagcccgccctgtttgtggccctgaccttcgagagaagagaggtgctggacagcagcaatatcaagcctatgaacctgatcggcgtggcccggggcgagaacatccctgccgtgatcgcccttaccgaccccgagggatgccctctgagccggtttaaagacagcctgggcaaccctacccacatcctgagaattggcgagtcctacaaggagaagcagagaaccatccaggccaagaaggaggtggagcagcggcgggctggcggctactcccggaagtacgccagcaaggccaagaacctggccgacgacatggttagaaataccgccagagacctcctgtactacgctgtgacccaggacgccatgctgatcttcgccaacctgagcagaggcttcggcagacagggcaagagaaccttcatggccgagagacagtacacccggatggaggactggctgaccgccaagctggcctacgagggcctgccctctaagacctacctgtccaagaccttggcacagtacaccagcaagacatgctctaactgcggcttcacaatcacgagcgccgactacgaccgggtgctggagaaactgaagaagaccgccacaggctggatgaccaccattaacggcaaggagctgaaggtggagggccagatcacctactacaacaggtacaaacggcagaacgtggtgaaggacctgagcgtggaactggatagactgagcgaggaaagcgtaaacaatgacatcagcagctggaccaagggccggagcggcgaggccctgagcctgctgaagaagagattctcccacagaccagtgcaggagaagttcgtgtgtctgaactgcggcttcgagacccacgccgccgagcaagccgccctgaacatcgcccggtcttggcttttcctgcggagccaggagtacaagaagtaccagacaaacaagaccacaggcaacacagacaagagagccttcgtcgagacctggcagagcttctacagaaagaagctgaaggaggtgtggaagcctgccgtg

SEQ ID NO: 2212 - RNA, 2931 nt, synthetic construct
  source 1..2931: mol_type = other RNA
caggagatcaagcggattaataaaattcggagaagactggtgaaggattctaacacaaagaaggctggcaagacaggccctatgaagacactgctggtgagagtgatgacacccgacctgagagaaagactggaaaacctgagaaagaagcctgagaatatcccccagcccatcagcaacacaagccgggccaacctgaataagctgctgaccgactacaccgaaatgaagaaggccatcctgcacgtgtattgggaagagttccagaaagacccagtcggcctgatgagcagagtggctcagcctgccagcaagaagatcgatcagaacaagctgaagcccgaaatggacgagaaggggaacctgacaaccgccggctttgcctgtagccagtgcggccagcccctgtttgtgtacaaactggaacaggtgagcgaaaagggcaaggcttacacgaattacttcggcagatgcaacgtggccgagcacgagaagctgatcctgctggcccagctgaagcctgagaaggatagcgatgaggcagtgacatattccctgggcaagttcggacagcgggccctggatttttattccattcatgtgaccaaggaatccacccaccccgtcaagcctcttgcccaaattgccggcaacagatacgccagcggccccgtgggcaaggccctgagcgacgcctgtatgggcaccatcgccagcttcctgtctaagtaccaggacattatcatcgagcaccagaaggtggtgaagggcaaccagaagagactggagagcctgcgcgagctggccggcaaggaaaacctggagtatcctagcgtgaccctgcctcctcagcctcatacaaaggagggcgtggatgcctacaacgaagtgatcgcccgggtgcggatgtgggtgaacctgaatctgtggcagaagctgaagctgtctagagacgacgccaagcccctgctgagactgaagggcttccccagcttccctctggtggagagacaggcaaatgaagtggactggtgggacatggtgtgtaacgtgaagaagctgatcaatgagaagaaggaggacggcaaagtgttctggcagaatctggccggctacaagcgtcaggaggccctgcggccctacctgagcagcgaggaagacagaaagaagggcaagaagttcgcccggtatcagctgggggacctgctgctgcacctcgagaagaagcacggcgaagactgggggaaggtgtacgatgaggcctgggagcggatcgataagaaggtggagggcctgagcaagcacatcaagctggaggaggaacggagatctgaggacgcccagagcaaggccgccctgaccgactggctgagagccaaggccagcttcgtcatcgaggggctgaaggaggccgacaaggacgagttctgccggtgcgaactgaagctgcagaagtggtacggagatctgagaggcaaacctttcgccatcgaggccgagaacagcatcctggacatcagcggcttcagcaagcagtacaactgcgcctttatttggcagaaggacggagtgaagaagctgaacctgtacctgatcatcaactatttcaagggcggcaagctgagattcaagaagatcaagcctgaagccttcgaggccaacagattctacaccgtgattaacaagaaaagcggagagatcgtgccaatggaagtgaacttcaacttcgacgaccctaacctgatcatcctgcccctggcatttggcaagcggcagggcagagagttcatctggaacgacctgctgtctctggagaccggcagcctgaagctggccaacggcagagtgatcgagaagacactgtacaacagacgaaccagacaagacgagcccgccctgtttgtggccctgaccttcgagagaagagaggtgctggacagcagcaatatcaagcctatgaacctgatcggcgtggcccggggcgagaacatccctgccgtgatcgcccttaccgaccccgagggatgccctctgagccggtttaaagacagcctgggcaaccctacccacatcctgagaattggcgagtcctacaaggagaagcagagaaccatccaggccaagaaggaggtggagcagcggcgggctggcggctactcccggaagtacgccagcaaggccaagaacctggccgacgacatggttagaaataccgccagagacctcctgtactacgctgtgacccaggacgccatgctgatcttcgccaacctgagcagaggcttcggcagacagggcaagagaaccttcatggccgagagacagtacacccggatggaggactggctgaccgccaagctggcctacgagggcctgtctaagacctacctgtccaagaccttggcacagtacaccagcaagacatgctctaactgcggcttcacaatcacgagcgccgactacgaccgggtgctggagaaactgaagaagaccgccacaggctggatgaccaccattaacggcaaggagctgaaggtggagggccagatcacctactacaacaggtacaaacggcagaacgtggtgaaggacctgagcgtggaactggatagactgagcgaggaaagcgtaaacaatgacatcagcagctggaccaagggccggagcggcgaggccctgagcctgctgaagaagagattctcccacagaccagtgcaggagaagttcgtgtgtctgaactgcggcttcgagacccacgccgccgagcaagccgccctgaacatcgcccggtcttggcttttcctgcggagccaggagtacaagaagtaccagacaaacaagaccacaggcaacacagacaagagagccttcgtcgagacctggcagagcttctacagaaagaagctgaaggaggtgtggaagcctgccgtg

SEQ ID NO: 2213 - RNA, 2934 nt, synthetic construct
  source 1..2934: mol_type = other RNA
caggagatcaagcggattaataaaattcggagaagactggtgaaggattctaacacaaagaaggctggcaagacaggccctatgaagacactgctggtgagagtgatgacacccgacctgagagaaagactggaaaacctgagaaagaagcctgagaatatcccccagcccatcagcaacacaagccgggccaacctgaataagctgctgaccgactacaccgaaatgaagaaggccatcctgcacgtgtattgggaagagttccagaaagacccagtcggcctgatgagcagagtggctcagcctgccagcaagaagatcgatcagaacaagctgaagcccgaaatggacgagaaggggaacctgacaaccgccggctttgcctgtagccagtgcggccagcccctgtttgtgtacaaactggaacaggtgagcgaaaagggcaaggcttacacgaattacttcggcagatgcaacgtggccgagcacgagaagctgatcctgctggcccagctgaagcctgagaaggatagcgatgaggcagtgacatattccctgggcaagttcggacagcgggccctggatttttattccattcatgtgaccaaggaatccacccaccccgtcaagcctcttgcccaaattgccggcaacagatacgccagcggccccgtgggcaaggccctgagcgacgcctgtatgggcaccatcgccagcttcctgtctaagtaccaggacattatcatcgagcaccagaaggtggtgaagggcaaccagaagagactggagagcctgcgcgagctggccggcaaggaaaacctggagtatcctagcgtgaccctgcctcctcagcctcatacaaaggagggcgtggatgcctacaacgaagtgatcgcccgggtgcggatgtgggtgaacctgaatctgtggcagaagctgaagctgtctagagacgacgccaagcccctgctgagactgaagaaattccccagcttccctctggtggagagacaggcaaatgaagtggactggtgggacatggtgtgtaacgtgaagaagctgatcaatgagaagaaggaggacggcaaagtgttctggcagaatctggccggctacaagcgtcaggaggccctgcggccctacctgagcagcgaggaagacagaaagaagggcaagaagttcgcccggtatcagctgggggacctgctgctgcacctcgagaagaagcacggcgaagactgggggaaggtgtacgatgaggcctgggagcggatcgataagaaggtggagggcctgagcaagcacatcaagctggaggaggaacggagatctgaggacgcccagagcaaggccgccctgaccgactggctgagagccaaggccagcttcgtcatcgaggggctgaaggaggccgacaaggacgagttctgccggtgcgaactgaagctgcagaagtggtacggagatctgagaggcaaacctttcgccatcgaggccgagaacagcatcctggacatcagcggcttcagcaagcagtacaactgcgcctttatttggcagaaggacggagtgaagaagctgaacctgtacctgatcatcaactatttcaagggcggcaagctgagattcaagaagatcaagcctgaagccttcgaggccaacagattctacaccgtgattaacaagaaaagcggagagatcgtgccaatggaagtgaacttcaacttcgacgaccctaacctgatcatcctgcccctggcatttggcaagcggcagggcagagagttcatctggaacgacctgctgtctctggagaccggcagcctgaagctggccaacggcagagtgatcgagaagacactgtacaacagacgaaccagacaagacgagcccgccctgtttgtggccctgaccttcgagagaagagaggtgctggacagcagcaatatcaagcctatgaacctgatcggcgtggcccggggcgagaacatccctgccgtgatcgcccttaccgaccccgagggatgccctctgagccggtttaaagacagcctgggcaaccctacccacatcctgagaattggcgagtcctacaaggagaagcagagaaccatccaggccaagaaggaggtggagcagcggcgggctggcggctactcccggaagtacgccagcaaggccaagaacctggccgacgacatggttagaaataccgccagagacctcctgtactacgctgtgacccaggacgccatgctgatcttcgccaacctgagcagaggcttcggcagacagggcaagagaaccttcatggccgagagacagtacacccggatggaggactggctgaccgccaagctggcctacgagggcctgccctctaagacctacctgtccaagaccttggcacagtacaccagcaagacatgctctaactgcggcttcacaatcacgagcgccgactacgaccgggtgctggagaaactgaagaagaccgccacaggctggatgaccaccattaacggcaaggagctgaaggtggagggccagatcacctactacaacaggtacaaacggcagaacgtggtgaaggacctgagcgtggaactggatagactgagcgaggaaagcgtaaacaatgacatcagcagctggaccaagggccggagcggcgaggccctgagcctgctgaagaagagattctcccacagaccagtgcaggagaagttcgtgtgtctgaactgcggcttcgagacccacgccgccgagcaagccgccctgaacatcgcccggtcttggcttttcctgcggagccaggagtacaagaagtaccagacaaacaagaccacaggcaacacagacaagagagccttcgtcgagacctggcagagcttctacagaaagaagctgaaggaggtgtggaagcctgccgtg

SEQ ID NO: 2214 - RNA, 2934 nt, synthetic construct
  source 1..2934: mol_type = other RNA
caggagatcaagcggattaataaaattcggagaagactggtgaaggattctaacacaaagaaggctggcaagacaggccctatgaagacactgctggtgagagtgatgacacccgacctgagagaaagactggaaaacctgagaaagaagcctgagaatatcccccagcccatcagcaacacaagccgggccaacctgaataagctgctgaccgactacaccgaaatgaagaaggccatcctgcacgtgtattgggaagagttccagaaagacccagtcggcctgatgagcagagtggctcagcctgccagcaagaagatcgatcagaacaagctgaagcccgaaatggacgagaaggggaacctgacaaccgccggctttgcctgtagccagtgcggccagcccctgtttgtgtacaaactggaacaggtgagcgaaaagggcaaggcttacacgaattacttcggcagatgcaacgtggccgagcacgagaagctgatcctgctggcccagctgaagcctgagaaggatagcgatgaggcagtgacatattccctgggcaagttcggacagcgggccctggatttttattccattcatgtgaccaaggaatccacccaccccgtcaagcctcttgcccaaattgccggcaacagatacgccagcggccccgtgggcaaggccctgagcgacgcctgtatgggcaccatcgccagcttcctgtctaagtaccaggacattatcatcgagcaccagaaggtggtgaagggcaaccagaagagactggagagcctgcgcgagctggccggcaaggaaaacctggagtatcctagcgtgaccctgcctcctcagcctcatacaaaggagggcgtggatgcctacaacgaagtgatcgcccgggtgcggatgtgggtgaacctgaatctgtggcagaagctgaagctgtctagagacgacgccaagcccctgctgagactgaagaagttccccagcttccctctggtggagagacaggcaaatgaagtggactggtgggacatggtgtgtaacgtgaagaagctgatcaatgagaagaaggaggacggcaaagtgttctggcagaatctggccggctacaagcgtcaggaggccctgcggccctacctgagcagcgaggaagacagaaagaagggcaagaagttcgcccggtatcagctgggggacctgctgctgcacctcgagaagaagcacggcgaagactgggggaaggtgtacgatgaggcctgggagcggatcgataagaaggtggagggcctgagcaagcacatcaagctggaggaggaacggagatctgaggacgcccagagcaaggccgccctgaccgactggctgagagccaaggccagcttcgtcatcgaggggctgaaggaggccgacaaggacgagttctgccggtgcgaactgaagctgcagaagtggtacggagatctgagaggcaaacctttcgccatcgaggccgagaacagcatcctggacatcagcggcttcagcaagcagtacaactgcgcctttatttggcagaaggacggagtgaagaagctgaacctgtacctgatcatcaactatttcaagggcggcaagctgagattcaagaagatcaagcctgaagccttcgaggccaacagattctacaccgtgattaacaagaaaagcggagagatcgtgccaatggaagtgaacttcaacttcgacgaccctaacctgatcatcctgcccctggcatttggcaagcggcagggcagagagttcatctggaacgacctgctgtctctggagaccggcagcctgaagctggccaacggcagagtgatcgagaagacactgtacaacagacgaaccagacaagacgagcccgccctgtttgtggccctgaccttcgagagaagagaggtgctggacagcagcaatatcaagcctatgaacctgatcggcgtggcccggggcgagaacatccctgccgtgatcgcccttaccgaccccgagggatgccctctgagccggtttaaagacagcctgggcaaccctacccacatcctgagaattggcgagtcctacaaggagaagcagagaaccatccaggccaagaaggaggtggagcagcggcgggctggcggctactcccggaagtacgccagcaaggccaagaacctggccgacgacatggttagaaataccgccagagacctcctgtactacgctgtgacccaggacgccatgctgatcttcgccaacctgagcagaggcttcggcagacagggcaagagaaccttcatggccgagagacagtacacccggatggaggactggctgaccgccaagctggcctacgagggcctgccctctaagacctacctgtccaagaccttggcacagtacaccagcaagacatgctctaactgcggcttcacaatcacgagcgccgactacgaccgggtgctggagaaactgaagaagaccgccacaggctggatgaccaccattaacggcaaggagctgaaggtggagggccagatcacctactacaacaggtacaaacggcagaacgtggtgaaggacctgagcgtggaactggatagactgagcgaggaaagcgtaaacaatgacatcagcagctggaccaagggccggagcggcgaggccctgagcctgctgaagaagagattctcccacagaccagtgcaggagaagttcgtgtgtctgaactgcggcttcgagacccacgccgccgagcaagccgccctgaacatcgcccggtcttggcttttcctgcggagccaggagtacaagaagtaccagacaaacaagaccacaggcaacacagacaagagagccttcgtcgagacctggcagagcttctacagaaagaagctgaaggaggtgtggaagcctgccgtg

SEQ ID NO: 2215 - protein, 978 aa, synthetic construct
QEGKRINKIRRRLVKDSNTKKAGKTGPMKTLLVRVMTPDLRERLENLRKKPENIPQPISNTSQANLNKLLTDYTEMKKAILHVYWEEFQKDPVGLMSRVAQPASKKIDQNKLKPEMDEKGNLTTAGFACSQCGQPLFVYKLEQVSEKGKAYTNYFGRCNVAEHEKLILLAQLKPEKDSDEAVTYSLGKFGQRALDFYSIHVTKESTHPVKPLAQIAGNRYASGPVGKALSDACMGTIASFLSKYQDIIIEHQKVVKGNQKRLESLRELAGKENLEYPSVTLPPQPHTKEGVDAYNEVIARVRMWVNLNLWQKLKLSRDDAKPLLRLKGFPSFPLVERQANEVDWWDMVCNVKKLINEKKEDGKVFWQNLAGYKRQEALRPYLSSEEDRKKGKKFARYQLGDLLLHLEKKHGEDWGKVYDEAWERIDKKVEGLSKHIKLEEERRSEDAQSKAALTDWLRAKASFVIEGLKEADKDEFCRCELKLQKWYGDLRGKPFAIEAENSILDISGFSKQYNCAFIWQKDGVKKLNLYLIINYFKGGKLRFKKIKPEAFEANRFYTVINKKSGEIVPMEVNFNFDDPNLIILPLAFGKRQGREFIWNDLLSLETGSLKLANGRVIEKTLYNRRTRQDEPALFVALTFERREVLDSSNIKPMNLIGVDRGENIPAVIALTDPEGCPLSRFKDSLGNPTHILRIGESYKEKQRTIQAKKEVEQRRAGGYSRKYASKAKNLADDMVRNTARDLLYYAVTQDAMLIFENLSRGFGRQGKRTFMAERQYTRMEDWLTAKLAYEGLPSKTYLSKTLAQYTSKTCSNCGFTITSADYDRVLEKLKKTATGWMTTINGKELKVEGQITYYNRYKRQNVVKDLSVELDRLSEESVNNDISSWTKGRSGEALSLLKKRFSHRPVQEKFVCLNCGFETHADEQAALNIARSWLFLRSQEYKKYQTNKTTGNTDKRAFVETWQSFYRKKLKEVWKPAV

SEQ ID NO: 2216 - protein, 978 aa, synthetic construct
QEGKRINKIRRRLVKDSNTKKAGKTGPMKTLLVRVMTPDLRERLENLRKKPENIPQPISNTSRANLNKLLTDYTEMKKAILHVYWEEFQKDPVGLMSRVAQPASKKIDQNKLKPEMDEKGNLTTAGFACSQCGQPLFVYKLEQVSEKGKAYTNYFGRCNVAEHEKLIKLAQLKPEKDSDEAVTYSLGKFGQRALDFYSIHVTKESTHPVKPLAQIAGNRYASGPVGKALSDACMGTIASFLSKYQDIIIEHQKVVKGNQKRLESLRELAGKENLEYPSVTLPPQPHTKEGVDAYNEVIARVRMWVNLNLWQKLKLSRDDAKPLLRLKGFPSFPLVERQANEVDWWDMVCNVKKLINEKKEDGKVFWQNLAGYKRQEALRPYLSSEEDRKKGKKFARYQLGDLLLHLEKKHGEDWGKVYDEAWERIDKKVEGLSKHIKLEEERRSEDAQSKAALTDWLRAKASFVIEGLKEADKDEFCRCELKLQKWYGDLRGKPFAIEAENSILDISGFSKQYNCAFIWQKDGVKKLNLYLIINYFKGGKLRFKKIKPEAFEANRFYTVINKKSGEIVPMEVNFNFDDPNLIILPLAFGKRQGREFIWNDLLSLETGSLKLANGRVIEKTLYNRRTRQDEPALFVALTFERREVLDSSNIKPMNLIGVDRGENIPAVIALTDPEGCPLSRFKDSLGNPTHILRIGESYKEKQRTIQAKKEVEQRRAGGYSRKYASKAKNLADDMVRNTARDLLYYAVTQDAMLIFENLSRGFGRQGKRTFMAERQYTRMEDWLTAKLAYEGLPSKTYLSKTLAQYTSKTCSNCGFTITSADYDRVLEKLKKTATGWMTTINGKELKVEGQITYYNRYKRQNVVKDLSVELDRLSEESVNNDISSWTKGRSGEALSLLKKRFSHRPVQEKFVCLNCGFETHADEQAALNIARSWLFLRSQEYKKYQTNKTTGNTDKRAFVETWQSFYRKKLKEVWKPAV

SEQ ID NO: 2217 - protein, 978 aa, synthetic construct
QEGKRINKIRRRLVKDSNTKKAGKTGPMKTLLVRVMTPDLRERLENLRKKPENIPQPISNTSRANLNKLLTDYTEMKKAILHVYWEEFQKDPVGLMSRVAQPASKKIDQNKLKPEMDEKGNLTTAGFACSQCGQPLFVYKLEQVSEKGKAYTNYFGRCNVAEHEKLIQLAQLKPEKDSDEAVTYSLGKFGQRALDFYSIHVTKESTHPVKPLAQIAGNRYASGPVGKALSDACMGTIASFLSKYQDIIIEHQKVVKGNQKRLESLRELAGKENLEYPSVTLPPQPHTKEGVDAYNEVIARVRMWVNLNLWQKLKLSRDDAKPLLRLKGFPSFPLVERQANEVDWWDMVCNVKKLINEKKEDGKVFWQNLAGYKRQEALRPYLSSEEDRKKGKKFARYQLGDLLLHLEKKHGEDWGKVYDEAWERIDKKVEGLSKHIKLEEERRSEDAQSKAALTDWLRAKASFVIEGLKEADKDEFCRCELKLQKWYGDLRGKPFAIEAENSILDISGFSKQYNCAFIWQKDGVKKLNLYLIINYFKGGKLRFKKIKPEAFEANRFYTVINKKSGEIVPMEVNFNFDDPNLIILPLAFGKRQGREFIWNDLLSLETGSLKLANGRVIEKTLYNRRTRQDEPALFVALTFERREVLDSSNIKPMNLIGVDRGENIPAVIALTDPEGCPLSRFKDSLGNPTHILRIGESYKEKQRTIQAKKEVEQRRAGGYSRKYASKAKNLADDMVRNTARDLLYYAVTQDAMLIFENLSRGFGRQGKRTFMAERQYTRMEDWLTAKLAYEGLPSKTYLSKTLAQYTSKTCSNCGFTITSADYDRVLEKLKKTATGWMTTINGKELKVEGQITYYNRYKRQNVVKDLSVELDRLSEESVNNDISSWTKGRSGEALSLLKKRFSHRPVQEKFVCLNCGFETHADEQAALNIARSWLFLRSQEYKKYQTNKTTGNTDKRAFVETWQSFYRKKLKEVWKPAV

SEQ ID NO: 2218 - protein, 978 aa, synthetic construct
QEGKRINKIRRRLVKDSNTKKAGKTGPMKTLLVRVMTPDLRERLENLRKKPENIPQPISNTSRANLNKLLTDYTEMKKAILHVYWEEFQKDPVGLMSRVAQPASKKIDQNKLKPEMDEKGNLTTAGFACSQCGQPLFVYKLEQVSEKGKAYTNYFGRCNVAEHEKLILLDQLKPEKDSDEAVTYSLGKFGQRALDFYSIHVTKESTHPVKPLAQIAGNRYASGPVGKALSDACMGTIASFLSKYQDIIIEHQKVVKGNQKRLESLRELAGKENLEYPSVTLPPQPHTKEGVDAYNEVIARVRMWVNLNLWQKLKLSRDDAKPLLRLKGFPSFPLVERQANEVDWWDMVCNVKKLINEKKEDGKVFWQNLAGYKRQEALRPYLSSEEDRKKGKKFARYQLGDLLLHLEKKHGEDWGKVYDEAWERIDKKVEGLSKHIKLEEERRSEDAQSKAALTDWLRAKASFVIEGLKEADKDEFCRCELKLQKWYGDLRGKPFAIEAENSILDISGFSKQYNCAFIWQKDGVKKLNLYLIINYFKGGKLRFKKIKPEAFEANRFYTVINKKSGEIVPMEVNFNFDDPNLIILPLAFGKRQGREFIWNDLLSLETGSLKLANGRVIEKTLYNRRTRQDEPALFVALTFERREVLDSSNIKPMNLIGVDRGENIPAVIALTDPEGCPLSRFKDSLGNPTHILRIGESYKEKQRTIQAKKEVEQRRAGGYSRKYASKAKNLADDMVRNTARDLLYYAVTQDAMLIFENLSRGFGRQGKRTFMAERQYTRMEDWLTAKLAYEGLPSKTYLSKTLAQYTSKTCSNCGFTITSADYDRVLEKLKKTATGWMTTINGKELKVEGQITYYNRYKRQNVVKDLSVELDRLSEESVNNDISSWTKGRSGEALSLLKKRFSHRPVQEKFVCLNCGFETHADEQAALNIARSWLFLRSQEYKKYQTNKTTGNTDKRAFVETWQSFYRKKLKEVWKPAV

SEQ ID NO: 2219 - protein, 978 aa, synthetic construct
QEGKRINKIRRRLVKDSNTKKAGKTGPMKTLLVRVMTPDLRERLENLRKKPENIPQPISNTSRANLNKLLTDYTEMKKAILHVYWEEFQKDPVGLMSRVAQPASKKIDQNKLKPEMDEKGNLTTAGFACSQCGQPLFVYKLEQVSEKGKAYTNYFGRCNVAEHEKLILLYQLKPEKDSDEAVTYSLGKFGQRALDFYSIHVTKESTHPVKPLAQIAGNRYASGPVGKALSDACMGTIASFLSKYQDIIIEHQKVVKGNQKRLESLRELAGKENLEYPSVTLPPQPHTKEGVDAYNEVIARVRMWVNLNLWQKLKLSRDDAKPLLRLKGFPSFPLVERQANEVDWWDMVCNVKKLINEKKEDGKVFWQNLAGYKRQEALRPYLSSEEDRKKGKKFARYQLGDLLLHLEKKHGEDWGKVYDEAWERIDKKVEGLSKHIKLEEERRSEDAQSKAALTDWLRAKASFVIEGLKEADKDEFCRCELKLQKWYGDLRGKPFAIEAENSILDISGFSKQYNCAFIWQKDGVKKLNLYLIINYFKGGKLRFKKIKPEAFEANRFYTVINKKSGEIVPMEVNFNFDDPNLIILPLAFGKRQGREFIWNDLLSLETGSLKLANGRVIEKTLYNRRTRQDEPALFVALTFERREVLDSSNIKPMNLIGVDRGENIPAVIALTDPEGCPLSRFKDSLGNPTHILRIGESYKEKQRTIQAKKEVEQRRAGGYSRKYASKAKNLADDMVRNTARDLLYYAVTQDAMLIFENLSRGFGRQGKRTFMAERQYTRMEDWLTAKLAYEGLPSKTYLSKTLAQYTSKTCSNCGFTITSADYDRVLEKLKKTATGWMTTINGKELKVEGQITYYNRYKRQNVVKDLSVELDRLSEESVNNDISSWTKGRSGEALSLLKKRFSHRPVQEKFVCLNCGFETHADEQAALNIARSWLFLRSQEYKKYQTNKTTGNTDKRAFVETWQSFYRKKLKEVWKPAV

SEQ ID NO: 2220 - protein, 978 aa, synthetic construct
QEGKRINKIRRRLVKDSNTKKAGKTGPMKTLLVRVMTPDLRERLENLRKKPENIPQPISNTSRANLNKLLTDYTEMKKAILHVYWEEFQKDPVGLMSRVAQPASKKIDQNKLKPEMDEKGNLTTAGFACSQCGQPLFVYKLEQVSEKGKAYTNYFGRCNVAEHEKLILLSQLKPEKDSDEAVTYSLGKFGQRALDFYSIHVTKESTHPVKPLAQIAGNRYASGPVGKALSDACMGTIASFLSKYQDIIIEHQKVVKGNQKRLESLRELAGKENLEYPSVTLPPQPHTKEGVDAYNEVIARVRMWVNLNLWQKLKLSRDDAKPLLRLKGFPSFPLVERQANEVDWWDMVCNVKKLINEKKEDGKVFWQNLAGYKRQEALRPYLSSEEDRKKGKKFARYQLGDLLLHLEKKHGEDWGKVYDEAWERIDKKVEGLSKHIKLEEERRSEDAQSKAALTDWLRAKASFVIEGLKEADKDEFCRCELKLQKWYGDLRGKPFAIEAENSILDISGFSKQYNCAFIWQKDGVKKLNLYLIINYFKGGKLRFKKIKPEAFEANRFYTVINKKSGEIVPMEVNFNFDDPNLIILPLAFGKRQGREFIWNDLLSLETGSLKLANGRVIEKTLYNRRTRQDEPALFVALTFERREVLDSSNIKPMNLIGVDRGENIPAVIALTDPEGCPLSRFKDSLGNPTHILRIGESYKEKQRTIQAKKEVEQRRAGGYSRKYASKAKNLADDMVRNTARDLLYYAVTQDAMLIFENLSRGFGRQGKRTFMAERQYTRMEDWLTAKLAYEGLPSKTYLSKTLAQYTSKTCSNCGFTITSADYDRVLEKLKKTATGWMTTINGKELKVEGQITYYNRYKRQNVVKDLSVELDRLSEESVNNDISSWTKGRSGEALSLLKKRFSHRPVQEKFVCLNCGFETHADEQAALNIARSWLFLRSQEYKKYQTNKTTGNTDKRAFVETWQSFYRKKLKEVWKPAV

SEQ ID NO: 2221 - protein, 978 aa, synthetic construct
QEGKRINKIRRRLVKDSNTKKAGKTGPMKTLLVRVMTPDLRERLENLRKKPENIPQPISNTSRANLNKLLTDYTEMKKAILHVYWEEFQKDPVGLMSRVAQPASKKIDQNKLKPEMDEKGNLTTAGFACSQCGQPLFVYKLEQVSEKGKAYTNYFGRCNVAEHEKLILLAQLKPEKDSDEAVTYSLGKFGQRALDFYSIHVTKESTHPVKPLAQIAGNRYASTPVGKALSDACMGTIASFLSKYQDIIIEHQKVVKGNQKRLESLRELAGKENLEYPSVTLPPQPHTKEGVDAYNEVIARVRMWVNLNLWQKLKLSRDDAKPLLRLKGFPSFPLVERQANEVDWWDMVCNVKKLINEKKEDGKVFWQNLAGYKRQEALRPYLSSEEDRKKGKKFARYQLGDLLLHLEKKHGEDWGKVYDEAWERIDKKVEGLSKHIKLEEERRSEDAQSKAALTDWLRAKASFVIEGLKEADKDEFCRCELKLQKWYGDLRGKPFAIEAENSILDISGFSKQYNCAFIWQKDGVKKLNLYLIINYFKGGKLRFKKIKPEAFEANRFYTVINKKSGEIVPMEVNFNFDDPNLIILPLAFGKRQGREFIWNDLLSLETGSLKLANGRVIEKTLYNRRTRQDEPALFVALTFERREVLDSSNIKPMNLIGVDRGENIPAVIALTDPEGCPLSRFKDSLGNPTHILRIGESYKEKQRTIQAKKEVEQRRAGGYSRKYASKAKNLADDMVRNTARDLLYYAVTQDAMLIFENLSRGFGRQGKRTFMAERQYTRMEDWLTAKLAYEGLPSKTYLSKTLAQYTSKTCSNCGFTITSADYDRVLEKLKKTATGWMTTINGKELKVEGQITYYNRYKRQNVVKDLSVELDRLSEESVNNDISSWTKGRSGEALSLLKKRFSHRPVQEKFVCLNCGFETHADEQAALNIARSWLFLRSQEYKKYQTNKTTGNTDKRAFVETWQSFYRKKLKEVWKPAV

SEQ ID NO: 2222 - protein, 978 aa, synthetic construct
QEGKRINKIRRRLVKDSNTKKAGKTGPMKTLLVRVMTPDLRERLENLRKKPENIPQPISNTSRANLNKLLTDYTEMKKAILHVYWEEFQKDPVGLMSRVAQPASKKIDQNKLKPEMDEKGNLTTAGFACSQCGQPLFVYKLEQVSEKGKAYTNYFGRCNVAEHEKLILLAQLKPEKDSDEAVTYSLGKFGQRALDFYSIHVTKESTHPVKPLAQIAGNRYASGPVGKALSDACMGTIASFLSKYQDIIIEHQKVVKGNQKRLESLRELAGKENLEYPSVTLPPQPHTKEGVDAYNEVIARVRTWVNLNLWQKLKLSRDDAKPLLRLKGFPSFPLVERQANEVDWWDMVCNVKKLINEKKEDGKVFWQNLAGYKRQEALRPYLSSEEDRKKGKKFARYQLGDLLLHLEKKHGEDWGKVYDEAWERIDKKVEGLSKHIKLEEERRSEDAQSKAALTDWLRAKASFVIEGLKEADKDEFCRCELKLQKWYGDLRGKPFAIEAENSILDISGFSKQYNCAFIWQKDGVKKLNLYLIINYFKGGKLRFKKIKPEAFEANRFYTVINKKSGEIVPMEVNFNFDDPNLIILPLAFGKRQGREFIWNDLLSLETGSLKLANGRVIEKTLYNRRTRQDEPALFVALTFERREVLDSSNIKPMNLIGVDRGENIPAVIALTDPEGCPLSRFKDSLGNPTHILRIGESYKEKQRTIQAKKEVEQRRAGGYSRKYASKAKNLADDMVRNTARDLLYYAVTQDAMLIFENLSRGFGRQGKRTFMAERQYTRMEDWLTAKLAYEGLPSKTYLSKTLAQYTSKTCSNCGFTITSADYDRVLEKLKKTATGWMTTINGKELKVEGQITYYNRYKRQNVVKDLSVELDRLSEESVNNDISSWTKGRSGEALSLLKKRFSHRPVQEKFVCLNCGFETHADEQAALNIARSWLFLRSQEYKKYQTNKTTGNTDKRAFVETWQSFYRKKLKEVWKPAV

SEQ ID NO: 2223 - protein, 978 aa, synthetic construct
QEGKRINKIRRRLVKDSNTKKAGKTGPMKTLLVRVMTPDLRERLENLRKKPENIPQPISNTSRANLNKLLTDYTEMKKAILHVYWEEFQKDPVGLMSRVAQPASKKIDQNKLKPEMDEKGNLTTAGFACSQCGQPLFVYKLEQVSEKGKAYTNYFGRCNVAEHEKLILLAQLKPEKDSDEAVTYSLGKFGQRALDFYSIHVTKESTHPVKPLAQIAGNRYASGPVGKALSDACMGTIASFLSKYQDIIIEHQKVVKGNQKRLESLRELAGKENLEYPSVTLPPQPHTKEGVDAYNEVIARVRMWVNLNLWQKLKLSRDDAKPLLRLKGFPSFPLVERQANEVDWWDMVCNVKKLINEKKEDGKVFWQNLAGYKRQEALRPYLSSEEDRKKGKKFARTQLGDLLLHLEKKHGEDWGKVYDEAWERIDKKVEGLSKHIKLEEERRSEDAQSKAALTDWLRAKASFVIEGLKEADKDEFCRCELKLQKWYGDLRGKPFAIEAENSILDISGFSKQYNCAFIWQKDGVKKLNLYLIINYFKGGKLRFKKIKPEAFEANRFYTVINKKSGEIVPMEVNFNFDDPNLIILPLAFGKRQGREFIWNDLLSLETGSLKLANGRVIEKTLYNRRTRQDEPALFVALTFERREVLDSSNIKPMNLIGVDRGENIPAVIALTDPEGCPLSRFKDSLGNPTHILRIGESYKEKQRTIQAKKEVEQRRAGGYSRKYASKAKNLADDMVRNTARDLLYYAVTQDAMLIFENLSRGFGRQGKRTFMAERQYTRMEDWLTAKLAYEGLPSKTYLSKTLAQYTSKTCSNCGFTITSADYDRVLEKLKKTATGWMTTINGKELKVEGQITYYNRYKRQNVVKDLSVELDRLSEESVNNDISSWTKGRSGEALSLLKKRFSHRPVQEKFVCLNCGFETHADEQAALNIARSWLFLRSQEYKKYQTNKTTGNTDKRAFVETWQSFYRKKLKEVWKPAV

SEQ ID NO: 2224 - protein, 978 aa, synthetic construct
QEGKRINKIRRRLVKDSNTKKAGKTGPMKTLLVRVMTPDLRERLENLRKKPENIPQPISNTSRANLNKLLTDYTEMKKAILHVYWEEFQKDPVGLMSRVAQPASKKIDQNKLKPEMDEKGNLTTAGFACSQCGQPLFVYKLEQVSEKGKAYTNYFGRCNVAEHEKLILLAQLKPEKDSDEAVTYSLGKFGQRALDFYSIHVTKESTHPVKPLAQIAGNRYASGPVGKALSDACMGTIASFLSKYQDIIIEHQKVVKGNQKRLESLRELAGKENLEYPSVTLPPQPHTKEGVDAYNEVIARVRMWVNLNLWQKLKLSRDDAKPLLRLKGFPSFPLVERQANEVDWWDMVCNVKKLINEKKEDGKVFWQNLAGYKRQEALRPYLSSEEDRKKGKKFARYQLGDLLLHLEKKHGEDWGKVYDEAWERIDKKVEGLSKHIKLEEERRSEDAQSKAALTDWLRAKASFVIEGLKEADKDEFCRCELKLQKWYGDLRGKPFAIEAENSILDISGFSKQYNCAFIWQKDGVKKLNLYLIINYFKGGKLRFKKIKPEAFEANRFYTVINKKSGEIVPMEVNFNFDDPNLIILPLAFGKRQGREFIWNDLLSLETGSLKLANGRVIEKTLYNRRTRQDEPALFVALTFERREVLDSSNIKPMNLIGVDRGENIPAVIALTDPEGCPLSRFKDSLGNPTHILRIGESYKEKQRTIQAKKEVEQRRAGGYSRKYASKAKNLADDMVRNTARDLLYYAVTQDAMLIFENLSRGFGRQGKRTFMAERQYTRMEDWLTAKLAYEGLPSKTYLSKTLAQYTSKTCSNCGFTITSADYDRMLEKLKKTATGWMTTINGKELKVEGQITYYNRYKRQNVVKDLSVELDRLSEESVNNDISSWTKGRSGEALSLLKKRFSHRPVQEKFVCLNCGFETHADEQAALNIARSWLFLRSQEYKKYQTNKTTGNTDKRAFVETWQSFYRKKLKEVWKPAV

SEQ ID NO: 2225 - protein, 978 aa, synthetic construct
QEGKRINKIRRRLVKDSNTKKAGKTGPMKTLLVRVMTPDLRERLENLRKKPENIPQPISNTSRANLNKLLTDYTEMKKAILHVYWEEFQKDPVGLMSRVAQPASKKIDQNKLKPEMDEKGNLTTAGFACSQCGQPLFVYKLEQVSEKGKAYTNYFGRCNVAEHEKLILLAQLKPEKDSDEAVTYSLGKFGQRALDFYSIHVTKESTHPVKPLAQIAGNRYASGPVGKALSDACMGTIASFLSKYQDIIIEHQKVVKGNQKRLESLRELAGKENLEYPSVTLPPQPHTKEGVDAYNEVIARVRMWVNLNLWQKLKLSRDDAKPLLRLKGFPSFPLVERQANEVDWWDMVCNVKKLINEKKEDGKVFWQNLAGYKRQEALRPYLSSEEDRKKGKKFARYQLGDLLLHLEKKHGEDWGKVYDEAWERIDKKVEGLSKHIKLEEERRSEDAQSKAALTDWLRAKASFVIEGLKEADKDEFCRCELKLQKWYGDLRGKPFAIEAENSILDISGFSKQYNCAFIWQKDGVKKLNLYLIINYFKGGKLRFKKIKPEAFEANRFYTVINKKSGEIVPMEVNFNFDDPNLIILPLAFGKRQGREFIWNDLLSLETGSLKLANGRVIEKTLYNRRTRQDEPALFVALTFERREVLDSSNIKPMNLIGVDRGENIPAVIALTDPEGCPLSRFKDSLGNPTHILRIGESYKEKQRTIQAKKEVEQRRAGGYSRKYASKAKNLADDMVRNTARDLLYYAVTQDAMLIFENLSRGFGRQGKRTFMAERQYTRMEDWLTAKLAYEGLPSKTYLSKTLAQYTSKTCSNCGFTITSADYDRVLEKLKKTATGWMTTINGKELKVEGQITYYNRYKRQNVVKDLSVELDRLSEESVNNDISSWDKGRSGEALSLLKKRFSHRPVQEKFVCLNCGFETHADEQAALNIARSWLFLRSQEYKKYQTNKTTGNTDKRAFVETWQSFYRKKLKEVWKPAV

SEQ ID NO: 2226 - protein, 978 aa, synthetic construct
QEGKRINKIRRRLVKDSNTKKAGKTGPMKTLLVRVMTPDLRERLENLRKKPENIPQPISNTSRANLNKLLTDYTEMKKAILHVYWEEFQKDPVGLMSRVAQPASKKIDQNKLKPEMDEKGNLTTAGFACSQCGQPLFVYKLEQVSEKGKAYTNYFGRCNVAEHEKLILLAQLKPEKDSDEAVTYSLGKFGQRALDFYSIHVTKESTHPVKPLAQIAGNRYASGPVGKALSDACMGTIASFLSKYQDIIIEHQKVVKGNQKRLESLRELAGKENLEYPSVTLPPQPHTKEGVDAYNEVIARVRMWVNLNLWQKLKLSRDDAKPLLRLKGFPSFPLVERQANEVDWWDMVCNVKKLINEKKEDGKVFWQNLAGYKRQEALRPYLSSEEDRKKGKKFARYQLGDLLLHLEKKHGEDWGKVYDEAWERIDKKVEGLSKHIKLEEERRSEDAQSKAALTDWLRAKASFVIEGLKEADKDEFCRCELKLQKWYGDLRGKPFAIEAENSILDISGFSKQYNCAFIWQKDGVKKLNLYLIINYFKGGKLRFKKIKPEAFEANRFYTVINKKSGEIVPMEVNFNFDDPNLIILPLAFGKRQGREFIWNDLLSLETGSLKLANGRVIEKTLYNRRTRQDEPALFVALTFERREVLDSSNIKPMNLIGVDRGENIPAVIALTDPEGCPLSRFKDSLGNPTHILRIGESYKEKQRTIQAKKEVEQRRAGGYSRKYASKAKNLADDMVRNTARDLLYYAVTQDAMLIFENLSRGFGRQGKRTFMAERQYTRMEDWLTAKLAYEGLPSKTYLSKTLAQYTSKTCSNCGFTITSADYDRVLEKLKKTATGWMTTINGKELKVEGQITYYNRYKRQNVVKDLSVELDRLSEESVNNDISSWTKGRQGEALSLLKKRFSHRPVQEKFVCLNCGFETHADEQAALNIARSWLFLRSQEYKKYQTNKTTGNTDKRAFVETWQSFYRKKLKEVWKPAV

SEQ ID NO: 2227 - protein, 979 aa, synthetic construct
QEIGKRINKIRRRLVKDSNTKKAGKTGPMKTLLVRVMTPDLRERLENLRKKPENIPQPISNTSQANLNKLLTDYTEMKKAILHVYWEEFQKDPVGLMSRVAQPASKKIDQNKLKPEMDEKGNLTTAGFACSQCGQPLFVYKLEQVSEKGKAYTNYFGRCNVAEHEKLILLAQLKPEKDSDEAVTYSLGKFGQRALDFYSIHVTKESTHPVKPLAQIAGNRYASGPVGKALSDACMGTIASFLSKYQDIIIEHQKVVKGNQKRLESLRELAGKENLEYPSVTLPPQPHTKEGVDAYNEVIARVRMWVNLNLWQKLKLSRDDAKPLLRLKGFPSFPLVERQANEVDWWDMVCNVKKLINEKKEDGKVFWQNLAGYKRQEALRPYLSSEEDRKKGKKFARYQLGDLLLHLEKKHGEDWGKVYDEAWERIDKKVEGLSKHIKLEEERRSEDAQSKAALTDWLRAKASFVIEGLKEADKDEFCRCELKLQKWYGDLRGKPFAIEAENSILDISGFSKQYNCAFIWQKDGVKKLNLYLIINYFKGGKLRFKKIKPEAFEANRFYTVINKKSGEIVPMEVNFNFDDPNLIILPLAFGKRQGREFIWNDLLSLETGSLKLANGRVIEKTLYNRRTRQDEPALFVALTFERREVLDSSNIKPMNLIGVDRGENIPAVIALTDPEGCPLSRFKDSLGNPTHILRIGESYKEKQRTIQAKKEVEQRRAGGYSRKYASKAKNLADDMVRNTARDLLYYAVTQDAMLIFENLSRGFGRQGKRTFMAERQYTRMEDWLTAKLAYEGLPSKTYLSKTLAQYTSKTCSNCGFTITSADYDRVLEKLKKTATGWMTTINGKELKVEGQITYYNRYKRQNVVKDLSVELDRLSEESVNNDISSWTKGRSGEALSLLKKRFSHRPVQEKFVCLNCGFETHADEQAALNIARSWLFLRSQEYKKYQTNKTTGNTDKRAFVETWQSFYRKKLKEVWKPAV

SEQ ID NO: 2228 - protein, 979 aa, synthetic construct
QEIGKRINKIRRRLVKDSNTKKAGKTGPMKTLLVRVMTPDLRERLENLRKKPENIPQPISNTSRANLNKLLTDYTEMKKAILHVYWEEFQKDPVGLMSRVAQPASKKIDQNKLKPEMDEKGNLTTAGFACSQCGQPLFVYKLEQVSEKGKAYTNYFGRCNVAEHEKLIKLAQLKPEKDSDEAVTYSLGKFGQRALDFYSIHVTKESTHPVKPLAQIAGNRYASGPVGKALSDACMGTIASFLSKYQDIIIEHQKVVKGNQKRLESLRELAGKENLEYPSVTLPPQPHTKEGVDAYNEVIARVRMWVNLNLWQKLKLSRDDAKPLLRLKGFPSFPLVERQANEVDWWDMVCNVKKLINEKKEDGKVFWQNLAGYKRQEALRPYLSSEEDRKKGKKFARYQLGDLLLHLEKKHGEDWGKVYDEAWERIDKKVEGLSKHIKLEEERRSEDAQSKAALTDWLRAKASFVIEGLKEADKDEFCRCELKLQKWYGDLRGKPFAIEAENSILDISGFSKQYNCAFIWQKDGVKKLNLYLIINYFKGGKLRFKKIKPEAFEANRFYTVINKKSGEIVPMEVNFNFDDPNLIILPLAFGKRQGREFIWNDLLSLETGSLKLANGRVIEKTLYNRRTRQDEPALFVALTFERREVLDSSNIKPMNLIGVDRGENIPAVIALTDPEGCPLSRFKDSLGNPTHILRIGESYKEKQRTIQAKKEVEQRRAGGYSRKYASKAKNLADDMVRNTARDLLYYAVTQDAMLIFENLSRGFGRQGKRTFMAERQYTRMEDWLTAKLAYEGLPSKTYLSKTLAQYTSKTCSNCGFTITSADYDRVLEKLKKTATGWMTTINGKELKVEGQITYYNRYKRQNVVKDLSVELDRLSEESVNNDISSWTKGRSGEALSLLKKRFSHRPVQEKFVCLNCGFETHADEQAALNIARSWLFLRSQEYKKYQTNKTTGNTDKRAFVETWQSFYRKKLKEVWKPAV

SEQ ID NO: 2229 - protein, 979 aa, synthetic construct
QEIGKRINKIRRRLVKDSNTKKAGKTGPMKTLLVRVMTPDLRERLENLRKKPENIPQPISNTSRANLNKLLTDYTEMKKAILHVYWEEFQKDPVGLMSRVAQPASKKIDQNKLKPEMDEKGNLTTAGFACSQCGQPLFVYKLEQVSEKGKAYTNYFGRCNVAEHEKLIQLAQLKPEKDSDEAVTYSLGKFGQRALDFYSIHVTKESTHPVKPLAQIAGNRYASGPVGKALSDACMGTIASFLSKYQDIIIEHQKVVKGNQKRLESLRELAGKENLEYPSVTLPPQPHTKEGVDAYNEVIARVRMWVNLNLWQKLKLSRDDAKPLLRLKGFPSFPLVERQANEVDWWDMVCNVKKLINEKKEDGKVFWQNLAGYKRQEALRPYLSSEEDRKKGKKFARYQLGDLLLHLEKKHGEDWGKVYDEAWERIDKKVEGLSKHIKLEEERRSEDAQSKAALTDWLRAKASFVIEGLKEADKDEFCRCELKLQKWYGDLRGKPFAIEAENSILDISGFSKQYNCAFIWQKDGVKKLNLYLIINYFKGGKLRFKKIKPEAFEANRFYTVINKKSGEIVPMEVNFNFDDPNLIILPLAFGKRQGREFIWNDLLSLETGSLKLANGRVIEKTLYNRRTRQDEPALFVALTFERREVLDSSNIKPMNLIGVDRGENIPAVIALTDPEGCPLSRFKDSLGNPTHILRIGESYKEKQRTIQAKKEVEQRRAGGYSRKYASKAKNLADDMVRNTARDLLYYAVTQDAMLIFENLSRGFGRQGKRTFMAERQYTRMEDWLTAKLAYEGLPSKTYLSKTLAQYTSKTCSNCGFTITSADYDRVLEKLKKTATGWMTTINGKELKVEGQITYYNRYKRQNVVKDLSVELDRLSEESVNNDISSWTKGRSGEALSLLKKRFSHRPVQEKFVCLNCGFETHADEQAALNIARSWLFLRSQEYKKYQTNKTTGNTDKRAFVETWQSFYRKKLKEVWKPAV

SEQ ID NO: 2230 - protein, 979 aa, synthetic construct
QEIGKRINKIRRRLVKDSNTKKAGKTGPMKTLLVRVMTPDLRERLENLRKKPENIPQPISNTSRANLNKLLTDYTEMKKAILHVYWEEFQKDPVGLMSRVAQPASKKIDQNKLKPEMDEKGNLTTAGFACSQCGQPLFVYKLEQVSEKGKAYTNYFGRCNVAEHEKLILLDQLKPEKDSDEAVTYSLGKFGQRALDFYSIHVTKESTHPVKPLAQIAGNRYASGPVGKALSDACMGTIASFLSKYQDIIIEHQKVVKGNQKRLESLRELAGKENLEYPSVTLPPQPHTKEGVDAYNEVIARVRMWVNLNLWQKLKLSRDDAKPLLRLKGFPSFPLVERQANEVDWWDMVCNVKKLINEKKEDGKVFWQNLAGYKRQEALRPYLSSEEDRKKGKKFARYQLGDLLLHLEKKHGEDWGKVYDEAWERIDKKVEGLSKHIKLEEERRSEDAQSKAALTDWLRAKASFVIEGLKEADKDEFCRCELKLQKWYGDLRGKPFAIEAENSILDISGFSKQYNCAFIWQKDGVKKLNLYLIINYFKGGKLRFKKIKPEAFEANRFYTVINKKSGEIVPMEVNFNFDDPNLIILPLAFGKRQGREFIWNDLLSLETGSLKLANGRVIEKTLYNRRTRQDEPALFVALTFERREVLDSSNIKPMNLIGVDRGENIPAVIALTDPEGCPLSRFKDSLGNPTHILRIGESYKEKQRTIQAKKEVEQRRAGGYSRKYASKAKNLADDMVRNTARDLLYYAVTQDAMLIFENLSRGFGRQGKRTFMAERQYTRMEDWLTAKLAYEGLPSKTYLSKTLAQYTSKTCSNCGFTITSADYDRVLEKLKKTATGWMTTINGKELKVEGQITYYNRYKRQNVVKDLSVELDRLSEESVNNDISSWTKGRSGEALSLLKKRFSHRPVQEKFVCLNCGFETHADEQAALNIARSWLFLRSQEYKKYQTNKTTGNTDKRAFVETWQSFYRKKLKEVWKPAV

SEQ ID NO: 2231 - protein, 979 aa, synthetic construct
QEIGKRINKIRRRLVKDSNTKKAGKTGPMKTLLVRVMTPDLRERLENLRKKPENIPQPISNTSRANLNKLLTDYTEMKKAILHVYWEEFQKDPVGLMSRVAQPASKKIDQNKLKPEMDEKGNLTTAGFACSQCGQPLFVYKLEQVSEKGKAYTNYFGRCNVAEHEKLILLYQLKPEKDSDEAVTYSLGKFGQRALDFYSIHVTKESTHPVKPLAQIAGNRYASGPVGKALSDACMGTIASFLSKYQDIIIEHQKVVKGNQKRLESLRELAGKENLEYPSVTLPPQPHTKEGVDAYNEVIARVRMWVNLNLWQKLKLSRDDAKPLLRLKGFPSFPLVERQANEVDWWDMVCNVKKLINEKKEDGKVFWQNLAGYKRQEALRPYLSSEEDRKKGKKFARYQLGDLLLHLEKKHGEDWGKVYDEAWERIDKKVEGLSKHIKLEEERRSEDAQSKAALTDWLRAKASFVIEGLKEADKDEFCRCELKLQKWYGDLRGKPFAIEAENSILDISGFSKQYNCAFIWQKDGVKKLNLYLIINYFKGGKLRFKKIKPEAFEANRFYTVINKKSGEIVPMEVNFNFDDPNLIILPLAFGKRQGREFIWNDLLSLETGSLKLANGRVIEKTLYNRRTRQDEPALFVALTFERREVLDSSNIKPMNLIGVDRGENIPAVIALTDPEGCPLSRFKDSLGNPTHILRIGESYKEKQRTIQAKKEVEQRRAGGYSRKYASKAKNLADDMVRNTARDLLYYAVTQDAMLIFENLSRGFGRQGKRTFMAERQYTRMEDWLTAKLAYEGLPSKTYLSKTLAQYTSKTCSNCGFTITSADYDRVLEKLKKTATGWMTTINGKELKVEGQITYYNRYKRQNVVKDLSVELDRLSEESVNNDISSWTKGRSGEALSLLKKRFSHRPVQEKFVCLNCGFETHADEQAALNIARSWLFLRSQEYKKYQTNKTTGNTDKRAFVETWQSFYRKKLKEVWKPAV

SEQ ID NO: 2232 - protein, 979 aa, synthetic construct
QEIGKRINKIRRRLVKDSNTKKAGKTGPMKTLLVRVMTPDLRERLENLRKKPENIPQPISNTSRANLNKLLTDYTEMKKAILHVYWEEFQKDPVGLMSRVAQPASKKIDQNKLKPEMDEKGNLTTAGFACSQCGQPLFVYKLEQVSEKGKAYTNYFGRCNVAEHEKLILLSQLKPEKDSDEAVTYSLGKFGQRALDFYSIHVTKESTHPVKPLAQIAGNRYASGPVGKALSDACMGTIASFLSKYQDIIIEHQKVVKGNQKRLESLRELAGKENLEYPSVTLPPQPHTKEGVDAYNEVIARVRMWVNLNLWQKLKLSRDDAKPLLRLKGFPSFPLVERQANEVDWWDMVCNVKKLINEKKEDGKVFWQNLAGYKRQEALRPYLSSEEDRKKGKKFARYQLGDLLLHLEKKHGEDWGKVYDEAWERIDKKVEGLSKHIKLEEERRSEDAQSKAALTDWLRAKASFVIEGLKEADKDEFCRCELKLQKWYGDLRGKPFAIEAENSILDISGFSKQYNCAFIWQKDGVKKLNLYLIINYFKGGKLRFKKIKPEAFEANRFYTVINKKSGEIVPMEVNFNFDDPNLIILPLAFGKRQGREFIWNDLLSLETGSLKLANGRVIEKTLYNRRTRQDEPALFVALTFERREVLDSSNIKPMNLIGVDRGENIPAVIALTDPEGCPLSRFKDSLGNPTHILRIGESYKEKQRTIQAKKEVEQRRAGGYSRKYASKAKNLADDMVRNTARDLLYYAVTQDAMLIFENLSRGFGRQGKRTFMAERQYTRMEDWLTAKLAYEGLPSKTYLSKTLAQYTSKTCSNCGFTITSADYDRVLEKLKKTATGWMTTINGKELKVEGQITYYNRYKRQNVVKDLSVELDRLSEESVNNDISSWTKGRSGEALSLLKKRFSHRPVQEKFVCLNCGFETHADEQAALNIARSWLFLRSQEYKKYQTNKTTGNTDKRAFVETWQSFYRKKLKEVWKPAV

SEQ ID NO: 2233 - protein, 979 aa, synthetic construct
QEIGKRINKIRRRLVKDSNTKKAGKTGPMKTLLVRVMTPDLRERLENLRKKPENIPQPISNTSRANLNKLLTDYTEMKKAILHVYWEEFQKDPVGLMSRVAQPASKKIDQNKLKPEMDEKGNLTTAGFACSQCGQPLFVYKLEQVSEKGKAYTNYFGRCNVAEHEKLILLAQLKPEKDSDEAVTYSLGKFGQRALDFYSIHVTKESTHPVKPLAQIAGNRYASTPVGKALSDACMGTIASFLSKYQDIIIEHQKVVKGNQKRLESLRELAGKENLEYPSVTLPPQPHTKEGVDAYNEVIARVRMWVNLNLWQKLKLSRDDAKPLLRLKGFPSFPLVERQANEVDWWDMVCNVKKLINEKKEDGKVFWQNLAGYKRQEALRPYLSSEEDRKKGKKFARYQLGDLLLHLEKKHGEDWGKVYDEAWERIDKKVEGLSKHIKLEEERRSEDAQSKAALTDWLRAKASFVIEGLKEADKDEFCRCELKLQKWYGDLRGKPFAIEAENSILDISGFSKQYNCAFIWQKDGVKKLNLYLIINYFKGGKLRFKKIKPEAFEANRFYTVINKKSGEIVPMEVNFNFDDPNLIILPLAFGKRQGREFIWNDLLSLETGSLKLANGRVIEKTLYNRRTRQDEPALFVALTFERREVLDSSNIKPMNLIGVDRGENIPAVIALTDPEGCPLSRFKDSLGNPTHILRIGESYKEKQRTIQAKKEVEQRRAGGYSRKYASKAKNLADDMVRNTARDLLYYAVTQDAMLIFENLSRGFGRQGKRTFMAERQYTRMEDWLTAKLAYEGLPSKTYLSKTLAQYTSKTCSNCGFTITSADYDRVLEKLKKTATGWMTTINGKELKVEGQITYYNRYKRQNVVKDLSVELDRLSEESVNNDISSWTKGRSGEALSLLKKRFSHRPVQEKFVCLNCGFETHADEQAALNIARSWLFLRSQEYKKYQTNKTTGNTDKRAFVETWQSFYRKKLKEVWKPAV

SEQ ID NO: 2234 - protein, 979 aa, synthetic construct
QEIGKRINKIRRRLVKDSNTKKAGKTGPMKTLLVRVMTPDLRERLENLRKKPENIPQPISNTSRANLNKLLTDYTEMKKAILHVYWEEFQKDPVGLMSRVAQPASKKIDQNKLKPEMDEKGNLTTAGFACSQCGQPLFVYKLEQVSEKGKAYTNYFGRCNVAEHEKLILLAQLKPEKDSDEAVTYSLGKFGQRALDFYSIHVTKESTHPVKPLAQIAGNRYASGPVGKALSDACMGTIASFLSKYQDIIIEHQKVVKGNQKRLESLRELAGKENLEYPSVTLPPQPHTKEGVDAYNEVIARVRTWVNLNLWQKLKLSRDDAKPLLRLKGFPSFPLVERQANEVDWWDMVCNVKKLINEKKEDGKVFWQNLAGYKRQEALRPYLSSEEDRKKGKKFARYQLGDLLLHLEKKHGEDWGKVYDEAWERIDKKVEGLSKHIKLEEERRSEDAQSKAALTDWLRAKASFVIEGLKEADKDEFCRCELKLQKWYGDLRGKPFAIEAENSILDISGFSKQYNCAFIWQKDGVKKLNLYLIINYFKGGKLRFKKIKPEAFEANRFYTVINKKSGEIVPMEVNFNFDDPNLIILPLAFGKRQGREFIWNDLLSLETGSLKLANGRVIEKTLYNRRTRQDEPALFVALTFERREVLDSSNIKPMNLIGVDRGENIPAVIALTDPEGCPLSRFKDSLGNPTHILRIGESYKEKQRTIQAKKEVEQRRAGGYSRKYASKAKNLADDMVRNTARDLLYYAVTQDAMLIFENLSRGFGRQGKRTFMAERQYTRMEDWLTAKLAYEGLPSKTYLSKTLAQYTSKTCSNCGFTITSADYDRVLEKLKKTATGWMTTINGKELKVEGQITYYNRYKRQNVVKDLSVELDRLSEESVNNDISSWTKGRSGEALSLLKKRFSHRPVQEKFVCLNCGFETHADEQAALNIARSWLFLRSQEYKKYQTNKTTGNTDKRAFVETWQSFYRKKLKEVWKPAV

SEQ ID NO: 2235 - protein, 979 aa, synthetic construct
QEIGKRINKIRRRLVKDSNTKKAGKTGPMKTLLVRVMTPDLRERLENLRKKPENIPQPISNTSRANLNKLLTDYTEMKKAILHVYWEEFQKDPVGLMSRVAQPASKKIDQNKLKPEMDEKGNLTTAGFACSQCGQPLFVYKLEQVSEKGKAYTNYFGRCNVAEHEKLILLAQLKPEKDSDEAVTYSLGKFGQRALDFYSIHVTKESTHPVKPLAQIAGNRYASGPVGKALSDACMGTIASFLSKYQDIIIEHQKVVKGNQKRLESLRELAGKENLEYPSVTLPPQPHTKEGVDAYNEVIARVRMWVNLNLWQKLKLSRDDAKPLLRLKGFPSFPLVERQANEVDWWDMVCNVKKLINEKKEDGKVFWQNLAGYKRQEALRPYLSSEEDRKKGKKFARTQLGDLLLHLEKKHGEDWGKVYDEAWERIDKKVEGLSKHIKLEEERRSEDAQSKAALTDWLRAKASFVIEGLKEADKDEFCRCELKLQKWYGDLRGKPFAIEAENSILDISGFSKQYNCAFIWQKDGVKKLNLYLIINYFKGGKLRFKKIKPEAFEANRFYTVINKKSGEIVPMEVNFNFDDPNLIILPLAFGKRQGREFIWNDLLSLETGSLKLANGRVIEKTLYNRRTRQDEPALFVALTFERREVLDSSNIKPMNLIGVDRGENIPAVIALTDPEGCPLSRFKDSLGNPTHILRIGESYKEKQRTIQAKKEVEQRRAGGYSRKYASKAKNLADDMVRNTARDLLYYAVTQDAMLIFENLSRGFGRQGKRTFMAERQYTRMEDWLTAKLAYEGLPSKTYLSKTLAQYTSKTCSNCGFTITSADYDRVLEKLKKTATGWMTTINGKELKVEGQITYYNRYKRQNVVKDLSVELDRLSEESVNNDISSWTKGRSGEALSLLKKRFSHRPVQEKFVCLNCGFETHADEQAALNIARSWLFLRSQEYKKYQTNKTTGNTDKRAFVETWQSFYRKKLKEVWKPAV

SEQ ID NO: 2236 - protein, 979 aa, synthetic construct
QEIGKRINKIRRRLVKDSNTKKAGKTGPMKTLLVRVMTPDLRERLENLRKKPENIPQPISNTSRANLNKLLTDYTEMKKAILHVYWEEFQKDPVGLMSRVAQPASKKIDQNKLKPEMDEKGNLTTAGFACSQCGQPLFVYKLEQVSEKGKAYTNYFGRCNVAEHEKLILLAQLKPEKDSDEAVTYSLGKFGQRALDFYSIHVTKESTHPVKPLAQIAGNRYASGPVGKALSDACMGTIASFLSKYQDIIIEHQKVVKGNQKRLESLRELAGKENLEYPSVTLPPQPHTKEGVDAYNEVIARVRMWVNLNLWQKLKLSRDDAKPLLRLKGFPSFPLVERQANEVDWWDMVCNVKKLINEKKEDGKVFWQNLAGYKRQEALRPYLSSEEDRKKGKKFARYQLGDLLLHLEKKHGEDWGKVYDEAWERIDKKVEGLSKHIKLEEERRSEDAQSKAALTDWLRAKASFVIEGLKEADKDEFCRCELKLQKWYGDLRGKPFAIEAENSILDISGFSKQYNCAFIWQKDGVKKLNLYLIINYFKGGKLRFKKIKPEAFEANRFYTVINKKSGEIVPMEVNFNFDDPNLIILPLAFGKRQGREFIWNDLLSLETGSLKLANGRVIEKTLYNRRTRQDEPALFVALTFERREVLDSSNIKPMNLIGVDRGENIPAVIALTDPEGCPLSRFKDSLGNPTHILRIGESYKEKQRTIQAKKEVEQRRAGGYSRKYASKAKNLADDMVRNTARDLLYYAVTQDAMLIFENLSRGFGRQGKRTFMAERQYTRMEDWLTAKLAYEGLPSKTYLSKTLAQYTSKTCSNCGFTITSADYDRMLEKLKKTATGWMTTINGKELKVEGQITYYNRYKRQNVVKDLSVELDRLSEESVNNDISSWTKGRSGEALSLLKKRFSHRPVQEKFVCLNCGFETHADEQAALNIARSWLFLRSQEYKKYQTNKTTGNTDKRAFVETWQSFYRKKLKEVWKPAV

SEQ ID NO: 2237 - protein, 979 aa, synthetic construct
QEIGKRINKIRRRLVKDSNTKKAGKTGPMKTLLVRVMTPDLRERLENLRKKPENIPQPISNTSRANLNKLLTDYTEMKKAILHVYWEEFQKDPVGLMSRVAQPASKKIDQNKLKPEMDEKGNLTTAGFACSQCGQPLFVYKLEQVSEKGKAYTNYFGRCNVAEHEKLILLAQLKPEKDSDEAVTYSLGKFGQRALDFYSIHVTKESTHPVKPLAQIAGNRYASGPVGKALSDACMGTIASFLSKYQDIIIEHQKVVKGNQKRLESLRELAGKENLEYPSVTLPPQPHTKEGVDAYNEVIARVRMWVNLNLWQKLKLSRDDAKPLLRLKGFPSFPLVERQANEVDWWDMVCNVKKLINEKKEDGKVFWQNLAGYKRQEALRPYLSSEEDRKKGKKFARYQLGDLLLHLEKKHGEDWGKVYDEAWERIDKKVEGLSKHIKLEEERRSEDAQSKAALTDWLRAKASFVIEGLKEADKDEFCRCELKLQKWYGDLRGKPFAIEAENSILDISGFSKQYNCAFIWQKDGVKKLNLYLIINYFKGGKLRFKKIKPEAFEANRFYTVINKKSGEIVPMEVNFNFDDPNLIILPLAFGKRQGREFIWNDLLSLETGSLKLANGRVIEKTLYNRRTRQDEPALFVALTFERREVLDSSNIKPMNLIGVDRGENIPAVIALTDPEGCPLSRFKDSLGNPTHILRIGESYKEKQRTIQAKKEVEQRRAGGYSRKYASKAKNLADDMVRNTARDLLYYAVTQDAMLIFENLSRGFGRQGKRTFMAERQYTRMEDWLTAKLAYEGLPSKTYLSKTLAQYTSKTCSNCGFTITSADYDRVLEKLKKTATGWMTTINGKELKVEGQITYYNRYKRQNVVKDLSVELDRLSEESVNNDISSWDKGRSGEALSLLKKRFSHRPVQEKFVCLNCGFETHADEQAALNIARSWLFLRSQEYKKYQTNKTTGNTDKRAFVETWQSFYRKKLKEVWKPAV

SEQ ID NO: 2238 - protein, 979 aa, synthetic construct
QEIGKRINKIRRRLVKDSNTKKAGKTGPMKTLLVRVMTPDLRERLENLRKKPENIPQPISNTSRANLNKLLTDYTEMKKAILHVYWEEFQKDPVGLMSRVAQPASKKIDQNKLKPEMDEKGNLTTAGFACSQCGQPLFVYKLEQVSEKGKAYTNYFGRCNVAEHEKLILLAQLKPEKDSDEAVTYSLGKFGQRALDFYSIHVTKESTHPVKPLAQIAGNRYASGPVGKALSDACMGTIASFLSKYQDIIIEHQKVVKGNQKRLESLRELAGKENLEYPSVTLPPQPHTKEGVDAYNEVIARVRMWVNLNLWQKLKLSRDDAKPLLRLKGFPSFPLVERQANEVDWWDMVCNVKKLINEKKEDGKVFWQNLAGYKRQEALRPYLSSEEDRKKGKKFARYQLGDLLLHLEKKHGEDWGKVYDEAWERIDKKVEGLSKHIKLEEERRSEDAQSKAALTDWLRAKASFVIEGLKEADKDEFCRCELKLQKWYGDLRGKPFAIEAENSILDISGFSKQYNCAFIWQKDGVKKLNLYLIINYFKGGKLRFKKIKPEAFEANRFYTVINKKSGEIVPMEVNFNFDDPNLIILPLAFGKRQGREFIWNDLLSLETGSLKLANGRVIEKTLYNRRTRQDEPALFVALTFERREVLDSSNIKPMNLIGVDRGENIPAVIALTDPEGCPLSRFKDSLGNPTHILRIGESYKEKQRTIQAKKEVEQRRAGGYSRKYASKAKNLADDMVRNTARDLLYYAVTQDAMLIFENLSRGFGRQGKRTFMAERQYTRMEDWLTAKLAYEGLPSKTYLSKTLAQYTSKTCSNCGFTITSADYDRVLEKLKKTATGWMTTINGKELKVEGQITYYNRYKRQNVVKDLSVELDRLSEESVNNDISSWTKGRQGEALSLLKKRFSHRPVQEKFVCLNCGFETHADEQAALNIARSWLFLRSQEYKKYQTNKTTGNTDKRAFVETWQSFYRKKLKEVWKPAV

SEQ ID NO: 2239 - protein, 978 aa, synthetic construct
QEIKRINGIRRRLVKDSNTKKAGKTGPMKTLLVRVMTPDLRERLENLRKKPENIPQPISNTSQANLNKLLTDYTEMKKAILHVYWEEFQKDPVGLMSRVAQPASKKIDQNKLKPEMDEKGNLTTAGFACSQCGQPLFVYKLEQVSEKGKAYTNYFGRCNVAEHEKLILLAQLKPEKDSDEAVTYSLGKFGQRALDFYSIHVTKESTHPVKPLAQIAGNRYASGPVGKALSDACMGTIASFLSKYQDIIIEHQKVVKGNQKRLESLRELAGKENLEYPSVTLPPQPHTKEGVDAYNEVIARVRMWVNLNLWQKLKLSRDDAKPLLRLKGFPSFPLVERQANEVDWWDMVCNVKKLINEKKEDGKVFWQNLAGYKRQEALRPYLSSEEDRKKGKKFARYQLGDLLLHLEKKHGEDWGKVYDEAWERIDKKVEGLSKHIKLEEERRSEDAQSKAALTDWLRAKASFVIEGLKEADKDEFCRCELKLQKWYGDLRGKPFAIEAENSILDISGFSKQYNCAFIWQKDGVKKLNLYLIINYFKGGKLRFKKIKPEAFEANRFYTVINKKSGEIVPMEVNFNFDDPNLIILPLAFGKRQGREFIWNDLLSLETGSLKLANGRVIEKTLYNRRTRQDEPALFVALTFERREVLDSSNIKPMNLIGVDRGENIPAVIALTDPEGCPLSRFKDSLGNPTHILRIGESYKEKQRTIQAKKEVEQRRAGGYSRKYASKAKNLADDMVRNTARDLLYYAVTQDAMLIFENLSRGFGRQGKRTFMAERQYTRMEDWLTAKLAYEGLPSKTYLSKTLAQYTSKTCSNCGFTITSADYDRVLEKLKKTATGWMTTINGKELKVEGQITYYNRYKRQNVVKDLSVELDRLSEESVNNDISSWTKGRSGEALSLLKKRFSHRPVQEKFVCLNCGFETHADEQAALNIARSWLFLRSQEYKKYQTNKTTGNTDKRAFVETWQSFYRKKLKEVWKPAV

SEQ ID NO: 2240 - protein, 978 aa, synthetic construct
QEIKRINGIRRRLVKDSNTKKAGKTGPMKTLLVRVMTPDLRERLENLRKKPENIPQPISNTSRANLNKLLTDYTEMKKAILHVYWEEFQKDPVGLMSRVAQPASKKIDQNKLKPEMDEKGNLTTAGFACSQCGQPLFVYKLEQVSEKGKAYTNYFGRCNVAEHEKLIKLAQLKPEKDSDEAVTYSLGKFGQRALDFYSIHVTKESTHPVKPLAQIAGNRYASGPVGKALSDACMGTIASFLSKYQDIIIEHQKVVKGNQKRLESLRELAGKENLEYPSVTLPPQPHTKEGVDAYNEVIARVRMWVNLNLWQKLKLSRDDAKPLLRLKGFPSFPLVERQANEVDWWDMVCNVKKLINEKKEDGKVFWQNLAGYKRQEALRPYLSSEEDRKKGKKFARYQLGDLLLHLEKKHGEDWGKVYDEAWERIDKKVEGLSKHIKLEEERRSEDAQSKAALTDWLRAKASFVIEGLKEADKDEFCRCELKLQKWYGDLRGKPFAIEAENSILDISGFSKQYNCAFIWQKDGVKKLNLYLIINYFKGGKLRFKKIKPEAFEANRFYTVINKKSGEIVPMEVNFNFDDPNLIILPLAFGKRQGREFIWNDLLSLETGSLKLANGRVIEKTLYNRRTRQDEPALFVALTFERREVLDSSNIKPMNLIGVDRGENIPAVIALTDPEGCPLSRFKDSLGNPTHILRIGESYKEKQRTIQAKKEVEQRRAGGYSRKYASKAKNLADDMVRNTARDLLYYAVTQDAMLIFENLSRGFGRQGKRTFMAERQYTRMEDWLTAKLAYEGLPSKTYLSKTLAQYTSKTCSNCGFTITSADYDRVLEKLKKTATGWMTTINGKELKVEGQITYYNRYKRQNVVKDLSVELDRLSEESVNNDISSWTKGRSGEALSLLKKRFSHRPVQEKFVCLNCGFETHADEQAALNIARSWLFLRSQEYKKYQTNKTTGNTDKRAFVETWQSFYRKKLKEVWKPAV

SEQ ID NO: 2241 - protein, 978 aa, synthetic construct
QEIKRINGIRRRLVKDSNTKKAGKTGPMKTLLVRVMTPDLRERLENLRKKPENIPQPISNTSRANLNKLLTDYTEMKKAILHVYWEEFQKDPVGLMSRVAQPASKKIDQNKLKPEMDEKGNLTTAGFACSQCGQPLFVYKLEQVSEKGKAYTNYFGRCNVAEHEKLIQLAQLKPEKDSDEAVTYSLGKFGQRALDFYSIHVTKESTHPVKPLAQIAGNRYASGPVGKALSDACMGTIASFLSKYQDIIIEHQKVVKGNQKRLESLRELAGKENLEYPSVTLPPQPHTKEGVDAYNEVIARVRMWVNLNLWQKLKLSRDDAKPLLRLKGFPSFPLVERQANEVDWWDMVCNVKKLINEKKEDGKVFWQNLAGYKRQEALRPYLSSEEDRKKGKKFARYQLGDLLLHLEKKHGEDWGKVYDEAWERIDKKVEGLSKHIKLEEERRSEDAQSKAALTDWLRAKASFVIEGLKEADKDEFCRCELKLQKWYGDLRGKPFAIEAENSILDISGFSKQYNCAFIWQKDGVKKLNLYLIINYFKGGKLRFKKIKPEAFEANRFYTVINKKSGEIVPMEVNFNFDDPNLIILPLAFGKRQGREFIWNDLLSLETGSLKLANGRVIEKTLYNRRTRQDEPALFVALTFERREVLDSSNIKPMNLIGVDRGENIPAVIALTDPEGCPLSRFKDSLGNPTHILRIGESYKEKQRTIQAKKEVEQRRAGGYSRKYASKAKNLADDMVRNTARDLLYYAVTQDAMLIFENLSRGFGRQGKRTFMAERQYTRMEDWLTAKLAYEGLPSKTYLSKTLAQYTSKTCSNCGFTITSADYDRVLEKLKKTATGWMTTINGKELKVEGQITYYNRYKRQNVVKDLSVELDRLSEESVNNDISSWTKGRSGEALSLLKKRFSHRPVQEKFVCLNCGFETHADEQAALNIARSWLFLRSQEYKKYQTNKTTGNTDKRAFVETWQSFYRKKLKEVWKPAV

SEQ ID NO: 2242 - protein, 978 aa, synthetic construct
QEIKRINGIRRRLVKDSNTKKAGKTGPMKTLLVRVMTPDLRERLENLRKKPENIPQPISNTSRANLNKLLTDYTEMKKAILHVYWEEFQKDPVGLMSRVAQPASKKIDQNKLKPEMDEKGNLTTAGFACSQCGQPLFVYKLEQVSEKGKAYTNYFGRCNVAEHEKLILLDQLKPEKDSDEAVTYSLGKFGQRALDFYSIHVTKESTHPVKPLAQIAGNRYASGPVGKALSDACMGTIASFLSKYQDIIIEHQKVVKGNQKRLESLRELAGKENLEYPSVTLPPQPHTKEGVDAYNEVIARVRMWVNLNLWQKLKLSRDDAKPLLRLKGFPSFPLVERQANEVDWWDMVCNVKKLINEKKEDGKVFWQNLAGYKRQEALRPYLSSEEDRKKGKKFARYQLGDLLLHLEKKHGEDWGKVYDEAWERIDKKVEGLSKHIKLEEERRSEDAQSKAALTDWLRAKASFVIEGLKEADKDEFCRCELKLQKWYGDLRGKPFAIEAENSILDISGFSKQYNCAFIWQKDGVKKLNLYLIINYFKGGKLRFKKIKPEAFEANRFYTVINKKSGEIVPMEVNFNFDDPNLIILPLAFGKRQGREFIWNDLLSLETGSLKLANGRVIEKTLYNRRTRQDEPALFVALTFERREVLDSSNIKPMNLIGVDRGENIPAVIALTDPEGCPLSRFKDSLGNPTHILRIGESYKEKQRTIQAKKEVEQRRAGGYSRKYASKAKNLADDMVRNTARDLLYYAVTQDAMLIFENLSRGFGRQGKRTFMAERQYTRMEDWLTAKLAYEGLPSKTYLSKTLAQYTSKTCSNCGFTITSADYDRVLEKLKKTATGWMTTINGKELKVEGQITYYNRYKRQNVVKDLSVELDRLSEESVNNDISSWTKGRSGEALSLLKKRFSHRPVQEKFVCLNCGFETHADEQAALNIARSWLFLRSQEYKKYQTNKTTGNTDKRAFVETWQSFYRKKLKEVWKPAV

SEQ ID NO: 2243 - protein, 978 aa, synthetic construct
QEIKRINGIRRRLVKDSNTKKAGKTGPMKTLLVRVMTPDLRERLENLRKKPENIPQPISNTSRANLNKLLTDYTEMKKAILHVYWEEFQKDPVGLMSRVAQPASKKIDQNKLKPEMDEKGNLTTAGFACSQCGQPLFVYKLEQVSEKGKAYTNYFGRCNVAEHEKLILLYQLKPEKDSDEAVTYSLGKFGQRALDFYSIHVTKESTHPVKPLAQIAGNRYASGPVGKALSDACMGTIASFLSKYQDIIIEHQKVVKGNQKRLESLRELAGKENLEYPSVTLPPQPHTKEGVDAYNEVIARVRMWVNLNLWQKLKLSRDDAKPLLRLKGFPSFPLVERQANEVDWWDMVCNVKKLINEKKEDGKVFWQNLAGYKRQEALRPYLSSEEDRKKGKKFARYQLGDLLLHLEKKHGEDWGKVYDEAWERIDKKVEGLSKHIKLEEERRSEDAQSKAALTDWLRAKASFVIEGLKEADKDEFCRCELKLQKWYGDLRGKPFAIEAENSILDISGFSKQYNCAFIWQKDGVKKLNLYLIINYFKGGKLRFKKIKPEAFEANRFYTVINKKSGEIVPMEVNFNFDDPNLIILPLAFGKRQGREFIWNDLLSLETGSLKLANGRVIEKTLYNRRTRQDEPALFVALTFERREVLDSSNIKPMNLIGVDRGENIPAVIALTDPEGCPLSRFKDSLGNPTHILRIGESYKEKQRTIQAKKEVEQRRAGGYSRKYASKAKNLADDMVRNTARDLLYYAVTQDAMLIFENLSRGFGRQGKRTFMAERQYTRMEDWLTAKLAYEGLPSKTYLSKTLAQYTSKTCSNCGFTITSADYDRVLEKLKKTATGWMTTINGKELKVEGQITYYNRYKRQNVVKDLSVELDRLSEESVNNDISSWTKGRSGEALSLLKKRFSHRPVQEKFVCLNCGFETHADEQAALNIARSWLFLRSQEYKKYQTNKTTGNTDKRAFVETWQSFYRKKLKEVWKPAV

SEQ ID NO: 2244 - protein, 978 aa, synthetic construct
QEIKRINGIRRRLVKDSNTKKAGKTGPMKTLLVRVMTPDLRERLENLRKKPENIPQPISNTSRANLNKLLTDYTEMKKAILHVYWEEFQKDPVGLMSRVAQPASKKIDQNKLKPEMDEKGNLTTAGFACSQCGQPLFVYKLEQVSEKGKAYTNYFGRCNVAEHEKLILLSQLKPEKDSDEAVTYSLGKFGQRALDFYSIHVTKESTHPVKPLAQIAGNRYASGPVGKALSDACMGTIASFLSKYQDIIIEHQKVVKGNQKRLESLRELAGKENLEYPSVTLPPQPHTKEGVDAYNEVIARVRMWVNLNLWQKLKLSRDDAKPLLRLKGFPSFPLVERQANEVDWWDMVCNVKKLINEKKEDGKVFWQNLAGYKRQEALRPYLSSEEDRKKGKKFARYQLGDLLLHLEKKHGEDWGKVYDEAWERIDKKVEGLSKHIKLEEERRSEDAQSKAALTDWLRAKASFVIEGLKEADKDEFCRCELKLQKWYGDLRGKPFAIEAENSILDISGFSKQYNCAFIWQKDGVKKLNLYLIINYFKGGKLRFKKIKPEAFEANRFYTVINKKSGEIVPMEVNFNFDDPNLIILPLAFGKRQGREFIWNDLLSLETGSLKLANGRVIEKTLYNRRTRQDEPALFVALTFERREVLDSSNIKPMNLIGVDRGENIPAVIALTDPEGCPLSRFKDSLGNPTHILRIGESYKEKQRTIQAKKEVEQRRAGGYSRKYASKAKNLADDMVRNTARDLLYYAVTQDAMLIFENLSRGFGRQGKRTFMAERQYTRMEDWLTAKLAYEGLPSKTYLSKTLAQYTSKTCSNCGFTITSADYDRVLEKLKKTATGWMTTINGKELKVEGQITYYNRYKRQNVVKDLSVELDRLSEESVNNDISSWTKGRSGEALSLLKKRFSHRPVQEKFVCLNCGFETHADEQAALNIARSWLFLRSQEYKKYQTNKTTGNTDKRAFVETWQSFYRKKLKEVWKPAV

SEQ ID NO: 2245 - protein, 978 aa, synthetic construct
QEIKRINGIRRRLVKDSNTKKAGKTGPMKTLLVRVMTPDLRERLENLRKKPENIPQPISNTSRANLNKLLTDYTEMKKAILHVYWEEFQKDPVGLMSRVAQPASKKIDQNKLKPEMDEKGNLTTAGFACSQCGQPLFVYKLEQVSEKGKAYTNYFGRCNVAEHEKLILLAQLKPEKDSDEAVTYSLGKFGQRALDFYSIHVTKESTHPVKPLAQIAGNRYASTPVGKALSDACMGTIASFLSKYQDIIIEHQKVVKGNQKRLESLRELAGKENLEYPSVTLPPQPHTKEGVDAYNEVIARVRMWVNLNLWQKLKLSRDDAKPLLRLKGFPSFPLVERQANEVDWWDMVCNVKKLINEKKEDGKVFWQNLAGYKRQEALRPYLSSEEDRKKGKKFARYQLGDLLLHLEKKHGEDWGKVYDEAWERIDKKVEGLSKHIKLEEERRSEDAQSKAALTDWLRAKASFVIEGLKEADKDEFCRCELKLQKWYGDLRGKPFAIEAENSILDISGFSKQYNCAFIWQKDGVKKLNLYLIINYFKGGKLRFKKIKPEAFEANRFYTVINKKSGEIVPMEVNFNFDDPNLIILPLAFGKRQGREFIWNDLLSLETGSLKLANGRVIEKTLYNRRTRQDEPALFVALTFERREVLDSSNIKPMNLIGVDRGENIPAVIALTDPEGCPLSRFKDSLGNPTHILRIGESYKEKQRTIQAKKEVEQRRAGGYSRKYASKAKNLADDMVRNTARDLLYYAVTQDAMLIFENLSRGFGRQGKRTFMAERQYTRMEDWLTAKLAYEGLPSKTYLSKTLAQYTSKTCSNCGFTITSADYDRVLEKLKKTATGWMTTINGKELKVEGQITYYNRYKRQNVVKDLSVELDRLSEESVNNDISSWTKGRSGEALSLLKKRFSHRPVQEKFVCLNCGFETHADEQAALNIARSWLFLRSQEYKKYQTNKTTGNTDKRAFVETWQSFYRKKLKEVWKPAV

SEQ ID NO: 2246 - protein, 978 aa, synthetic construct
QEIKRINGIRRRLVKDSNTKKAGKTGPMKTLLVRVMTPDLRERLENLRKKPENIPQPISNTSRANLNKLLTDYTEMKKAILHVYWEEFQKDPVGLMSRVAQPASKKIDQNKLKPEMDEKGNLTTAGFACSQCGQPLFVYKLEQVSEKGKAYTNYFGRCNVAEHEKLILLAQLKPEKDSDEAVTYSLGKFGQRALDFYSIHVTKESTHPVKPLAQIAGNRYASGPVGKALSDACMGTIASFLSKYQDIIIEHQKVVKGNQKRLESLRELAGKENLEYPSVTLPPQPHTKEGVDAYNEVIARVRTWVNLNLWQKLKLSRDDAKPLLRLKGFPSFPLVERQANEVDWWDMVCNVKKLINEKKEDGKVFWQNLAGYKRQEALRPYLSSEEDRKKGKKFARYQLGDLLLHLEKKHGEDWGKVYDEAWERIDKKVEGLSKHIKLEEERRSEDAQSKAALTDWLRAKASFVIEGLKEADKDEFCRCELKLQKWYGDLRGKPFAIEAENSILDISGFSKQYNCAFIWQKDGVKKLNLYLIINYFKGGKLRFKKIKPEAFEANRFYTVINKKSGEIVPMEVNFNFDDPNLIILPLAFGKRQGREFIWNDLLSLETGSLKLANGRVIEKTLYNRRTRQDEPALFVALTFERREVLDSSNIKPMNLIGVDRGENIPAVIALTDPEGCPLSRFKDSLGNPTHILRIGESYKEKQRTIQAKKEVEQRRAGGYSRKYASKAKNLADDMVRNTARDLLYYAVTQDAMLIFENLSRGFGRQGKRTFMAERQYTRMEDWLTAKLAYEGLPSKTYLSKTLAQYTSKTCSNCGFTITSADYDRVLEKLKKTATGWMTTINGKELKVEGQITYYNRYKRQNVVKDLSVELDRLSEESVNNDISSWTKGRSGEALSLLKKRFSHRPVQEKFVCLNCGFETHADEQAALNIARSWLFLRSQEYKKYQTNKTTGNTDKRAFVETWQSFYRKKLKEVWKPAV

SEQ ID NO: 2247 - protein, 978 aa, synthetic construct
QEIKRINGIRRRLVKDSNTKKAGKTGPMKTLLVRVMTPDLRERLENLRKKPENIPQPISNTSRANLNKLLTDYTEMKKAILHVYWEEFQKDPVGLMSRVAQPASKKIDQNKLKPEMDEKGNLTTAGFACSQCGQPLFVYKLEQVSEKGKAYTNYFGRCNVAEHEKLILLAQLKPEKDSDEAVTYSLGKFGQRALDFYSIHVTKESTHPVKPLAQIAGNRYASGPVGKALSDACMGTIASFLSKYQDIIIEHQKVVKGNQKRLESLRELAGKENLEYPSVTLPPQPHTKEGVDAYNEVIARVRMWVNLNLWQKLKLSRDDAKPLLRLKGFPSFPLVERQANEVDWWDMVCNVKKLINEKKEDGKVFWQNLAGYKRQEALRPYLSSEEDRKKGKKFARTQLGDLLLHLEKKHGEDWGKVYDEAWERIDKKVEGLSKHIKLEEERRSEDAQSKAALTDWLRAKASFVIEGLKEADKDEFCRCELKLQKWYGDLRGKPFAIEAENSILDISGFSKQYNCAFIWQKDGVKKLNLYLIINYFKGGKLRFKKIKPEAFEANRFYTVINKKSGEIVPMEVNFNFDDPNLIILPLAFGKRQGREFIWNDLLSLETGSLKLANGRVIEKTLYNRRTRQDEPALFVALTFERREVLDSSNIKPMNLIGVDRGENIPAVIALTDPEGCPLSRFKDSLGNPTHILRIGESYKEKQRTIQAKKEVEQRRAGGYSRKYASKAKNLADDMVRNTARDLLYYAVTQDAMLIFENLSRGFGRQGKRTFMAERQYTRMEDWLTAKLAYEGLPSKTYLSKTLAQYTSKTCSNCGFTITSADYDRVLEKLKKTATGWMTTINGKELKVEGQITYYNRYKRQNVVKDLSVELDRLSEESVNNDISSWTKGRSGEALSLLKKRFSHRPVQEKFVCLNCGFETHADEQAALNIARSWLFLRSQEYKKYQTNKTTGNTDKRAFVETWQSFYRKKLKEVWKPAV

SEQ ID NO: 2248 - protein, 978 aa, synthetic construct
QEIKRINGIRRRLVKDSNTKKAGKTGPMKTLLVRVMTPDLRERLENLRKKPENIPQPISNTSRANLNKLLTDYTEMKKAILHVYWEEFQKDPVGLMSRVAQPASKKIDQNKLKPEMDEKGNLTTAGFACSQCGQPLFVYKLEQVSEKGKAYTNYFGRCNVAEHEKLILLAQLKPEKDSDEAVTYSLGKFGQRALDFYSIHVTKESTHPVKPLAQIAGNRYASGPVGKALSDACMGTIASFLSKYQDIIIEHQKVVKGNQKRLESLRELAGKENLEYPSVTLPPQPHTKEGVDAYNEVIARVRMWVNLNLWQKLKLSRDDAKPLLRLKGFPSFPLVERQANEVDWWDMVCNVKKLINEKKEDGKVFWQNLAGYKRQEALRPYLSSEEDRKKGKKFARYQLGDLLLHLEKKHGEDWGKVYDEAWERIDKKVEGLSKHIKLEEERRSEDAQSKAALTDWLRAKASFVIEGLKEADKDEFCRCELKLQKWYGDLRGKPFAIEAENSILDISGFSKQYNCAFIWQKDGVKKLNLYLIINYFKGGKLRFKKIKPEAFEANRFYTVINKKSGEIVPMEVNFNFDDPNLIILPLAFGKRQGREFIWNDLLSLETGSLKLANGRVIEKTLYNRRTRQDEPALFVALTFERREVLDSSNIKPMNLIGVDRGENIPAVIALTDPEGCPLSRFKDSLGNPTHILRIGESYKEKQRTIQAKKEVEQRRAGGYSRKYASKAKNLADDMVRNTARDLLYYAVTQDAMLIFENLSRGFGRQGKRTFMAERQYTRMEDWLTAKLAYEGLPSKTYLSKTLAQYTSKTCSNCGFTITSADYDRMLEKLKKTATGWMTTINGKELKVEGQITYYNRYKRQNVVKDLSVELDRLSEESVNNDISSWTKGRSGEALSLLKKRFSHRPVQEKFVCLNCGFETHADEQAALNIARSWLFLRSQEYKKYQTNKTTGNTDKRAFVETWQSFYRKKLKEVWKPAV

SEQ ID NO: 2249 - protein, 978 aa, synthetic construct
QEIKRINGIRRRLVKDSNTKKAGKTGPMKTLLVRVMTPDLRERLENLRKKPENIPQPISNTSRANLNKLLTDYTEMKKAILHVYWEEFQKDPVGLMSRVAQPASKKIDQNKLKPEMDEKGNLTTAGFACSQCGQPLFVYKLEQVSEKGKAYTNYFGRCNVAEHEKLILLAQLKPEKDSDEAVTYSLGKFGQRALDFYSIHVTKESTHPVKPLAQIAGNRYASGPVGKALSDACMGTIASFLSKYQDIIIEHQKVVKGNQKRLESLRELAGKENLEYPSVTLPPQPHTKEGVDAYNEVIARVRMWVNLNLWQKLKLSRDDAKPLLRLKGFPSFPLVERQANEVDWWDMVCNVKKLINEKKEDGKVFWQNLAGYKRQEALRPYLSSEEDRKKGKKFARYQLGDLLLHLEKKHGEDWGKVYDEAWERIDKKVEGLSKHIKLEEERRSEDAQSKAALTDWLRAKASFVIEGLKEADKDEFCRCELKLQKWYGDLRGKPFAIEAENSILDISGFSKQYNCAFIWQKDGVKKLNLYLIINYFKGGKLRFKKIKPEAFEANRFYTVINKKSGEIVPMEVNFNFDDPNLIILPLAFGKRQGREFIWNDLLSLETGSLKLANGRVIEKTLYNRRTRQDEPALFVALTFERREVLDSSNIKPMNLIGVDRGENIPAVIALTDPEGCPLSRFKDSLGNPTHILRIGESYKEKQRTIQAKKEVEQRRAGGYSRKYASKAKNLADDMVRNTARDLLYYAVTQDAMLIFENLSRGFGRQGKRTFMAERQYTRMEDWLTAKLAYEGLPSKTYLSKTLAQYTSKTCSNCGFTITSADYDRVLEKLKKTATGWMTTINGKELKVEGQITYYNRYKRQNVVKDLSVELDRLSEESVNNDISSWDKGRSGEALSLLKKRFSHRPVQEKFVCLNCGFETHADEQAALNIARSWLFLRSQEYKKYQTNKTTGNTDKRAFVETWQSFYRKKLKEVWKPAV

SEQ ID NO: 2250 - protein, 978 aa, synthetic construct
QEIKRINGIRRRLVKDSNTKKAGKTGPMKTLLVRVMTPDLRERLENLRKKPENIPQPISNTSRANLNKLLTDYTEMKKAILHVYWEEFQKDPVGLMSRVAQPASKKIDQNKLKPEMDEKGNLTTAGFACSQCGQPLFVYKLEQVSEKGKAYTNYFGRCNVAEHEKLILLAQLKPEKDSDEAVTYSLGKFGQRALDFYSIHVTKESTHPVKPLAQIAGNRYASGPVGKALSDACMGTIASFLSKYQDIIIEHQKVVKGNQKRLESLRELAGKENLEYPSVTLPPQPHTKEGVDAYNEVIARVRMWVNLNLWQKLKLSRDDAKPLLRLKGFPSFPLVERQANEVDWWDMVCNVKKLINEKKEDGKVFWQNLAGYKRQEALRPYLSSEEDRKKGKKFARYQLGDLLLHLEKKHGEDWGKVYDEAWERIDKKVEGLSKHIKLEEERRSEDAQSKAALTDWLRAKASFVIEGLKEADKDEFCRCELKLQKWYGDLRGKPFAIEAENSILDISGFSKQYNCAFIWQKDGVKKLNLYLIINYFKGGKLRFKKIKPEAFEANRFYTVINKKSGEIVPMEVNFNFDDPNLIILPLAFGKRQGREFIWNDLLSLETGSLKLANGRVIEKTLYNRRTRQDEPALFVALTFERREVLDSSNIKPMNLIGVDRGENIPAVIALTDPEGCPLSRFKDSLGNPTHILRIGESYKEKQRTIQAKKEVEQRRAGGYSRKYASKAKNLADDMVRNTARDLLYYAVTQDAMLIFENLSRGFGRQGKRTFMAERQYTRMEDWLTAKLAYEGLPSKTYLSKTLAQYTSKTCSNCGFTITSADYDRVLEKLKKTATGWMTTINGKELKVEGQITYYNRYKRQNVVKDLSVELDRLSEESVNNDISSWTKGRQGEALSLLKKRFSHRPVQEKFVCLNCGFETHADEQAALNIARSWLFLRSQEYKKYQTNKTTGNTDKRAFVETWQSFYRKKLKEVWKPAV

SEQ ID NO: 2251 - protein, 979 aa, synthetic construct
QEIKRINKIRRRLVKDSNTKKAGKTRGPMKTLLVRVMTPDLRERLENLRKKPENIPQPISNTSQANLNKLLTDYTEMKKAILHVYWEEFQKDPVGLMSRVAQPASKKIDQNKLKPEMDEKGNLTTAGFACSQCGQPLFVYKLEQVSEKGKAYTNYFGRCNVAEHEKLILLAQLKPEKDSDEAVTYSLGKFGQRALDFYSIHVTKESTHPVKPLAQIAGNRYASGPVGKALSDACMGTIASFLSKYQDIIIEHQKVVKGNQKRLESLRELAGKENLEYPSVTLPPQPHTKEGVDAYNEVIARVRMWVNLNLWQKLKLSRDDAKPLLRLKGFPSFPLVERQANEVDWWDMVCNVKKLINEKKEDGKVFWQNLAGYKRQEALRPYLSSEEDRKKGKKFARYQLGDLLLHLEKKHGEDWGKVYDEAWERIDKKVEGLSKHIKLEEERRSEDAQSKAALTDWLRAKASFVIEGLKEADKDEFCRCELKLQKWYGDLRGKPFAIEAENSILDISGFSKQYNCAFIWQKDGVKKLNLYLIINYFKGGKLRFKKIKPEAFEANRFYTVINKKSGEIVPMEVNFNFDDPNLIILPLAFGKRQGREFIWNDLLSLETGSLKLANGRVIEKTLYNRRTRQDEPALFVALTFERREVLDSSNIKPMNLIGVDRGENIPAVIALTDPEGCPLSRFKDSLGNPTHILRIGESYKEKQRTIQAKKEVEQRRAGGYSRKYASKAKNLADDMVRNTARDLLYYAVTQDAMLIFENLSRGFGRQGKRTFMAERQYTRMEDWLTAKLAYEGLPSKTYLSKTLAQYTSKTCSNCGFTITSADYDRVLEKLKKTATGWMTTINGKELKVEGQITYYNRYKRQNVVKDLSVELDRLSEESVNNDISSWTKGRSGEALSLLKKRFSHRPVQEKFVCLNCGFETHADEQAALNIARSWLFLRSQEYKKYQTNKTTGNTDKRAFVETWQSFYRKKLKEVWKPAV

SEQ ID NO: 2252 - protein, 979 aa, synthetic construct
QEIKRINKIRRRLVKDSNTKKAGKTRGPMKTLLVRVMTPDLRERLENLRKKPENIPQPISNTSRANLNKLLTDYTEMKKAILHVYWEEFQKDPVGLMSRVAQPASKKIDQNKLKPEMDEKGNLTTAGFACSQCGQPLFVYKLEQVSEKGKAYTNYFGRCNVAEHEKLIKLAQLKPEKDSDEAVTYSLGKFGQRALDFYSIHVTKESTHPVKPLAQIAGNRYASGPVGKALSDACMGTIASFLSKYQDIIIEHQKVVKGNQKRLESLRELAGKENLEYPSVTLPPQPHTKEGVDAYNEVIARVRMWVNLNLWQKLKLSRDDAKPLLRLKGFPSFPLVERQANEVDWWDMVCNVKKLINEKKEDGKVFWQNLAGYKRQEALRPYLSSEEDRKKGKKFARYQLGDLLLHLEKKHGEDWGKVYDEAWERIDKKVEGLSKHIKLEEERRSEDAQSKAALTDWLRAKASFVIEGLKEADKDEFCRCELKLQKWYGDLRGKPFAIEAENSILDISGFSKQYNCAFIWQKDGVKKLNLYLIINYFKGGKLRFKKIKPEAFEANRFYTVINKKSGEIVPMEVNFNFDDPNLIILPLAFGKRQGREFIWNDLLSLETGSLKLANGRVIEKTLYNRRTRQDEPALFVALTFERREVLDSSNIKPMNLIGVDRGENIPAVIALTDPEGCPLSRFKDSLGNPTHILRIGESYKEKQRTIQAKKEVEQRRAGGYSRKYASKAKNLADDMVRNTARDLLYYAVTQDAMLIFENLSRGFGRQGKRTFMAERQYTRMEDWLTAKLAYEGLPSKTYLSKTLAQYTSKTCSNCGFTITSADYDRVLEKLKKTATGWMTTINGKELKVEGQITYYNRYKRQNVVKDLSVELDRLSEESVNNDISSWTKGRSGEALSLLKKRFSHRPVQEKFVCLNCGFETHADEQAALNIARSWLFLRSQEYKKYQTNKTTGNTDKRAFVETWQSFYRKKLKEVWKPAV

SEQ ID NO: 2253 - protein, 979 aa, synthetic construct
QEIKRINKIRRRLVKDSNTKKAGKTRGPMKTLLVRVMTPDLRERLENLRKKPENIPQPISNTSRANLNKLLTDYTEMKKAILHVYWEEFQKDPVGLMSRVAQPASKKIDQNKLKPEMDEKGNLTTAGFACSQCGQPLFVYKLEQVSEKGKAYTNYFGRCNVAEHEKLIQLAQLKPEKDSDEAVTYSLGKFGQRALDFYSIHVTKESTHPVKPLAQIAGNRYASGPVGKALSDACMGTIASFLSKYQDIIIEHQKVVKGNQKRLESLRELAGKENLEYPSVTLPPQPHTKEGVDAYNEVIARVRMWVNLNLWQKLKLSRDDAKPLLRLKGFPSFPLVERQANEVDWWDMVCNVKKLINEKKEDGKVFWQNLAGYKRQEALRPYLSSEEDRKKGKKFARYQLGDLLLHLEKKHGEDWGKVYDEAWERIDKKVEGLSKHIKLEEERRSEDAQSKAALTDWLRAKASFVIEGLKEADKDEFCRCELKLQKWYGDLRGKPFAIEAENSILDISGFSKQYNCAFIWQKDGVKKLNLYLIINYFKGGKLRFKKIKPEAFEANRFYTVINKKSGEIVPMEVNFNFDDPNLIILPLAFGKRQGREFIWNDLLSLETGSLKLANGRVIEKTLYNRRTRQDEPALFVALTFERREVLDSSNIKPMNLIGVDRGENIPAVIALTDPEGCPLSRFKDSLGNPTHILRIGESYKEKQRTIQAKKEVEQRRAGGYSRKYASKAKNLADDMVRNTARDLLYYAVTQDAMLIFENLSRGFGRQGKRTFMAERQYTRMEDWLTAKLAYEGLPSKTYLSKTLAQYTSKTCSNCGFTITSADYDRVLEKLKKTATGWMTTINGKELKVEGQITYYNRYKRQNVVKDLSVELDRLSEESVNNDISSWTKGRSGEALSLLKKRFSHRPVQEKFVCLNCGFETHADEQAALNIARSWLFLRSQEYKKYQTNKTTGNTDKRAFVETWQSFYRKKLKEVWKPAV

SEQ ID NO: 2254 - protein, 979 aa, synthetic construct
QEIKRINKIRRRLVKDSNTKKAGKTRGPMKTLLVRVMTPDLRERLENLRKKPENIPQPISNTSRANLNKLLTDYTEMKKAILHVYWEEFQKDPVGLMSRVAQPASKKIDQNKLKPEMDEKGNLTTAGFACSQCGQPLFVYKLEQVSEKGKAYTNYFGRCNVAEHEKLILLDQLKPEKDSDEAVTYSLGKFGQRALDFYSIHVTKESTHPVKPLAQIAGNRYASGPVGKALSDACMGTIASFLSKYQDIIIEHQKVVKGNQKRLESLRELAGKENLEYPSVTLPPQPHTKEGVDAYNEVIARVRMWVNLNLWQKLKLSRDDAKPLLRLKGFPSFPLVERQANEVDWWDMVCNVKKLINEKKEDGKVFWQNLAGYKRQEALRPYLSSEEDRKKGKKFARYQLGDLLLHLEKKHGEDWGKVYDEAWERIDKKVEGLSKHIKLEEERRSEDAQSKAALTDWLRAKASFVIEGLKEADKDEFCRCELKLQKWYGDLRGKPFAIEAENSILDISGFSKQYNCAFIWQKDGVKKLNLYLIINYFKGGKLRFKKIKPEAFEANRFYTVINKKSGEIVPMEVNFNFDDPNLIILPLAFGKRQGREFIWNDLLSLETGSLKLANGRVIEKTLYNRRTRQDEPALFVALTFERREVLDSSNIKPMNLIGVDRGENIPAVIALTDPEGCPLSRFKDSLGNPTHILRIGESYKEKQRTIQAKKEVEQRRAGGYSRKYASKAKNLADDMVRNTARDLLYYAVTQDAMLIFENLSRGFGRQGKRTFMAERQYTRMEDWLTAKLAYEGLPSKTYLSKTLAQYTSKTCSNCGFTITSADYDRVLEKLKKTATGWMTTINGKELKVEGQITYYNRYKRQNVVKDLSVELDRLSEESVNNDISSWTKGRSGEALSLLKKRFSHRPVQEKFVCLNCGFETHADEQAALNIARSWLFLRSQEYKKYQTNKTTGNTDKRAFVETWQSFYRKKLKEVWKPAV

SEQ ID NO: 2255 - protein, 979 aa, synthetic construct
QEIKRINKIRRRLVKDSNTKKAGKTRGPMKTLLVRVMTPDLRERLENLRKKPENIPQPISNTSRANLNKLLTDYTEMKKAILHVYWEEFQKDPVGLMSRVAQPASKKIDQNKLKPEMDEKGNLTTAGFACSQCGQPLFVYKLEQVSEKGKAYTNYFGRCNVAEHEKLILLYQLKPEKDSDEAVTYSLGKFGQRALDFYSIHVTKESTHPVKPLAQIAGNRYASGPVGKALSDACMGTIASFLSKYQDIIIEHQKVVKGNQKRLESLRELAGKENLEYPSVTLPPQPHTKEGVDAYNEVIARVRMWVNLNLWQKLKLSRDDAKPLLRLKGFPSFPLVERQANEVDWWDMVCNVKKLINEKKEDGKVFWQNLAGYKRQEALRPYLSSEEDRKKGKKFARYQLGDLLLHLEKKHGEDWGKVYDEAWERIDKKVEGLSKHIKLEEERRSEDAQSKAALTDWLRAKASFVIEGLKEADKDEFCRCELKLQKWYGDLRGKPFAIEAENSILDISGFSKQYNCAFIWQKDGVKKLNLYLIINYFKGGKLRFKKIKPEAFEANRFYTVINKKSGEIVPMEVNFNFDDPNLIILPLAFGKRQGREFIWNDLLSLETGSLKLANGRVIEKTLYNRRTRQDEPALFVALTFERREVLDSSNIKPMNLIGVDRGENIPAVIALTDPEGCPLSRFKDSLGNPTHILRIGESYKEKQRTIQAKKEVEQRRAGGYSRKYASKAKNLADDMVRNTARDLLYYAVTQDAMLIFENLSRGFGRQGKRTFMAERQYTRMEDWLTAKLAYEGLPSKTYLSKTLAQYTSKTCSNCGFTITSADYDRVLEKLKKTATGWMTTINGKELKVEGQITYYNRYKRQNVVKDLSVELDRLSEESVNNDISSWTKGRSGEALSLLKKRFSHRPVQEKFVCLNCGFETHADEQAALNIARSWLFLRSQEYKKYQTNKTTGNTDKRAFVETWQSFYRKKLKEVWKPAV

SEQ ID NO: 2256 - protein, 979 aa, synthetic construct
QEIKRINKIRRRLVKDSNTKKAGKTRGPMKTLLVRVMTPDLRERLENLRKKPENIPQPISNTSRANLNKLLTDYTEMKKAILHVYWEEFQKDPVGLMSRVAQPASKKIDQNKLKPEMDEKGNLTTAGFACSQCGQPLFVYKLEQVSEKGKAYTNYFGRCNVAEHEKLILLSQLKPEKDSDEAVTYSLGKFGQRALDFYSIHVTKESTHPVKPLAQIAGNRYASGPVGKALSDACMGTIASFLSKYQDIIIEHQKVVKGNQKRLESLRELAGKENLEYPSVTLPPQPHTKEGVDAYNEVIARVRMWVNLNLWQKLKLSRDDAKPLLRLKGFPSFPLVERQANEVDWWDMVCNVKKLINEKKEDGKVFWQNLAGYKRQEALRPYLSSEEDRKKGKKFARYQLGDLLLHLEKKHGEDWGKVYDEAWERIDKKVEGLSKHIKLEEERRSEDAQSKAALTDWLRAKASFVIEGLKEADKDEFCRCELKLQKWYGDLRGKPFAIEAENSILDISGFSKQYNCAFIWQKDGVKKLNLYLIINYFKGGKLRFKKIKPEAFEANRFYTVINKKSGEIVPMEVNFNFDDPNLIILPLAFGKRQGREFIWNDLLSLETGSLKLANGRVIEKTLYNRRTRQDEPALFVALTFERREVLDSSNIKPMNLIGVDRGENIPAVIALTDPEGCPLSRFKDSLGNPTHILRIGESYKEKQRTIQAKKEVEQRRAGGYSRKYASKAKNLADDMVRNTARDLLYYAVTQDAMLIFENLSRGFGRQGKRTFMAERQYTRMEDWLTAKLAYEGLPSKTYLSKTLAQYTSKTCSNCGFTITSADYDRVLEKLKKTATGWMTTINGKELKVEGQITYYNRYKRQNVVKDLSVELDRLSEESVNNDISSWTKGRSGEALSLLKKRFSHRPVQEKFVCLNCGFETHADEQAALNIARSWLFLRSQEYKKYQTNKTTGNTDKRAFVETWQSFYRKKLKEVWKPAV

SEQ ID NO: 2257 - protein, 979 aa, synthetic construct
QEIKRINKIRRRLVKDSNTKKAGKTRGPMKTLLVRVMTPDLRERLENLRKKPENIPQPISNTSRANLNKLLTDYTEMKKAILHVYWEEFQKDPVGLMSRVAQPASKKIDQNKLKPEMDEKGNLTTAGFACSQCGQPLFVYKLEQVSEKGKAYTNYFGRCNVAEHEKLILLAQLKPEKDSDEAVTYSLGKFGQRALDFYSIHVTKESTHPVKPLAQIAGNRYASTPVGKALSDACMGTIASFLSKYQDIIIEHQKVVKGNQKRLESLRELAGKENLEYPSVTLPPQPHTKEGVDAYNEVIARVRMWVNLNLWQKLKLSRDDAKPLLRLKGFPSFPLVERQANEVDWWDMVCNVKKLINEKKEDGKVFWQNLAGYKRQEALRPYLSSEEDRKKGKKFARYQLGDLLLHLEKKHGEDWGKVYDEAWERIDKKVEGLSKHIKLEEERRSEDAQSKAALTDWLRAKASFVIEGLKEADKDEFCRCELKLQKWYGDLRGKPFAIEAENSILDISGFSKQYNCAFIWQKDGVKKLNLYLIINYFKGGKLRFKKIKPEAFEANRFYTVINKKSGEIVPMEVNFNFDDPNLIILPLAFGKRQGREFIWNDLLSLETGSLKLANGRVIEKTLYNRRTRQDEPALFVALTFERREVLDSSNIKPMNLIGVDRGENIPAVIALTDPEGCPLSRFKDSLGNPTHILRIGESYKEKQRTIQAKKEVEQRRAGGYSRKYASKAKNLADDMVRNTARDLLYYAVTQDAMLIFENLSRGFGRQGKRTFMAERQYTRMEDWLTAKLAYEGLPSKTYLSKTLAQYTSKTCSNCGFTITSADYDRVLEKLKKTATGWMTTINGKELKVEGQITYYNRYKRQNVVKDLSVELDRLSEESVNNDISSWTKGRSGEALSLLKKRFSHRPVQEKFVCLNCGFETHADEQAALNIARSWLFLRSQEYKKYQTNKTTGNTDKRAFVETWQSFYRKKLKEVWKPAV

SEQ ID NO: 2258 - protein, 979 aa, synthetic construct
QEIKRINKIRRRLVKDSNTKKAGKTRGPMKTLLVRVMTPDLRERLENLRKKPENIPQPISNTSRANLNKLLTDYTEMKKAILHVYWEEFQKDPVGLMSRVAQPASKKIDQNKLKPEMDEKGNLTTAGFACSQCGQPLFVYKLEQVSEKGKAYTNYFGRCNVAEHEKLILLAQLKPEKDSDEAVTYSLGKFGQRALDFYSIHVTKESTHPVKPLAQIAGNRYASGPVGKALSDACMGTIASFLSKYQDIIIEHQKVVKGNQKRLESLRELAGKENLEYPSVTLPPQPHTKEGVDAYNEVIARVRTWVNLNLWQKLKLSRDDAKPLLRLKGFPSFPLVERQANEVDWWDMVCNVKKLINEKKEDGKVFWQNLAGYKRQEALRPYLSSEEDRKKGKKFARYQLGDLLLHLEKKHGEDWGKVYDEAWERIDKKVEGLSKHIKLEEERRSEDAQSKAALTDWLRAKASFVIEGLKEADKDEFCRCELKLQKWYGDLRGKPFAIEAENSILDISGFSKQYNCAFIWQKDGVKKLNLYLIINYFKGGKLRFKKIKPEAFEANRFYTVINKKSGEIVPMEVNFNFDDPNLIILPLAFGKRQGREFIWNDLLSLETGSLKLANGRVIEKTLYNRRTRQDEPALFVALTFERREVLDSSNIKPMNLIGVDRGENIPAVIALTDPEGCPLSRFKDSLGNPTHILRIGESYKEKQRTIQAKKEVEQRRAGGYSRKYASKAKNLADDMVRNTARDLLYYAVTQDAMLIFENLSRGFGRQGKRTFMAERQYTRMEDWLTAKLAYEGLPSKTYLSKTLAQYTSKTCSNCGFTITSADYDRVLEKLKKTATGWMTTINGKELKVEGQITYYNRYKRQNVVKDLSVELDRLSEESVNNDISSWTKGRSGEALSLLKKRFSHRPVQEKFVCLNCGFETHADEQAALNIARSWLFLRSQEYKKYQTNKTTGNTDKRAFVETWQSFYRKKLKEVWKPAV

SEQ ID NO: 2259 - protein, 979 aa, synthetic construct
QEIKRINKIRRRLVKDSNTKKAGKTRGPMKTLLVRVMTPDLRERLENLRKKPENIPQPISNTSRANLNKLLTDYTEMKKAILHVYWEEFQKDPVGLMSRVAQPASKKIDQNKLKPEMDEKGNLTTAGFACSQCGQPLFVYKLEQVSEKGKAYTNYFGRCNVAEHEKLILLAQLKPEKDSDEAVTYSLGKFGQRALDFYSIHVTKESTHPVKPLAQIAGNRYASGPVGKALSDACMGTIASFLSKYQDIIIEHQKVVKGNQKRLESLRELAGKENLEYPSVTLPPQPHTKEGVDAYNEVIARVRMWVNLNLWQKLKLSRDDAKPLLRLKGFPSFPLVERQANEVDWWDMVCNVKKLINEKKEDGKVFWQNLAGYKRQEALRPYLSSEEDRKKGKKFARTQLGDLLLHLEKKHGEDWGKVYDEAWERIDKKVEGLSKHIKLEEERRSEDAQSKAALTDWLRAKASFVIEGLKEADKDEFCRCELKLQKWYGDLRGKPFAIEAENSILDISGFSKQYNCAFIWQKDGVKKLNLYLIINYFKGGKLRFKKIKPEAFEANRFYTVINKKSGEIVPMEVNFNFDDPNLIILPLAFGKRQGREFIWNDLLSLETGSLKLANGRVIEKTLYNRRTRQDEPALFVALTFERREVLDSSNIKPMNLIGVDRGENIPAVIALTDPEGCPLSRFKDSLGNPTHILRIGESYKEKQRTIQAKKEVEQRRAGGYSRKYASKAKNLADDMVRNTARDLLYYAVTQDAMLIFENLSRGFGRQGKRTFMAERQYTRMEDWLTAKLAYEGLPSKTYLSKTLAQYTSKTCSNCGFTITSADYDRVLEKLKKTATGWMTTINGKELKVEGQITYYNRYKRQNVVKDLSVELDRLSEESVNNDISSWTKGRSGEALSLLKKRFSHRPVQEKFVCLNCGFETHADEQAALNIARSWLFLRSQEYKKYQTNKTTGNTDKRAFVETWQSFYRKKLKEVWKPAV

SEQ ID NO: 2260 - protein, 979 aa, synthetic construct
QEIKRINKIRRRLVKDSNTKKAGKTRGPMKTLLVRVMTPDLRERLENLRKKPENIPQPISNTSRANLNKLLTDYTEMKKAILHVYWEEFQKDPVGLMSRVAQPASKKIDQNKLKPEMDEKGNLTTAGFACSQCGQPLFVYKLEQVSEKGKAYTNYFGRCNVAEHEKLILLAQLKPEKDSDEAVTYSLGKFGQRALDFYSIHVTKESTHPVKPLAQIAGNRYASGPVGKALSDACMGTIASFLSKYQDIIIEHQKVVKGNQKRLESLRELAGKENLEYPSVTLPPQPHTKEGVDAYNEVIARVRMWVNLNLWQKLKLSRDDAKPLLRLKGFPSFPLVERQANEVDWWDMVCNVKKLINEKKEDGKVFWQNLAGYKRQEALRPYLSSEEDRKKGKKFARYQLGDLLLHLEKKHGEDWGKVYDEAWERIDKKVEGLSKHIKLEEERRSEDAQSKAALTDWLRAKASFVIEGLKEADKDEFCRCELKLQKWYGDLRGKPFAIEAENSILDISGFSKQYNCAFIWQKDGVKKLNLYLIINYFKGGKLRFKKIKPEAFEANRFYTVINKKSGEIVPMEVNFNFDDPNLIILPLAFGKRQGREFIWNDLLSLETGSLKLANGRVIEKTLYNRRTRQDEPALFVALTFERREVLDSSNIKPMNLIGVDRGENIPAVIALTDPEGCPLSRFKDSLGNPTHILRIGESYKEKQRTIQAKKEVEQRRAGGYSRKYASKAKNLADDMVRNTARDLLYYAVTQDAMLIFENLSRGFGRQGKRTFMAERQYTRMEDWLTAKLAYEGLPSKTYLSKTLAQYTSKTCSNCGFTITSADYDRMLEKLKKTATGWMTTINGKELKVEGQITYYNRYKRQNVVKDLSVELDRLSEESVNNDISSWTKGRSGEALSLLKKRFSHRPVQEKFVCLNCGFETHADEQAALNIARSWLFLRSQEYKKYQTNKTTGNTDKRAFVETWQSFYRKKLKEVWKPAV

SEQ ID NO: 2261 - protein, 979 aa, synthetic construct
QEIKRINKIRRRLVKDSNTKKAGKTRGPMKTLLVRVMTPDLRERLENLRKKPENIPQPISNTSRANLNKLLTDYTEMKKAILHVYWEEFQKDPVGLMSRVAQPASKKIDQNKLKPEMDEKGNLTTAGFACSQCGQPLFVYKLEQVSEKGKAYTNYFGRCNVAEHEKLILLAQLKPEKDSDEAVTYSLGKFGQRALDFYSIHVTKESTHPVKPLAQIAGNRYASGPVGKALSDACMGTIASFLSKYQDIIIEHQKVVKGNQKRLESLRELAGKENLEYPSVTLPPQPHTKEGVDAYNEVIARVRMWVNLNLWQKLKLSRDDAKPLLRLKGFPSFPLVERQANEVDWWDMVCNVKKLINEKKEDGKVFWQNLAGYKRQEALRPYLSSEEDRKKGKKFARYQLGDLLLHLEKKHGEDWGKVYDEAWERIDKKVEGLSKHIKLEEERRSEDAQSKAALTDWLRAKASFVIEGLKEADKDEFCRCELKLQKWYGDLRGKPFAIEAENSILDISGFSKQYNCAFIWQKDGVKKLNLYLIINYFKGGKLRFKKIKPEAFEANRFYTVINKKSGEIVPMEVNFNFDDPNLIILPLAFGKRQGREFIWNDLLSLETGSLKLANGRVIEKTLYNRRTRQDEPALFVALTFERREVLDSSNIKPMNLIGVDRGENIPAVIALTDPEGCPLSRFKDSLGNPTHILRIGESYKEKQRTIQAKKEVEQRRAGGYSRKYASKAKNLADDMVRNTARDLLYYAVTQDAMLIFENLSRGFGRQGKRTFMAERQYTRMEDWLTAKLAYEGLPSKTYLSKTLAQYTSKTCSNCGFTITSADYDRVLEKLKKTATGWMTTINGKELKVEGQITYYNRYKRQNVVKDLSVELDRLSEESVNNDISSWDKGRSGEALSLLKKRFSHRPVQEKFVCLNCGFETHADEQAALNIARSWLFLRSQEYKKYQTNKTTGNTDKRAFVETWQSFYRKKLKEVWKPAV

SEQ ID NO: 2262 - protein, 979 aa, synthetic construct
QEIKRINKIRRRLVKDSNTKKAGKTRGPMKTLLVRVMTPDLRERLENLRKKPENIPQPISNTSRANLNKLLTDYTEMKKAILHVYWEEFQKDPVGLMSRVAQPASKKIDQNKLKPEMDEKGNLTTAGFACSQCGQPLFVYKLEQVSEKGKAYTNYFGRCNVAEHEKLILLAQLKPEKDSDEAVTYSLGKFGQRALDFYSIHVTKESTHPVKPLAQIAGNRYASGPVGKALSDACMGTIASFLSKYQDIIIEHQKVVKGNQKRLESLRELAGKENLEYPSVTLPPQPHTKEGVDAYNEVIARVRMWVNLNLWQKLKLSRDDAKPLLRLKGFPSFPLVERQANEVDWWDMVCNVKKLINEKKEDGKVFWQNLAGYKRQEALRPYLSSEEDRKKGKKFARYQLGDLLLHLEKKHGEDWGKVYDEAWERIDKKVEGLSKHIKLEEERRSEDAQSKAALTDWLRAKASFVIEGLKEADKDEFCRCELKLQKWYGDLRGKPFAIEAENSILDISGFSKQYNCAFIWQKDGVKKLNLYLIINYFKGGKLRFKKIKPEAFEANRFYTVINKKSGEIVPMEVNFNFDDPNLIILPLAFGKRQGREFIWNDLLSLETGSLKLANGRVIEKTLYNRRTRQDEPALFVALTFERREVLDSSNIKPMNLIGVDRGENIPAVIALTDPEGCPLSRFKDSLGNPTHILRIGESYKEKQRTIQAKKEVEQRRAGGYSRKYASKAKNLADDMVRNTARDLLYYAVTQDAMLIFENLSRGFGRQGKRTFMAERQYTRMEDWLTAKLAYEGLPSKTYLSKTLAQYTSKTCSNCGFTITSADYDRVLEKLKKTATGWMTTINGKELKVEGQITYYNRYKRQNVVKDLSVELDRLSEESVNNDISSWTKGRQGEALSLLKKRFSHRPVQEKFVCLNCGFETHADEQAALNIARSWLFLRSQEYKKYQTNKTTGNTDKRAFVETWQSFYRKKLKEVWKPAV

SEQ ID NO: 2263 - protein, 978 aa, synthetic construct
QEIKRINKIRRRLVKDSNTKKAGKTGPMKTLLVPVMTPDLRERLENLRKKPENIPQPISNTSQANLNKLLTDYTEMKKAILHVYWEEFQKDPVGLMSRVAQPASKKIDQNKLKPEMDEKGNLTTAGFACSQCGQPLFVYKLEQVSEKGKAYTNYFGRCNVAEHEKLILLAQLKPEKDSDEAVTYSLGKFGQRALDFYSIHVTKESTHPVKPLAQIAGNRYASGPVGKALSDACMGTIASFLSKYQDIIIEHQKVVKGNQKRLESLRELAGKENLEYPSVTLPPQPHTKEGVDAYNEVIARVRMWVNLNLWQKLKLSRDDAKPLLRLKGFPSFPLVERQANEVDWWDMVCNVKKLINEKKEDGKVFWQNLAGYKRQEALRPYLSSEEDRKKGKKFARYQLGDLLLHLEKKHGEDWGKVYDEAWERIDKKVEGLSKHIKLEEERRSEDAQSKAALTDWLRAKASFVIEGLKEADKDEFCRCELKLQKWYGDLRGKPFAIEAENSILDISGFSKQYNCAFIWQKDGVKKLNLYLIINYFKGGKLRFKKIKPEAFEANRFYTVINKKSGEIVPMEVNFNFDDPNLIILPLAFGKRQGREFIWNDLLSLETGSLKLANGRVIEKTLYNRRTRQDEPALFVALTFERREVLDSSNIKPMNLIGVDRGENIPAVIALTDPEGCPLSRFKDSLGNPTHILRIGESYKEKQRTIQAKKEVEQRRAGGYSRKYASKAKNLADDMVRNTARDLLYYAVTQDAMLIFENLSRGFGRQGKRTFMAERQYTRMEDWLTAKLAYEGLPSKTYLSKTLAQYTSKTCSNCGFTITSADYDRVLEKLKKTATGWMTTINGKELKVEGQITYYNRYKRQNVVKDLSVELDRLSEESVNNDISSWTKGRSGEALSLLKKRFSHRPVQEKFVCLNCGFETHADEQAALNIARSWLFLRSQEYKKYQTNKTTGNTDKRAFVETWQSFYRKKLKEVWKPAV

SEQ ID NO: 2264 - protein, 978 aa, synthetic construct
QEIKRINKIRRRLVKDSNTKKAGKTGPMKTLLVPVMTPDLRERLENLRKKPENIPQPISNTSRANLNKLLTDYTEMKKAILHVYWEEFQKDPVGLMSRVAQPASKKIDQNKLKPEMDEKGNLTTAGFACSQCGQPLFVYKLEQVSEKGKAYTNYFGRCNVAEHEKLIKLAQLKPEKDSDEAVTYSLGKFGQRALDFYSIHVTKESTHPVKPLAQIAGNRYASGPVGKALSDACMGTIASFLSKYQDIIIEHQKVVKGNQKRLESLRELAGKENLEYPSVTLPPQPHTKEGVDAYNEVIARVRMWVNLNLWQKLKLSRDDAKPLLRLKGFPSFPLVERQANEVDWWDMVCNVKKLINEKKEDGKVFWQNLAGYKRQEALRPYLSSEEDRKKGKKFARYQLGDLLLHLEKKHGEDWGKVYDEAWERIDKKVEGLSKHIKLEEERRSEDAQSKAALTDWLRAKASFVIEGLKEADKDEFCRCELKLQKWYGDLRGKPFAIEAENSILDISGFSKQYNCAFIWQKDGVKKLNLYLIINYFKGGKLRFKKIKPEAFEANRFYTVINKKSGEIVPMEVNFNFDDPNLIILPLAFGKRQGREFIWNDLLSLETGSLKLANGRVIEKTLYNRRTRQDEPALFVALTFERREVLDSSNIKPMNLIGVDRGENIPAVIALTDPEGCPLSRFKDSLGNPTHILRIGESYKEKQRTIQAKKEVEQRRAGGYSRKYASKAKNLADDMVRNTARDLLYYAVTQDAMLIFENLSRGFGRQGKRTFMAERQYTRMEDWLTAKLAYEGLPSKTYLSKTLAQYTSKTCSNCGFTITSADYDRVLEKLKKTATGWMTTINGKELKVEGQITYYNRYKRQNVVKDLSVELDRLSEESVNNDISSWTKGRSGEALSLLKKRFSHRPVQEKFVCLNCGFETHADEQAALNIARSWLFLRSQEYKKYQTNKTTGNTDKRAFVETWQSFYRKKLKEVWKPAV

SEQ ID NO: 2265 - protein, 978 aa, synthetic construct
QEIKRINKIRRRLVKDSNTKKAGKTGPMKTLLVPVMTPDLRERLENLRKKPENIPQPISNTSRANLNKLLTDYTEMKKAILHVYWEEFQKDPVGLMSRVAQPASKKIDQNKLKPEMDEKGNLTTAGFACSQCGQPLFVYKLEQVSEKGKAYTNYFGRCNVAEHEKLIQLAQLKPEKDSDEAVTYSLGKFGQRALDFYSIHVTKESTHPVKPLAQIAGNRYASGPVGKALSDACMGTIASFLSKYQDIIIEHQKVVKGNQKRLESLRELAGKENLEYPSVTLPPQPHTKEGVDAYNEVIARVRMWVNLNLWQKLKLSRDDAKPLLRLKGFPSFPLVERQANEVDWWDMVCNVKKLINEKKEDGKVFWQNLAGYKRQEALRPYLSSEEDRKKGKKFARYQLGDLLLHLEKKHGEDWGKVYDEAWERIDKKVEGLSKHIKLEEERRSEDAQSKAALTDWLRAKASFVIEGLKEADKDEFCRCELKLQKWYGDLRGKPFAIEAENSILDISGFSKQYNCAFIWQKDGVKKLNLYLIINYFKGGKLRFKKIKPEAFEANRFYTVINKKSGEIVPMEVNFNFDDPNLIILPLAFGKRQGREFIWNDLLSLETGSLKLANGRVIEKTLYNRRTRQDEPALFVALTFERREVLDSSNIKPMNLIGVDRGENIPAVIALTDPEGCPLSRFKDSLGNPTHILRIGESYKEKQRTIQAKKEVEQRRAGGYSRKYASKAKNLADDMVRNTARDLLYYAVTQDAMLIFENLSRGFGRQGKRTFMAERQYTRMEDWLTAKLAYEGLPSKTYLSKTLAQYTSKTCSNCGFTITSADYDRVLEKLKKTATGWMTTINGKELKVEGQITYYNRYKRQNVVKDLSVELDRLSEESVNNDISSWTKGRSGEALSLLKKRFSHRPVQEKFVCLNCGFETHADEQAALNIARSWLFLRSQEYKKYQTNKTTGNTDKRAFVETWQSFYRKKLKEVWKPAV

SEQ ID NO: 2266 - protein, 978 aa, synthetic construct
QEIKRINKIRRRLVKDSNTKKAGKTGPMKTLLVPVMTPDLRERLENLRKKPENIPQPISNTSRANLNKLLTDYTEMKKAILHVYWEEFQKDPVGLMSRVAQPASKKIDQNKLKPEMDEKGNLTTAGFACSQCGQPLFVYKLEQVSEKGKAYTNYFGRCNVAEHEKLILLDQLKPEKDSDEAVTYSLGKFGQRALDFYSIHVTKESTHPVKPLAQIAGNRYASGPVGKALSDACMGTIASFLSKYQDIIIEHQKVVKGNQKRLESLRELAGKENLEYPSVTLPPQPHTKEGVDAYNEVIARVRMWVNLNLWQKLKLSRDDAKPLLRLKGFPSFPLVERQANEVDWWDMVCNVKKLINEKKEDGKVFWQNLAGYKRQEALRPYLSSEEDRKKGKKFARYQLGDLLLHLEKKHGEDWGKVYDEAWERIDKKVEGLSKHIKLEEERRSEDAQSKAALTDWLRAKASFVIEGLKEADKDEFCRCELKLQKWYGDLRGKPFAIEAENSILDISGFSKQYNCAFIWQKDGVKKLNLYLIINYFKGGKLRFKKIKPEAFEANRFYTVINKKSGEIVPMEVNFNFDDPNLIILPLAFGKRQGREFIWNDLLSLETGSLKLANGRVIEKTLYNRRTRQDEPALFVALTFERREVLDSSNIKPMNLIGVDRGENIPAVIALTDPEGCPLSRFKDSLGNPTHILRIGESYKEKQRTIQAKKEVEQRRAGGYSRKYASKAKNLADDMVRNTARDLLYYAVTQDAMLIFENLSRGFGRQGKRTFMAERQYTRMEDWLTAKLAYEGLPSKTYLSKTLAQYTSKTCSNCGFTITSADYDRVLEKLKKTATGWMTTINGKELKVEGQITYYNRYKRQNVVKDLSVELDRLSEESVNNDISSWTKGRSGEALSLLKKRFSHRPVQEKFVCLNCGFETHADEQAALNIARSWLFLRSQEYKKYQTNKTTGNTDKRAFVETWQSFYRKKLKEVWKPAV

SEQ ID NO: 2267 - protein, 978 aa, synthetic construct
QEIKRINKIRRRLVKDSNTKKAGKTGPMKTLLVPVMTPDLRERLENLRKKPENIPQPISNTSRANLNKLLTDYTEMKKAILHVYWEEFQKDPVGLMSRVAQPASKKIDQNKLKPEMDEKGNLTTAGFACSQCGQPLFVYKLEQVSEKGKAYTNYFGRCNVAEHEKLILLYQLKPEKDSDEAVTYSLGKFGQRALDFYSIHVTKESTHPVKPLAQIAGNRYASGPVGKALSDACMGTIASFLSKYQDIIIEHQKVVKGNQKRLESLRELAGKENLEYPSVTLPPQPHTKEGVDAYNEVIARVRMWVNLNLWQKLKLSRDDAKPLLRLKGFPSFPLVERQANEVDWWDMVCNVKKLINEKKEDGKVFWQNLAGYKRQEALRPYLSSEEDRKKGKKFARYQLGDLLLHLEKKHGEDWGKVYDEAWERIDKKVEGLSKHIKLEEERRSEDAQSKAALTDWLRAKASFVIEGLKEADKDEFCRCELKLQKWYGDLRGKPFAIEAENSILDISGFSKQYNCAFIWQKDGVKKLNLYLIINYFKGGKLRFKKIKPEAFEANRFYTVINKKSGEIVPMEVNFNFDDPNLIILPLAFGKRQGREFIWNDLLSLETGSLKLANGRVIEKTLYNRRTRQDEPALFVALTFERREVLDSSNIKPMNLIGVDRGENIPAVIALTDPEGCPLSRFKDSLGNPTHILRIGESYKEKQRTIQAKKEVEQRRAGGYSRKYASKAKNLADDMVRNTARDLLYYAVTQDAMLIFENLSRGFGRQGKRTFMAERQYTRMEDWLTAKLAYEGLPSKTYLSKTLAQYTSKTCSNCGFTITSADYDRVLEKLKKTATGWMTTINGKELKVEGQITYYNRYKRQNVVKDLSVELDRLSEESVNNDISSWTKGRSGEALSLLKKRFSHRPVQEKFVCLNCGFETHADEQAALNIARSWLFLRSQEYKKYQTNKTTGNTDKRAFVETWQSFYRKKLKEVWKPAV

SEQ ID NO: 2268 - protein, 978 aa, synthetic construct
QEIKRINKIRRRLVKDSNTKKAGKTGPMKTLLVPVMTPDLRERLENLRKKPENIPQPISNTSRANLNKLLTDYTEMKKAILHVYWEEFQKDPVGLMSRVAQPASKKIDQNKLKPEMDEKGNLTTAGFACSQCGQPLFVYKLEQVSEKGKAYTNYFGRCNVAEHEKLILLSQLKPEKDSDEAVTYSLGKFGQRALDFYSIHVTKESTHPVKPLAQIAGNRYASGPVGKALSDACMGTIASFLSKYQDIIIEHQKVVKGNQKRLESLRELAGKENLEYPSVTLPPQPHTKEGVDAYNEVIARVRMWVNLNLWQKLKLSRDDAKPLLRLKGFPSFPLVERQANEVDWWDMVCNVKKLINEKKEDGKVFWQNLAGYKRQEALRPYLSSEEDRKKGKKFARYQLGDLLLHLEKKHGEDWGKVYDEAWERIDKKVEGLSKHIKLEEERRSEDAQSKAALTDWLRAKASFVIEGLKEADKDEFCRCELKLQKWYGDLRGKPFAIEAENSILDISGFSKQYNCAFIWQKDGVKKLNLYLIINYFKGGKLRFKKIKPEAFEANRFYTVINKKSGEIVPMEVNFNFDDPNLIILPLAFGKRQGREFIWNDLLSLETGSLKLANGRVIEKTLYNRRTRQDEPALFVALTFERREVLDSSNIKPMNLIGVDRGENIPAVIALTDPEGCPLSRFKDSLGNPTHILRIGESYKEKQRTIQAKKEVEQRRAGGYSRKYASKAKNLADDMVRNTARDLLYYAVTQDAMLIFENLSRGFGRQGKRTFMAERQYTRMEDWLTAKLAYEGLPSKTYLSKTLAQYTSKTCSNCGFTITSADYDRVLEKLKKTATGWMTTINGKELKVEGQITYYNRYKRQNVVKDLSVELDRLSEESVNNDISSWTKGRSGEALSLLKKRFSHRPVQEKFVCLNCGFETHADEQAALNIARSWLFLRSQEYKKYQTNKTTGNTDKRAFVETWQSFYRKKLKEVWKPAV

SEQ ID NO: 2269 - protein, 978 aa, synthetic construct
QEIKRINKIRRRLVKDSNTKKAGKTGPMKTLLVPVMTPDLRERLENLRKKPENIPQPISNTSRANLNKLLTDYTEMKKAILHVYWEEFQKDPVGLMSRVAQPASKKIDQNKLKPEMDEKGNLTTAGFACSQCGQPLFVYKLEQVSEKGKAYTNYFGRCNVAEHEKLILLAQLKPEKDSDEAVTYSLGKFGQRALDFYSIHVTKESTHPVKPLAQIAGNRYASTPVGKALSDACMGTIASFLSKYQDIIIEHQKVVKGNQKRLESLRELAGKENLEYPSVTLPPQPHTKEGVDAYNEVIARVRMWVNLNLWQKLKLSRDDAKPLLRLKGFPSFPLVERQANEVDWWDMVCNVKKLINEKKEDGKVFWQNLAGYKRQEALRPYLSSEEDRKKGKKFARYQLGDLLLHLEKKHGEDWGKVYDEAWERIDKKVEGLSKHIKLEEERRSEDAQSKAALTDWLRAKASFVIEGLKEADKDEFCRCELKLQKWYGDLRGKPFAIEAENSILDISGFSKQYNCAFIWQKDGVKKLNLYLIINYFKGGKLRFKKIKPEAFEANRFYTVINKKSGEIVPMEVNFNFDDPNLIILPLAFGKRQGREFIWNDLLSLETGSLKLANGRVIEKTLYNRRTRQDEPALFVALTFERREVLDSSNIKPMNLIGVDRGENIPAVIALTDPEGCPLSRFKDSLGNPTHILRIGESYKEKQRTIQAKKEVEQRRAGGYSRKYASKAKNLADDMVRNTARDLLYYAVTQDAMLIFENLSRGFGRQGKRTFMAERQYTRMEDWLTAKLAYEGLPSKTYLSKTLAQYTSKTCSNCGFTITSADYDRVLEKLKKTATGWMTTINGKELKVEGQITYYNRYKRQNVVKDLSVELDRLSEESVNNDISSWTKGRSGEALSLLKKRFSHRPVQEKFVCLNCGFETHADEQAALNIARSWLFLRSQEYKKYQTNKTTGNTDKRAFVETWQSFYRKKLKEVWKPAV

SEQ ID NO: 2270 - protein, 978 aa, synthetic construct
QEIKRINKIRRRLVKDSNTKKAGKTGPMKTLLVPVMTPDLRERLENLRKKPENIPQPISNTSRANLNKLLTDYTEMKKAILHVYWEEFQKDPVGLMSRVAQPASKKIDQNKLKPEMDEKGNLTTAGFACSQCGQPLFVYKLEQVSEKGKAYTNYFGRCNVAEHEKLILLAQLKPEKDSDEAVTYSLGKFGQRALDFYSIHVTKESTHPVKPLAQIAGNRYASGPVGKALSDACMGTIASFLSKYQDIIIEHQKVVKGNQKRLESLRELAGKENLEYPSVTLPPQPHTKEGVDAYNEVIARVRTWVNLNLWQKLKLSRDDAKPLLRLKGFPSFPLVERQANEVDWWDMVCNVKKLINEKKEDGKVFWQNLAGYKRQEALRPYLSSEEDRKKGKKFARYQLGDLLLHLEKKHGEDWGKVYDEAWERIDKKVEGLSKHIKLEEERRSEDAQSKAALTDWLRAKASFVIEGLKEADKDEFCRCELKLQKWYGDLRGKPFAIEAENSILDISGFSKQYNCAFIWQKDGVKKLNLYLIINYFKGGKLRFKKIKPEAFEANRFYTVINKKSGEIVPMEVNFNFDDPNLIILPLAFGKRQGREFIWNDLLSLETGSLKLANGRVIEKTLYNRRTRQDEPALFVALTFERREVLDSSNIKPMNLIGVDRGENIPAVIALTDPEGCPLSRFKDSLGNPTHILRIGESYKEKQRTIQAKKEVEQRRAGGYSRKYASKAKNLADDMVRNTARDLLYYAVTQDAMLIFENLSRGFGRQGKRTFMAERQYTRMEDWLTAKLAYEGLPSKTYLSKTLAQYTSKTCSNCGFTITSADYDRVLEKLKKTATGWMTTINGKELKVEGQITYYNRYKRQNVVKDLSVELDRLSEESVNNDISSWTKGRSGEALSLLKKRFSHRPVQEKFVCLNCGFETHADEQAALNIARSWLFLRSQEYKKYQTNKTTGNTDKRAFVETWQSFYRKKLKEVWKPAV

SEQ ID NO: 2271 - protein, 978 aa, synthetic construct
QEIKRINKIRRRLVKDSNTKKAGKTGPMKTLLVPVMTPDLRERLENLRKKPENIPQPISNTSRANLNKLLTDYTEMKKAILHVYWEEFQKDPVGLMSRVAQPASKKIDQNKLKPEMDEKGNLTTAGFACSQCGQPLFVYKLEQVSEKGKAYTNYFGRCNVAEHEKLILLAQLKPEKDSDEAVTYSLGKFGQRALDFYSIHVTKESTHPVKPLAQIAGNRYASGPVGKALSDACMGTIASFLSKYQDIIIEHQKVVKGNQKRLESLRELAGKENLEYPSVTLPPQPHTKEGVDAYNEVIARVRMWVNLNLWQKLKLSRDDAKPLLRLKGFPSFPLVERQANEVDWWDMVCNVKKLINEKKEDGKVFWQNLAGYKRQEALRPYLSSEEDRKKGKKFARTQLGDLLLHLEKKHGEDWGKVYDEAWERIDKKVEGLSKHIKLEEERRSEDAQSKAALTDWLRAKASFVIEGLKEADKDEFCRCELKLQKWYGDLRGKPFAIEAENSILDISGFSKQYNCAFIWQKDGVKKLNLYLIINYFKGGKLRFKKIKPEAFEANRFYTVINKKSGEIVPMEVNFNFDDPNLIILPLAFGKRQGREFIWNDLLSLETGSLKLANGRVIEKTLYNRRTRQDEPALFVALTFERREVLDSSNIKPMNLIGVDRGENIPAVIALTDPEGCPLSRFKDSLGNPTHILRIGESYKEKQRTIQAKKEVEQRRAGGYSRKYASKAKNLADDMVRNTARDLLYYAVTQDAMLIFENLSRGFGRQGKRTFMAERQYTRMEDWLTAKLAYEGLPSKTYLSKTLAQYTSKTCSNCGFTITSADYDRVLEKLKKTATGWMTTINGKELKVEGQITYYNRYKRQNVVKDLSVELDRLSEESVNNDISSWTKGRSGEALSLLKKRFSHRPVQEKFVCLNCGFETHADEQAALNIARSWLFLRSQEYKKYQTNKTTGNTDKRAFVETWQSFYRKKLKEVWKPAV

SEQ ID NO: 2272 - protein, 978 aa, synthetic construct
QEIKRINKIRRRLVKDSNTKKAGKTGPMKTLLVPVMTPDLRERLENLRKKPENIPQPISNTSRANLNKLLTDYTEMKKAILHVYWEEFQKDPVGLMSRVAQPASKKIDQNKLKPEMDEKGNLTTAGFACSQCGQPLFVYKLEQVSEKGKAYTNYFGRCNVAEHEKLILLAQLKPEKDSDEAVTYSLGKFGQRALDFYSIHVTKESTHPVKPLAQIAGNRYASGPVGKALSDACMGTIASFLSKYQDIIIEHQKVVKGNQKRLESLRELAGKENLEYPSVTLPPQPHTKEGVDAYNEVIARVRMWVNLNLWQKLKLSRDDAKPLLRLKGFPSFPLVERQANEVDWWDMVCNVKKLINEKKEDGKVFWQNLAGYKRQEALRPYLSSEEDRKKGKKFARYQLGDLLLHLEKKHGEDWGKVYDEAWERIDKKVEGLSKHIKLEEERRSEDAQSKAALTDWLRAKASFVIEGLKEADKDEFCRCELKLQKWYGDLRGKPFAIEAENSILDISGFSKQYNCAFIWQKDGVKKLNLYLIINYFKGGKLRFKKIKPEAFEANRFYTVINKKSGEIVPMEVNFNFDDPNLIILPLAFGKRQGREFIWNDLLSLETGSLKLANGRVIEKTLYNRRTRQDEPALFVALTFERREVLDSSNIKPMNLIGVDRGENIPAVIALTDPEGCPLSRFKDSLGNPTHILRIGESYKEKQRTIQAKKEVEQRRAGGYSRKYASKAKNLADDMVRNTARDLLYYAVTQDAMLIFENLSRGFGRQGKRTFMAERQYTRMEDWLTAKLAYEGLPSKTYLSKTLAQYTSKTCSNCGFTITSADYDRMLEKLKKTATGWMTTINGKELKVEGQITYYNRYKRQNVVKDLSVELDRLSEESVNNDISSWTKGRSGEALSLLKKRFSHRPVQEKFVCLNCGFETHADEQAALNIARSWLFLRSQEYKKYQTNKTTGNTDKRAFVETWQSFYRKKLKEVWKPAV

SEQ ID NO: 2273 - protein, 978 aa, synthetic construct
QEIKRINKIRRRLVKDSNTKKAGKTGPMKTLLVPVMTPDLRERLENLRKKPENIPQPISNTSRANLNKLLTDYTEMKKAILHVYWEEFQKDPVGLMSRVAQPASKKIDQNKLKPEMDEKGNLTTAGFACSQCGQPLFVYKLEQVSEKGKAYTNYFGRCNVAEHEKLILLAQLKPEKDSDEAVTYSLGKFGQRALDFYSIHVTKESTHPVKPLAQIAGNRYASGPVGKALSDACMGTIASFLSKYQDIIIEHQKVVKGNQKRLESLRELAGKENLEYPSVTLPPQPHTKEGVDAYNEVIARVRMWVNLNLWQKLKLSRDDAKPLLRLKGFPSFPLVERQANEVDWWDMVCNVKKLINEKKEDGKVFWQNLAGYKRQEALRPYLSSEEDRKKGKKFARYQLGDLLLHLEKKHGEDWGKVYDEAWERIDKKVEGLSKHIKLEEERRSEDAQSKAALTDWLRAKASFVIEGLKEADKDEFCRCELKLQKWYGDLRGKPFAIEAENSILDISGFSKQYNCAFIWQKDGVKKLNLYLIINYFKGGKLRFKKIKPEAFEANRFYTVINKKSGEIVPMEVNFNFDDPNLIILPLAFGKRQGREFIWNDLLSLETGSLKLANGRVIEKTLYNRRTRQDEPALFVALTFERREVLDSSNIKPMNLIGVDRGENIPAVIALTDPEGCPLSRFKDSLGNPTHILRIGESYKEKQRTIQAKKEVEQRRAGGYSRKYASKAKNLADDMVRNTARDLLYYAVTQDAMLIFENLSRGFGRQGKRTFMAERQYTRMEDWLTAKLAYEGLPSKTYLSKTLAQYTSKTCSNCGFTITSADYDRVLEKLKKTATGWMTTINGKELKVEGQITYYNRYKRQNVVKDLSVELDRLSEESVNNDISSWDKGRSGEALSLLKKRFSHRPVQEKFVCLNCGFETHADEQAALNIARSWLFLRSQEYKKYQTNKTTGNTDKRAFVETWQSFYRKKLKEVWKPAV

SEQ ID NO: 2274 - protein, 978 aa, synthetic construct
QEIKRINKIRRRLVKDSNTKKAGKTGPMKTLLVPVMTPDLRERLENLRKKPENIPQPISNTSRANLNKLLTDYTEMKKAILHVYWEEFQKDPVGLMSRVAQPASKKIDQNKLKPEMDEKGNLTTAGFACSQCGQPLFVYKLEQVSEKGKAYTNYFGRCNVAEHEKLILLAQLKPEKDSDEAVTYSLGKFGQRALDFYSIHVTKESTHPVKPLAQIAGNRYASGPVGKALSDACMGTIASFLSKYQDIIIEHQKVVKGNQKRLESLRELAGKENLEYPSVTLPPQPHTKEGVDAYNEVIARVRMWVNLNLWQKLKLSRDDAKPLLRLKGFPSFPLVERQANEVDWWDMVCNVKKLINEKKEDGKVFWQNLAGYKRQEALRPYLSSEEDRKKGKKFARYQLGDLLLHLEKKHGEDWGKVYDEAWERIDKKVEGLSKHIKLEEERRSEDAQSKAALTDWLRAKASFVIEGLKEADKDEFCRCELKLQKWYGDLRGKPFAIEAENSILDISGFSKQYNCAFIWQKDGVKKLNLYLIINYFKGGKLRFKKIKPEAFEANRFYTVINKKSGEIVPMEVNFNFDDPNLIILPLAFGKRQGREFIWNDLLSLETGSLKLANGRVIEKTLYNRRTRQDEPALFVALTFERREVLDSSNIKPMNLIGVDRGENIPAVIALTDPEGCPLSRFKDSLGNPTHILRIGESYKEKQRTIQAKKEVEQRRAGGYSRKYASKAKNLADDMVRNTARDLLYYAVTQDAMLIFENLSRGFGRQGKRTFMAERQYTRMEDWLTAKLAYEGLPSKTYLSKTLAQYTSKTCSNCGFTITSADYDRVLEKLKKTATGWMTTINGKELKVEGQITYYNRYKRQNVVKDLSVELDRLSEESVNNDISSWTKGRQGEALSLLKKRFSHRPVQEKFVCLNCGFETHADEQAALNIARSWLFLRSQEYKKYQTNKTTGNTDKRAFVETWQSFYRKKLKEVWKPAV

SEQ ID NO: 2275 - protein, 978 aa, synthetic construct
QEIKRINKIRRRLVKDSNTKKAGKTGPMKTLLVRVMTPDLRERLENLRKKPENIPQPISNTSRANLNKLLTDYTEMKKAILHVYWEEFQKDPVGLMSRVAQPASKKIDQNKLKPEMDEKGNLTTAGFACSQCGQPLFVYKLEQVSEKGKAYTNYFGRCNVAEHEKLILLAQLKPEKDSDEAVTYSLGKFGQRALDFYSIHVTKESTHPVKPLAQIAGNRYASGPVGKALSDACMGTIASFLSKYQDIIIEHQKVVKGNQKRLESLRELAGKENLEYPSVTLPPQPHTKEGVDAYNEVIARVRMWVNLNLWQKLKLSRDDAKPLLRLKGFPSFPLVERQANEVDWWDMVCNVKKLINEKKEDGKVFWQNLAGYKRQEALRPYLSSEEDRKKGKKFARYQLGDLLLHLEKKHGEDWGKVYDEAWERIDKKVEGLSKHIKLEEERRSEDAQSKAALTDWLRAKASFVIEGLKEADKDEFCRCELKLQKWYGDLRGKPFAIEAENSILDISGFSKQYNCAFIWQKDGVKKLNLYLIINYFKGGKLRFKKIKPEAFEANRFYTVINKKSGEIVPMEVNFNFDDPNLIILPLAFGKRQGREFIWNDLLSLETGSLKLANGRVIEKTLYNRRTRQDEPALFVALTFERREVLDSSNIKPMNLIGVDRGENIPAVIALTDPEGCPLSRFKDSLGNPTHILRIGESYKEKQRTIQAKKEVEQRRAGGYSRKYASKAKNLADDMVRNTARDLLYYAVTQDAMLIFENLSRGFGRQGKRTFMAERQYTRMEDWLTAKLAYEGLPSKTYLSKTLAQYTSKTCSNCGFTITSADYDRVLEKLKKTATGWMTTINGKELKVEGQITYYNRYKRQNVVKDLSVELDRLSEESVNNDISSWDKGRQGEALSLLKKRFSHRPVQEKFVCLNCGFETHADEQAALNIARSWLFLRSQEYKKYQTNKTTGNTDKRAFVETWQSFYRKKLKEVWKPAV

SEQ ID NO: 2276 - protein, 978 aa, synthetic construct
QEIKRINKIRRRLVKDSNTKKAGKTGPMKTLLVRVMTPDLRERLENLRKKPENIPQPISNTSQANLNKLLTDYTEMKKAILHVYWEEFQKDPVGLMSRVAQPASKKIDQNKLKPEMDEKGNLTTAGFACSQCGQPLFVYKLEQVSEKGKAYTNYFGRCNVAEHEKLIKLAQLKPEKDSDEAVTYSLGKFGQRALDFYSIHVTKESTHPVKPLAQIAGNRYASGPVGKALSDACMGTIASFLSKYQDIIIEHQKVVKGNQKRLESLRELAGKENLEYPSVTLPPQPHTKEGVDAYNEVIARVRMWVNLNLWQKLKLSRDDAKPLLRLKGFPSFPLVERQANEVDWWDMVCNVKKLINEKKEDGKVFWQNLAGYKRQEALRPYLSSEEDRKKGKKFARYQLGDLLLHLEKKHGEDWGKVYDEAWERIDKKVEGLSKHIKLEEERRSEDAQSKAALTDWLRAKASFVIEGLKEADKDEFCRCELKLQKWYGDLRGKPFAIEAENSILDISGFSKQYNCAFIWQKDGVKKLNLYLIINYFKGGKLRFKKIKPEAFEANRFYTVINKKSGEIVPMEVNFNFDDPNLIILPLAFGKRQGREFIWNDLLSLETGSLKLANGRVIEKTLYNRRTRQDEPALFVALTFERREVLDSSNIKPMNLIGVDRGENIPAVIALTDPEGCPLSRFKDSLGNPTHILRIGESYKEKQRTIQAKKEVEQRRAGGYSRKYASKAKNLADDMVRNTARDLLYYAVTQDAMLIFENLSRGFGRQGKRTFMAERQYTRMEDWLTAKLAYEGLPSKTYLSKTLAQYTSKTCSNCGFTITSADYDRVLEKLKKTATGWMTTINGKELKVEGQITYYNRYKRQNVVKDLSVELDRLSEESVNNDISSWTKGRSGEALSLLKKRFSHRPVQEKFVCLNCGFETHADEQAALNIARSWLFLRSQEYKKYQTNKTTGNTDKRAFVETWQSFYRKKLKEVWKPAV

SEQ ID NO: 2277 - protein, 978 aa, synthetic construct
QEIKRINKIRRRLVKDSNTKKAGKTGPMKTLLVRVMTPDLRERLENLRKKPENIPQPISNTSQANLNKLLTDYTEMKKAILHVYWEEFQKDPVGLMSRVAQPASKKIDQNKLKPEMDEKGNLTTAGFACSQCGQPLFVYKLEQVSEKGKAYTNYFGRCNVAEHEKLIQLAQLKPEKDSDEAVTYSLGKFGQRALDFYSIHVTKESTHPVKPLAQIAGNRYASGPVGKALSDACMGTIASFLSKYQDIIIEHQKVVKGNQKRLESLRELAGKENLEYPSVTLPPQPHTKEGVDAYNEVIARVRMWVNLNLWQKLKLSRDDAKPLLRLKGFPSFPLVERQANEVDWWDMVCNVKKLINEKKEDGKVFWQNLAGYKRQEALRPYLSSEEDRKKGKKFARYQLGDLLLHLEKKHGEDWGKVYDEAWERIDKKVEGLSKHIKLEEERRSEDAQSKAALTDWLRAKASFVIEGLKEADKDEFCRCELKLQKWYGDLRGKPFAIEAENSILDISGFSKQYNCAFIWQKDGVKKLNLYLIINYFKGGKLRFKKIKPEAFEANRFYTVINKKSGEIVPMEVNFNFDDPNLIILPLAFGKRQGREFIWNDLLSLETGSLKLANGRVIEKTLYNRRTRQDEPALFVALTFERREVLDSSNIKPMNLIGVDRGENIPAVIALTDPEGCPLSRFKDSLGNPTHILRIGESYKEKQRTIQAKKEVEQRRAGGYSRKYASKAKNLADDMVRNTARDLLYYAVTQDAMLIFENLSRGFGRQGKRTFMAERQYTRMEDWLTAKLAYEGLPSKTYLSKTLAQYTSKTCSNCGFTITSADYDRVLEKLKKTATGWMTTINGKELKVEGQITYYNRYKRQNVVKDLSVELDRLSEESVNNDISSWTKGRSGEALSLLKKRFSHRPVQEKFVCLNCGFETHADEQAALNIARSWLFLRSQEYKKYQTNKTTGNTDKRAFVETWQSFYRKKLKEVWKPAV

SEQ ID NO: 2278 - protein, 978 aa, synthetic construct
QEIKRINKIRRRLVKDSNTKKAGKTGPMKTLLVRVMTPDLRERLENLRKKPENIPQPISNTSQANLNKLLTDYTEMKKAILHVYWEEFQKDPVGLMSRVAQPASKKIDQNKLKPEMDEKGNLTTAGFACSQCGQPLFVYKLEQVSEKGKAYTNYFGRCNVAEHEKLILLDQLKPEKDSDEAVTYSLGKFGQRALDFYSIHVTKESTHPVKPLAQIAGNRYASGPVGKALSDACMGTIASFLSKYQDIIIEHQKVVKGNQKRLESLRELAGKENLEYPSVTLPPQPHTKEGVDAYNEVIARVRMWVNLNLWQKLKLSRDDAKPLLRLKGFPSFPLVERQANEVDWWDMVCNVKKLINEKKEDGKVFWQNLAGYKRQEALRPYLSSEEDRKKGKKFARYQLGDLLLHLEKKHGEDWGKVYDEAWERIDKKVEGLSKHIKLEEERRSEDAQSKAALTDWLRAKASFVIEGLKEADKDEFCRCELKLQKWYGDLRGKPFAIEAENSILDISGFSKQYNCAFIWQKDGVKKLNLYLIINYFKGGKLRFKKIKPEAFEANRFYTVINKKSGEIVPMEVNFNFDDPNLIILPLAFGKRQGREFIWNDLLSLETGSLKLANGRVIEKTLYNRRTRQDEPALFVALTFERREVLDSSNIKPMNLIGVDRGENIPAVIALTDPEGCPLSRFKDSLGNPTHILRIGESYKEKQRTIQAKKEVEQRRAGGYSRKYASKAKNLADDMVRNTARDLLYYAVTQDAMLIFENLSRGFGRQGKRTFMAERQYTRMEDWLTAKLAYEGLPSKTYLSKTLAQYTSKTCSNCGFTITSADYDRVLEKLKKTATGWMTTINGKELKVEGQITYYNRYKRQNVVKDLSVELDRLSEESVNNDISSWTKGRSGEALSLLKKRFSHRPVQEKFVCLNCGFETHADEQAALNIARSWLFLRSQEYKKYQTNKTTGNTDKRAFVETWQSFYRKKLKEVWKPAV

SEQ ID NO: 2279 - protein, 978 aa, synthetic construct
QEIKRINKIRRRLVKDSNTKKAGKTGPMKTLLVRVMTPDLRERLENLRKKPENIPQPISNTSQANLNKLLTDYTEMKKAILHVYWEEFQKDPVGLMSRVAQPASKKIDQNKLKPEMDEKGNLTTAGFACSQCGQPLFVYKLEQVSEKGKAYTNYFGRCNVAEHEKLILLYQLKPEKDSDEAVTYSLGKFGQRALDFYSIHVTKESTHPVKPLAQIAGNRYASGPVGKALSDACMGTIASFLSKYQDIIIEHQKVVKGNQKRLESLRELAGKENLEYPSVTLPPQPHTKEGVDAYNEVIARVRMWVNLNLWQKLKLSRDDAKPLLRLKGFPSFPLVERQANEVDWWDMVCNVKKLINEKKEDGKVFWQNLAGYKRQEALRPYLSSEEDRKKGKKFARYQLGDLLLHLEKKHGEDWGKVYDEAWERIDKKVEGLSKHIKLEEERRSEDAQSKAALTDWLRAKASFVIEGLKEADKDEFCRCELKLQKWYGDLRGKPFAIEAENSILDISGFSKQYNCAFIWQKDGVKKLNLYLIINYFKGGKLRFKKIKPEAFEANRFYTVINKKSGEIVPMEVNFNFDDPNLIILPLAFGKRQGREFIWNDLLSLETGSLKLANGRVIEKTLYNRRTRQDEPALFVALTFERREVLDSSNIKPMNLIGVDRGENIPAVIALTDPEGCPLSRFKDSLGNPTHILRIGESYKEKQRTIQAKKEVEQRRAGGYSRKYASKAKNLADDMVRNTARDLLYYAVTQDAMLIFENLSRGFGRQGKRTFMAERQYTRMEDWLTAKLAYEGLPSKTYLSKTLAQYTSKTCSNCGFTITSADYDRVLEKLKKTATGWMTTINGKELKVEGQITYYNRYKRQNVVKDLSVELDRLSEESVNNDISSWTKGRSGEALSLLKKRFSHRPVQEKFVCLNCGFETHADEQAALNIARSWLFLRSQEYKKYQTNKTTGNTDKRAFVETWQSFYRKKLKEVWKPAV

SEQ ID NO: 2280 - protein, 978 aa, synthetic construct
QEIKRINKIRRRLVKDSNTKKAGKTGPMKTLLVRVMTPDLRERLENLRKKPENIPQPISNTSQANLNKLLTDYTEMKKAILHVYWEEFQKDPVGLMSRVAQPASKKIDQNKLKPEMDEKGNLTTAGFACSQCGQPLFVYKLEQVSEKGKAYTNYFGRCNVAEHEKLILLSQLKPEKDSDEAVTYSLGKFGQRALDFYSIHVTKESTHPVKPLAQIAGNRYASGPVGKALSDACMGTIASFLSKYQDIIIEHQKVVKGNQKRLESLRELAGKENLEYPSVTLPPQPHTKEGVDAYNEVIARVRMWVNLNLWQKLKLSRDDAKPLLRLKGFPSFPLVERQANEVDWWDMVCNVKKLINEKKEDGKVFWQNLAGYKRQEALRPYLSSEEDRKKGKKFARYQLGDLLLHLEKKHGEDWGKVYDEAWERIDKKVEGLSKHIKLEEERRSEDAQSKAALTDWLRAKASFVIEGLKEADKDEFCRCELKLQKWYGDLRGKPFAIEAENSILDISGFSKQYNCAFIWQKDGVKKLNLYLIINYFKGGKLRFKKIKPEAFEANRFYTVINKKSGEIVPMEVNFNFDDPNLIILPLAFGKRQGREFIWNDLLSLETGSLKLANGRVIEKTLYNRRTRQDEPALFVALTFERREVLDSSNIKPMNLIGVDRGENIPAVIALTDPEGCPLSRFKDSLGNPTHILRIGESYKEKQRTIQAKKEVEQRRAGGYSRKYASKAKNLADDMVRNTARDLLYYAVTQDAMLIFENLSRGFGRQGKRTFMAERQYTRMEDWLTAKLAYEGLPSKTYLSKTLAQYTSKTCSNCGFTITSADYDRVLEKLKKTATGWMTTINGKELKVEGQITYYNRYKRQNVVKDLSVELDRLSEESVNNDISSWTKGRSGEALSLLKKRFSHRPVQEKFVCLNCGFETHADEQAALNIARSWLFLRSQEYKKYQTNKTTGNTDKRAFVETWQSFYRKKLKEVWKPAV

SEQ ID NO: 2281 - protein, 978 aa, synthetic construct
QEIKRINKIRRRLVKDSNTKKAGKTGPMKTLLVRVMTPDLRERLENLRKKPENIPQPISNTSQANLNKLLTDYTEMKKAILHVYWEEFQKDPVGLMSRVAQPASKKIDQNKLKPEMDEKGNLTTAGFACSQCGQPLFVYKLEQVSEKGKAYTNYFGRCNVAEHEKLILLAQLKPEKDSDEAVTYSLGKFGQRALDFYSIHVTKESTHPVKPLAQIAGNRYASTPVGKALSDACMGTIASFLSKYQDIIIEHQKVVKGNQKRLESLRELAGKENLEYPSVTLPPQPHTKEGVDAYNEVIARVRMWVNLNLWQKLKLSRDDAKPLLRLKGFPSFPLVERQANEVDWWDMVCNVKKLINEKKEDGKVFWQNLAGYKRQEALRPYLSSEEDRKKGKKFARYQLGDLLLHLEKKHGEDWGKVYDEAWERIDKKVEGLSKHIKLEEERRSEDAQSKAALTDWLRAKASFVIEGLKEADKDEFCRCELKLQKWYGDLRGKPFAIEAENSILDISGFSKQYNCAFIWQKDGVKKLNLYLIINYFKGGKLRFKKIKPEAFEANRFYTVINKKSGEIVPMEVNFNFDDPNLIILPLAFGKRQGREFIWNDLLSLETGSLKLANGRVIEKTLYNRRTRQDEPALFVALTFERREVLDSSNIKPMNLIGVDRGENIPAVIALTDPEGCPLSRFKDSLGNPTHILRIGESYKEKQRTIQAKKEVEQRRAGGYSRKYASKAKNLADDMVRNTARDLLYYAVTQDAMLIFENLSRGFGRQGKRTFMAERQYTRMEDWLTAKLAYEGLPSKTYLSKTLAQYTSKTCSNCGFTITSADYDRVLEKLKKTATGWMTTINGKELKVEGQITYYNRYKRQNVVKDLSVELDRLSEESVNNDISSWTKGRSGEALSLLKKRFSHRPVQEKFVCLNCGFETHADEQAALNIARSWLFLRSQEYKKYQTNKTTGNTDKRAFVETWQSFYRKKLKEVWKPAV

SEQ ID NO: 2282 - protein, 978 aa, synthetic construct
QEIKRINKIRRRLVKDSNTKKAGKTGPMKTLLVRVMTPDLRERLENLRKKPENIPQPISNTSQANLNKLLTDYTEMKKAILHVYWEEFQKDPVGLMSRVAQPASKKIDQNKLKPEMDEKGNLTTAGFACSQCGQPLFVYKLEQVSEKGKAYTNYFGRCNVAEHEKLILLAQLKPEKDSDEAVTYSLGKFGQRALDFYSIHVTKESTHPVKPLAQIAGNRYASGPVGKALSDACMGTIASFLSKYQDIIIEHQKVVKGNQKRLESLRELAGKENLEYPSVTLPPQPHTKEGVDAYNEVIARVRTWVNLNLWQKLKLSRDDAKPLLRLKGFPSFPLVERQANEVDWWDMVCNVKKLINEKKEDGKVFWQNLAGYKRQEALRPYLSSEEDRKKGKKFARYQLGDLLLHLEKKHGEDWGKVYDEAWERIDKKVEGLSKHIKLEEERRSEDAQSKAALTDWLRAKASFVIEGLKEADKDEFCRCELKLQKWYGDLRGKPFAIEAENSILDISGFSKQYNCAFIWQKDGVKKLNLYLIINYFKGGKLRFKKIKPEAFEANRFYTVINKKSGEIVPMEVNFNFDDPNLIILPLAFGKRQGREFIWNDLLSLETGSLKLANGRVIEKTLYNRRTRQDEPALFVALTFERREVLDSSNIKPMNLIGVDRGENIPAVIALTDPEGCPLSRFKDSLGNPTHILRIGESYKEKQRTIQAKKEVEQRRAGGYSRKYASKAKNLADDMVRNTARDLLYYAVTQDAMLIFENLSRGFGRQGKRTFMAERQYTRMEDWLTAKLAYEGLPSKTYLSKTLAQYTSKTCSNCGFTITSADYDRVLEKLKKTATGWMTTINGKELKVEGQITYYNRYKRQNVVKDLSVELDRLSEESVNNDISSWTKGRSGEALSLLKKRFSHRPVQEKFVCLNCGFETHADEQAALNIARSWLFLRSQEYKKYQTNKTTGNTDKRAFVETWQSFYRKKLKEVWKPAV

SEQ ID NO: 2283 - protein, 978 aa, synthetic construct
QEIKRINKIRRRLVKDSNTKKAGKTGPMKTLLVRVMTPDLRERLENLRKKPENIPQPISNTSQANLNKLLTDYTEMKKAILHVYWEEFQKDPVGLMSRVAQPASKKIDQNKLKPEMDEKGNLTTAGFACSQCGQPLFVYKLEQVSEKGKAYTNYFGRCNVAEHEKLILLAQLKPEKDSDEAVTYSLGKFGQRALDFYSIHVTKESTHPVKPLAQIAGNRYASGPVGKALSDACMGTIASFLSKYQDIIIEHQKVVKGNQKRLESLRELAGKENLEYPSVTLPPQPHTKEGVDAYNEVIARVRMWVNLNLWQKLKLSRDDAKPLLRLKGFPSFPLVERQANEVDWWDMVCNVKKLINEKKEDGKVFWQNLAGYKRQEALRPYLSSEEDRKKGKKFARTQLGDLLLHLEKKHGEDWGKVYDEAWERIDKKVEGLSKHIKLEEERRSEDAQSKAALTDWLRAKASFVIEGLKEADKDEFCRCELKLQKWYGDLRGKPFAIEAENSILDISGFSKQYNCAFIWQKDGVKKLNLYLIINYFKGGKLRFKKIKPEAFEANRFYTVINKKSGEIVPMEVNFNFDDPNLIILPLAFGKRQGREFIWNDLLSLETGSLKLANGRVIEKTLYNRRTRQDEPALFVALTFERREVLDSSNIKPMNLIGVDRGENIPAVIALTDPEGCPLSRFKDSLGNPTHILRIGESYKEKQRTIQAKKEVEQRRAGGYSRKYASKAKNLADDMVRNTARDLLYYAVTQDAMLIFENLSRGFGRQGKRTFMAERQYTRMEDWLTAKLAYEGLPSKTYLSKTLAQYTSKTCSNCGFTITSADYDRVLEKLKKTATGWMTTINGKELKVEGQITYYNRYKRQNVVKDLSVELDRLSEESVNNDISSWTKGRSGEALSLLKKRFSHRPVQEKFVCLNCGFETHADEQAALNIARSWLFLRSQEYKKYQTNKTTGNTDKRAFVETWQSFYRKKLKEVWKPAV

SEQ ID NO: 2284 - protein, 978 aa, synthetic construct
QEIKRINKIRRRLVKDSNTKKAGKTGPMKTLLVRVMTPDLRERLENLRKKPENIPQPISNTSQANLNKLLTDYTEMKKAILHVYWEEFQKDPVGLMSRVAQPASKKIDQNKLKPEMDEKGNLTTAGFACSQCGQPLFVYKLEQVSEKGKAYTNYFGRCNVAEHEKLILLAQLKPEKDSDEAVTYSLGKFGQRALDFYSIHVTKESTHPVKPLAQIAGNRYASGPVGKALSDACMGTIASFLSKYQDIIIEHQKVVKGNQKRLESLRELAGKENLEYPSVTLPPQPHTKEGVDAYNEVIARVRMWVNLNLWQKLKLSRDDAKPLLRLKGFPSFPLVERQANEVDWWDMVCNVKKLINEKKEDGKVFWQNLAGYKRQEALRPYLSSEEDRKKGKKFARYQLGDLLLHLEKKHGEDWGKVYDEAWERIDKKVEGLSKHIKLEEERRSEDAQSKAALTDWLRAKASFVIEGLKEADKDEFCRCELKLQKWYGDLRGKPFAIEAENSILDISGFSKQYNCAFIWQKDGVKKLNLYLIINYFKGGKLRFKKIKPEAFEANRFYTVINKKSGEIVPMEVNFNFDDPNLIILPLAFGKRQGREFIWNDLLSLETGSLKLANGRVIEKTLYNRRTRQDEPALFVALTFERREVLDSSNIKPMNLIGVDRGENIPAVIALTDPEGCPLSRFKDSLGNPTHILRIGESYKEKQRTIQAKKEVEQRRAGGYSRKYASKAKNLADDMVRNTARDLLYYAVTQDAMLIFENLSRGFGRQGKRTFMAERQYTRMEDWLTAKLAYEGLPSKTYLSKTLAQYTSKTCSNCGFTITSADYDRMLEKLKKTATGWMTTINGKELKVEGQITYYNRYKRQNVVKDLSVELDRLSEESVNNDISSWTKGRSGEALSLLKKRFSHRPVQEKFVCLNCGFETHADEQAALNIARSWLFLRSQEYKKYQTNKTTGNTDKRAFVETWQSFYRKKLKEVWKPAV

SEQ ID NO: 2285 - protein, 978 aa, synthetic construct
QEIKRINKIRRRLVKDSNTKKAGKTGPMKTLLVRVMTPDLRERLENLRKKPENIPQPISNTSQANLNKLLTDYTEMKKAILHVYWEEFQKDPVGLMSRVAQPASKKIDQNKLKPEMDEKGNLTTAGFACSQCGQPLFVYKLEQVSEKGKAYTNYFGRCNVAEHEKLILLAQLKPEKDSDEAVTYSLGKFGQRALDFYSIHVTKESTHPVKPLAQIAGNRYASGPVGKALSDACMGTIASFLSKYQDIIIEHQKVVKGNQKRLESLRELAGKENLEYPSVTLPPQPHTKEGVDAYNEVIARVRMWVNLNLWQKLKLSRDDAKPLLRLKGFPSFPLVERQANEVDWWDMVCNVKKLINEKKEDGKVFWQNLAGYKRQEALRPYLSSEEDRKKGKKFARYQLGDLLLHLEKKHGEDWGKVYDEAWERIDKKVEGLSKHIKLEEERRSEDAQSKAALTDWLRAKASFVIEGLKEADKDEFCRCELKLQKWYGDLRGKPFAIEAENSILDISGFSKQYNCAFIWQKDGVKKLNLYLIINYFKGGKLRFKKIKPEAFEANRFYTVINKKSGEIVPMEVNFNFDDPNLIILPLAFGKRQGREFIWNDLLSLETGSLKLANGRVIEKTLYNRRTRQDEPALFVALTFERREVLDSSNIKPMNLIGVDRGENIPAVIALTDPEGCPLSRFKDSLGNPTHILRIGESYKEKQRTIQAKKEVEQRRAGGYSRKYASKAKNLADDMVRNTARDLLYYAVTQDAMLIFENLSRGFGRQGKRTFMAERQYTRMEDWLTAKLAYEGLPSKTYLSKTLAQYTSKTCSNCGFTITSADYDRVLEKLKKTATGWMTTINGKELKVEGQITYYNRYKRQNVVKDLSVELDRLSEESVNNDISSWDKGRSGEALSLLKKRFSHRPVQEKFVCLNCGFETHADEQAALNIARSWLFLRSQEYKKYQTNKTTGNTDKRAFVETWQSFYRKKLKEVWKPAV

SEQ ID NO: 2286 - protein, 978 aa, synthetic construct
QEIKRINKIRRRLVKDSNTKKAGKTGPMKTLLVRVMTPDLRERLENLRKKPENIPQPISNTSQANLNKLLTDYTEMKKAILHVYWEEFQKDPVGLMSRVAQPASKKIDQNKLKPEMDEKGNLTTAGFACSQCGQPLFVYKLEQVSEKGKAYTNYFGRCNVAEHEKLILLAQLKPEKDSDEAVTYSLGKFGQRALDFYSIHVTKESTHPVKPLAQIAGNRYASGPVGKALSDACMGTIASFLSKYQDIIIEHQKVVKGNQKRLESLRELAGKENLEYPSVTLPPQPHTKEGVDAYNEVIARVRMWVNLNLWQKLKLSRDDAKPLLRLKGFPSFPLVERQANEVDWWDMVCNVKKLINEKKEDGKVFWQNLAGYKRQEALRPYLSSEEDRKKGKKFARYQLGDLLLHLEKKHGEDWGKVYDEAWERIDKKVEGLSKHIKLEEERRSEDAQSKAALTDWLRAKASFVIEGLKEADKDEFCRCELKLQKWYGDLRGKPFAIEAENSILDISGFSKQYNCAFIWQKDGVKKLNLYLIINYFKGGKLRFKKIKPEAFEANRFYTVINKKSGEIVPMEVNFNFDDPNLIILPLAFGKRQGREFIWNDLLSLETGSLKLANGRVIEKTLYNRRTRQDEPALFVALTFERREVLDSSNIKPMNLIGVDRGENIPAVIALTDPEGCPLSRFKDSLGNPTHILRIGESYKEKQRTIQAKKEVEQRRAGGYSRKYASKAKNLADDMVRNTARDLLYYAVTQDAMLIFENLSRGFGRQGKRTFMAERQYTRMEDWLTAKLAYEGLPSKTYLSKTLAQYTSKTCSNCGFTITSADYDRVLEKLKKTATGWMTTINGKELKVEGQITYYNRYKRQNVVKDLSVELDRLSEESVNNDISSWTKGRQGEALSLLKKRFSHRPVQEKFVCLNCGFETHADEQAALNIARSWLFLRSQEYKKYQTNKTTGNTDKRAFVETWQSFYRKKLKEVWKPAV

SEQ ID NO: 2287 - protein, 978 aa, synthetic construct
QEIKRINKIRRRLVKDSNTKKAGKTGPMKTLLVRVMTPDLRERLENLRKKPENIPQPISNTSRANLNKLLTDYTEMKKAILHVYWEEFQKDPVGLMSRVAQPASKKIDQNKLKPEMDEKGNLTTAGFACSQCGQPLFVYKLEQVSEKGKAYTNYFGRCNVAEHEKLIKLDQLKPEKDSDEAVTYSLGKFGQRALDFYSIHVTKESTHPVKPLAQIAGNRYASGPVGKALSDACMGTIASFLSKYQDIIIEHQKVVKGNQKRLESLRELAGKENLEYPSVTLPPQPHTKEGVDAYNEVIARVRMWVNLNLWQKLKLSRDDAKPLLRLKGFPSFPLVERQANEVDWWDMVCNVKKLINEKKEDGKVFWQNLAGYKRQEALRPYLSSEEDRKKGKKFARYQLGDLLLHLEKKHGEDWGKVYDEAWERIDKKVEGLSKHIKLEEERRSEDAQSKAALTDWLRAKASFVIEGLKEADKDEFCRCELKLQKWYGDLRGKPFAIEAENSILDISGFSKQYNCAFIWQKDGVKKLNLYLIINYFKGGKLRFKKIKPEAFEANRFYTVINKKSGEIVPMEVNFNFDDPNLIILPLAFGKRQGREFIWNDLLSLETGSLKLANGRVIEKTLYNRRTRQDEPALFVALTFERREVLDSSNIKPMNLIGVDRGENIPAVIALTDPEGCPLSRFKDSLGNPTHILRIGESYKEKQRTIQAKKEVEQRRAGGYSRKYASKAKNLADDMVRNTARDLLYYAVTQDAMLIFENLSRGFGRQGKRTFMAERQYTRMEDWLTAKLAYEGLPSKTYLSKTLAQYTSKTCSNCGFTITSADYDRVLEKLKKTATGWMTTINGKELKVEGQITYYNRYKRQNVVKDLSVELDRLSEESVNNDISSWTKGRSGEALSLLKKRFSHRPVQEKFVCLNCGFETHADEQAALNIARSWLFLRSQEYKKYQTNKTTGNTDKRAFVETWQSFYRKKLKEVWKPAV

SEQ ID NO: 2288 - protein, 978 aa, synthetic construct
QEIKRINKIRRRLVKDSNTKKAGKTGPMKTLLVRVMTPDLRERLENLRKKPENIPQPISNTSRANLNKLLTDYTEMKKAILHVYWEEFQKDPVGLMSRVAQPASKKIDQNKLKPEMDEKGNLTTAGFACSQCGQPLFVYKLEQVSEKGKAYTNYFGRCNVAEHEKLIKLYQLKPEKDSDEAVTYSLGKFGQRALDFYSIHVTKESTHPVKPLAQIAGNRYASGPVGKALSDACMGTIASFLSKYQDIIIEHQKVVKGNQKRLESLRELAGKENLEYPSVTLPPQPHTKEGVDAYNEVIARVRMWVNLNLWQKLKLSRDDAKPLLRLKGFPSFPLVERQANEVDWWDMVCNVKKLINEKKEDGKVFWQNLAGYKRQEALRPYLSSEEDRKKGKKFARYQLGDLLLHLEKKHGEDWGKVYDEAWERIDKKVEGLSKHIKLEEERRSEDAQSKAALTDWLRAKASFVIEGLKEADKDEFCRCELKLQKWYGDLRGKPFAIEAENSILDISGFSKQYNCAFIWQKDGVKKLNLYLIINYFKGGKLRFKKIKPEAFEANRFYTVINKKSGEIVPMEVNFNFDDPNLIILPLAFGKRQGREFIWNDLLSLETGSLKLANGRVIEKTLYNRRTRQDEPALFVALTFERREVLDSSNIKPMNLIGVDRGENIPAVIALTDPEGCPLSRFKDSLGNPTHILRIGESYKEKQRTIQAKKEVEQRRAGGYSRKYASKAKNLADDMVRNTARDLLYYAVTQDAMLIFENLSRGFGRQGKRTFMAERQYTRMEDWLTAKLAYEGLPSKTYLSKTLAQYTSKTCSNCGFTITSADYDRVLEKLKKTATGWMTTINGKELKVEGQITYYNRYKRQNVVKDLSVELDRLSEESVNNDISSWTKGRSGEALSLLKKRFSHRPVQEKFVCLNCGFETHADEQAALNIARSWLFLRSQEYKKYQTNKTTGNTDKRAFVETWQSFYRKKLKEVWKPAV

SEQ ID NO: 2289 - protein, 978 aa, synthetic construct
QEIKRINKIRRRLVKDSNTKKAGKTGPMKTLLVRVMTPDLRERLENLRKKPENIPQPISNTSRANLNKLLTDYTEMKKAILHVYWEEFQKDPVGLMSRVAQPASKKIDQNKLKPEMDEKGNLTTAGFACSQCGQPLFVYKLEQVSEKGKAYTNYFGRCNVAEHEKLIKLSQLKPEKDSDEAVTYSLGKFGQRALDFYSIHVTKESTHPVKPLAQIAGNRYASGPVGKALSDACMGTIASFLSKYQDIIIEHQKVVKGNQKRLESLRELAGKENLEYPSVTLPPQPHTKEGVDAYNEVIARVRMWVNLNLWQKLKLSRDDAKPLLRLKGFPSFPLVERQANEVDWWDMVCNVKKLINEKKEDGKVFWQNLAGYKRQEALRPYLSSEEDRKKGKKFARYQLGDLLLHLEKKHGEDWGKVYDEAWERIDKKVEGLSKHIKLEEERRSEDAQSKAALTDWLRAKASFVIEGLKEADKDEFCRCELKLQKWYGDLRGKPFAIEAENSILDISGFSKQYNCAFIWQKDGVKKLNLYLIINYFKGGKLRFKKIKPEAFEANRFYTVINKKSGEIVPMEVNFNFDDPNLIILPLAFGKRQGREFIWNDLLSLETGSLKLANGRVIEKTLYNRRTRQDEPALFVALTFERREVLDSSNIKPMNLIGVDRGENIPAVIALTDPEGCPLSRFKDSLGNPTHILRIGESYKEKQRTIQAKKEVEQRRAGGYSRKYASKAKNLADDMVRNTARDLLYYAVTQDAMLIFENLSRGFGRQGKRTFMAERQYTRMEDWLTAKLAYEGLPSKTYLSKTLAQYTSKTCSNCGFTITSADYDRVLEKLKKTATGWMTTINGKELKVEGQITYYNRYKRQNVVKDLSVELDRLSEESVNNDISSWTKGRSGEALSLLKKRFSHRPVQEKFVCLNCGFETHADEQAALNIARSWLFLRSQEYKKYQTNKTTGNTDKRAFVETWQSFYRKKLKEVWKPAV

SEQ ID NO: 2290 - protein, 978 aa, synthetic construct
QEIKRINKIRRRLVKDSNTKKAGKTGPMKTLLVRVMTPDLRERLENLRKKPENIPQPISNTSRANLNKLLTDYTEMKKAILHVYWEEFQKDPVGLMSRVAQPASKKIDQNKLKPEMDEKGNLTTAGFACSQCGQPLFVYKLEQVSEKGKAYTNYFGRCNVAEHEKLIKLAQLKPEKDSDEAVTYSLGKFGQRALDFYSIHVTKESTHPVKPLAQIAGNRYASTPVGKALSDACMGTIASFLSKYQDIIIEHQKVVKGNQKRLESLRELAGKENLEYPSVTLPPQPHTKEGVDAYNEVIARVRMWVNLNLWQKLKLSRDDAKPLLRLKGFPSFPLVERQANEVDWWDMVCNVKKLINEKKEDGKVFWQNLAGYKRQEALRPYLSSEEDRKKGKKFARYQLGDLLLHLEKKHGEDWGKVYDEAWERIDKKVEGLSKHIKLEEERRSEDAQSKAALTDWLRAKASFVIEGLKEADKDEFCRCELKLQKWYGDLRGKPFAIEAENSILDISGFSKQYNCAFIWQKDGVKKLNLYLIINYFKGGKLRFKKIKPEAFEANRFYTVINKKSGEIVPMEVNFNFDDPNLIILPLAFGKRQGREFIWNDLLSLETGSLKLANGRVIEKTLYNRRTRQDEPALFVALTFERREVLDSSNIKPMNLIGVDRGENIPAVIALTDPEGCPLSRFKDSLGNPTHILRIGESYKEKQRTIQAKKEVEQRRAGGYSRKYASKAKNLADDMVRNTARDLLYYAVTQDAMLIFENLSRGFGRQGKRTFMAERQYTRMEDWLTAKLAYEGLPSKTYLSKTLAQYTSKTCSNCGFTITSADYDRVLEKLKKTATGWMTTINGKELKVEGQITYYNRYKRQNVVKDLSVELDRLSEESVNNDISSWTKGRSGEALSLLKKRFSHRPVQEKFVCLNCGFETHADEQAALNIARSWLFLRSQEYKKYQTNKTTGNTDKRAFVETWQSFYRKKLKEVWKPAV

SEQ ID NO: 2291 - protein, 978 aa, synthetic construct
QEIKRINKIRRRLVKDSNTKKAGKTGPMKTLLVRVMTPDLRERLENLRKKPENIPQPISNTSRANLNKLLTDYTEMKKAILHVYWEEFQKDPVGLMSRVAQPASKKIDQNKLKPEMDEKGNLTTAGFACSQCGQPLFVYKLEQVSEKGKAYTNYFGRCNVAEHEKLIKLAQLKPEKDSDEAVTYSLGKFGQRALDFYSIHVTKESTHPVKPLAQIAGNRYASGPVGKALSDACMGTIASFLSKYQDIIIEHQKVVKGNQKRLESLRELAGKENLEYPSVTLPPQPHTKEGVDAYNEVIARVRTWVNLNLWQKLKLSRDDAKPLLRLKGFPSFPLVERQANEVDWWDMVCNVKKLINEKKEDGKVFWQNLAGYKRQEALRPYLSSEEDRKKGKKFARYQLGDLLLHLEKKHGEDWGKVYDEAWERIDKKVEGLSKHIKLEEERRSEDAQSKAALTDWLRAKASFVIEGLKEADKDEFCRCELKLQKWYGDLRGKPFAIEAENSILDISGFSKQYNCAFIWQKDGVKKLNLYLIINYFKGGKLRFKKIKPEAFEANRFYTVINKKSGEIVPMEVNFNFDDPNLIILPLAFGKRQGREFIWNDLLSLETGSLKLANGRVIEKTLYNRRTRQDEPALFVALTFERREVLDSSNIKPMNLIGVDRGENIPAVIALTDPEGCPLSRFKDSLGNPTHILRIGESYKEKQRTIQAKKEVEQRRAGGYSRKYASKAKNLADDMVRNTARDLLYYAVTQDAMLIFENLSRGFGRQGKRTFMAERQYTRMEDWLTAKLAYEGLPSKTYLSKTLAQYTSKTCSNCGFTITSADYDRVLEKLKKTATGWMTTINGKELKVEGQITYYNRYKRQNVVKDLSVELDRLSEESVNNDISSWTKGRSGEALSLLKKRFSHRPVQEKFVCLNCGFETHADEQAALNIARSWLFLRSQEYKKYQTNKTTGNTDKRAFVETWQSFYRKKLKEVWKPAV

SEQ ID NO: 2292 - protein, 978 aa, synthetic construct
QEIKRINKIRRRLVKDSNTKKAGKTGPMKTLLVRVMTPDLRERLENLRKKPENIPQPISNTSRANLNKLLTDYTEMKKAILHVYWEEFQKDPVGLMSRVAQPASKKIDQNKLKPEMDEKGNLTTAGFACSQCGQPLFVYKLEQVSEKGKAYTNYFGRCNVAEHEKLIKLAQLKPEKDSDEAVTYSLGKFGQRALDFYSIHVTKESTHPVKPLAQIAGNRYASGPVGKALSDACMGTIASFLSKYQDIIIEHQKVVKGNQKRLESLRELAGKENLEYPSVTLPPQPHTKEGVDAYNEVIARVRMWVNLNLWQKLKLSRDDAKPLLRLKGFPSFPLVERQANEVDWWDMVCNVKKLINEKKEDGKVFWQNLAGYKRQEALRPYLSSEEDRKKGKKFARTQLGDLLLHLEKKHGEDWGKVYDEAWERIDKKVEGLSKHIKLEEERRSEDAQSKAALTDWLRAKASFVIEGLKEADKDEFCRCELKLQKWYGDLRGKPFAIEAENSILDISGFSKQYNCAFIWQKDGVKKLNLYLIINYFKGGKLRFKKIKPEAFEANRFYTVINKKSGEIVPMEVNFNFDDPNLIILPLAFGKRQGREFIWNDLLSLETGSLKLANGRVIEKTLYNRRTRQDEPALFVALTFERREVLDSSNIKPMNLIGVDRGENIPAVIALTDPEGCPLSRFKDSLGNPTHILRIGESYKEKQRTIQAKKEVEQRRAGGYSRKYASKAKNLADDMVRNTARDLLYYAVTQDAMLIFENLSRGFGRQGKRTFMAERQYTRMEDWLTAKLAYEGLPSKTYLSKTLAQYTSKTCSNCGFTITSADYDRVLEKLKKTATGWMTTINGKELKVEGQITYYNRYKRQNVVKDLSVELDRLSEESVNNDISSWTKGRSGEALSLLKKRFSHRPVQEKFVCLNCGFETHADEQAALNIARSWLFLRSQEYKKYQTNKTTGNTDKRAFVETWQSFYRKKLKEVWKPAV

SEQ ID NO: 2293 - protein, 978 aa, synthetic construct
QEIKRINKIRRRLVKDSNTKKAGKTGPMKTLLVRVMTPDLRERLENLRKKPENIPQPISNTSRANLNKLLTDYTEMKKAILHVYWEEFQKDPVGLMSRVAQPASKKIDQNKLKPEMDEKGNLTTAGFACSQCGQPLFVYKLEQVSEKGKAYTNYFGRCNVAEHEKLIKLAQLKPEKDSDEAVTYSLGKFGQRALDFYSIHVTKESTHPVKPLAQIAGNRYASGPVGKALSDACMGTIASFLSKYQDIIIEHQKVVKGNQKRLESLRELAGKENLEYPSVTLPPQPHTKEGVDAYNEVIARVRMWVNLNLWQKLKLSRDDAKPLLRLKGFPSFPLVERQANEVDWWDMVCNVKKLINEKKEDGKVFWQNLAGYKRQEALRPYLSSEEDRKKGKKFARYQLGDLLLHLEKKHGEDWGKVYDEAWERIDKKVEGLSKHIKLEEERRSEDAQSKAALTDWLRAKASFVIEGLKEADKDEFCRCELKLQKWYGDLRGKPFAIEAENSILDISGFSKQYNCAFIWQKDGVKKLNLYLIINYFKGGKLRFKKIKPEAFEANRFYTVINKKSGEIVPMEVNFNFDDPNLIILPLAFGKRQGREFIWNDLLSLETGSLKLANGRVIEKTLYNRRTRQDEPALFVALTFERREVLDSSNIKPMNLIGVDRGENIPAVIALTDPEGCPLSRFKDSLGNPTHILRIGESYKEKQRTIQAKKEVEQRRAGGYSRKYASKAKNLADDMVRNTARDLLYYAVTQDAMLIFENLSRGFGRQGKRTFMAERQYTRMEDWLTAKLAYEGLPSKTYLSKTLAQYTSKTCSNCGFTITSADYDRMLEKLKKTATGWMTTINGKELKVEGQITYYNRYKRQNVVKDLSVELDRLSEESVNNDISSWTKGRSGEALSLLKKRFSHRPVQEKFVCLNCGFETHADEQAALNIARSWLFLRSQEYKKYQTNKTTGNTDKRAFVETWQSFYRKKLKEVWKPAV

SEQ ID NO: 2294 - protein, 978 aa, synthetic construct
QEIKRINKIRRRLVKDSNTKKAGKTGPMKTLLVRVMTPDLRERLENLRKKPENIPQPISNTSRANLNKLLTDYTEMKKAILHVYWEEFQKDPVGLMSRVAQPASKKIDQNKLKPEMDEKGNLTTAGFACSQCGQPLFVYKLEQVSEKGKAYTNYFGRCNVAEHEKLIKLAQLKPEKDSDEAVTYSLGKFGQRALDFYSIHVTKESTHPVKPLAQIAGNRYASGPVGKALSDACMGTIASFLSKYQDIIIEHQKVVKGNQKRLESLRELAGKENLEYPSVTLPPQPHTKEGVDAYNEVIARVRMWVNLNLWQKLKLSRDDAKPLLRLKGFPSFPLVERQANEVDWWDMVCNVKKLINEKKEDGKVFWQNLAGYKRQEALRPYLSSEEDRKKGKKFARYQLGDLLLHLEKKHGEDWGKVYDEAWERIDKKVEGLSKHIKLEEERRSEDAQSKAALTDWLRAKASFVIEGLKEADKDEFCRCELKLQKWYGDLRGKPFAIEAENSILDISGFSKQYNCAFIWQKDGVKKLNLYLIINYFKGGKLRFKKIKPEAFEANRFYTVINKKSGEIVPMEVNFNFDDPNLIILPLAFGKRQGREFIWNDLLSLETGSLKLANGRVIEKTLYNRRTRQDEPALFVALTFERREVLDSSNIKPMNLIGVDRGENIPAVIALTDPEGCPLSRFKDSLGNPTHILRIGESYKEKQRTIQAKKEVEQRRAGGYSRKYASKAKNLADDMVRNTARDLLYYAVTQDAMLIFENLSRGFGRQGKRTFMAERQYTRMEDWLTAKLAYEGLPSKTYLSKTLAQYTSKTCSNCGFTITSADYDRVLEKLKKTATGWMTTINGKELKVEGQITYYNRYKRQNVVKDLSVELDRLSEESVNNDISSWDKGRSGEALSLLKKRFSHRPVQEKFVCLNCGFETHADEQAALNIARSWLFLRSQEYKKYQTNKTTGNTDKRAFVETWQSFYRKKLKEVWKPAV

SEQ ID NO: 2295 - protein, 978 aa, synthetic construct
QEIKRINKIRRRLVKDSNTKKAGKTGPMKTLLVRVMTPDLRERLENLRKKPENIPQPISNTSRANLNKLLTDYTEMKKAILHVYWEEFQKDPVGLMSRVAQPASKKIDQNKLKPEMDEKGNLTTAGFACSQCGQPLFVYKLEQVSEKGKAYTNYFGRCNVAEHEKLIKLAQLKPEKDSDEAVTYSLGKFGQRALDFYSIHVTKESTHPVKPLAQIAGNRYASGPVGKALSDACMGTIASFLSKYQDIIIEHQKVVKGNQKRLESLRELAGKENLEYPSVTLPPQPHTKEGVDAYNEVIARVRMWVNLNLWQKLKLSRDDAKPLLRLKGFPSFPLVERQANEVDWWDMVCNVKKLINEKKEDGKVFWQNLAGYKRQEALRPYLSSEEDRKKGKKFARYQLGDLLLHLEKKHGEDWGKVYDEAWERIDKKVEGLSKHIKLEEERRSEDAQSKAALTDWLRAKASFVIEGLKEADKDEFCRCELKLQKWYGDLRGKPFAIEAENSILDISGFSKQYNCAFIWQKDGVKKLNLYLIINYFKGGKLRFKKIKPEAFEANRFYTVINKKSGEIVPMEVNFNFDDPNLIILPLAFGKRQGREFIWNDLLSLETGSLKLANGRVIEKTLYNRRTRQDEPALFVALTFERREVLDSSNIKPMNLIGVDRGENIPAVIALTDPEGCPLSRFKDSLGNPTHILRIGESYKEKQRTIQAKKEVEQRRAGGYSRKYASKAKNLADDMVRNTARDLLYYAVTQDAMLIFENLSRGFGRQGKRTFMAERQYTRMEDWLTAKLAYEGLPSKTYLSKTLAQYTSKTCSNCGFTITSADYDRVLEKLKKTATGWMTTINGKELKVEGQITYYNRYKRQNVVKDLSVELDRLSEESVNNDISSWTKGRQGEALSLLKKRFSHRPVQEKFVCLNCGFETHADEQAALNIARSWLFLRSQEYKKYQTNKTTGNTDKRAFVETWQSFYRKKLKEVWKPAV

SEQ ID NO: 2296 - protein, 978 aa, synthetic construct
QEIKRINKIRRRLVKDSNTKKAGKTGPMKTLLVRVMTPDLRERLENLRKKPENIPQPISNTSRANLNKLLTDYTEMKKAILHVYWEEFQKDPVGLMSRVAQPASKKIDQNKLKPEMDEKGNLTTAGFACSQCGQPLFVYKLEQVSEKGKAYTNYFGRCNVAEHEKLIQLDQLKPEKDSDEAVTYSLGKFGQRALDFYSIHVTKESTHPVKPLAQIAGNRYASGPVGKALSDACMGTIASFLSKYQDIIIEHQKVVKGNQKRLESLRELAGKENLEYPSVTLPPQPHTKEGVDAYNEVIARVRMWVNLNLWQKLKLSRDDAKPLLRLKGFPSFPLVERQANEVDWWDMVCNVKKLINEKKEDGKVFWQNLAGYKRQEALRPYLSSEEDRKKGKKFARYQLGDLLLHLEKKHGEDWGKVYDEAWERIDKKVEGLSKHIKLEEERRSEDAQSKAALTDWLRAKASFVIEGLKEADKDEFCRCELKLQKWYGDLRGKPFAIEAENSILDISGFSKQYNCAFIWQKDGVKKLNLYLIINYFKGGKLRFKKIKPEAFEANRFYTVINKKSGEIVPMEVNFNFDDPNLIILPLAFGKRQGREFIWNDLLSLETGSLKLANGRVIEKTLYNRRTRQDEPALFVALTFERREVLDSSNIKPMNLIGVDRGENIPAVIALTDPEGCPLSRFKDSLGNPTHILRIGESYKEKQRTIQAKKEVEQRRAGGYSRKYASKAKNLADDMVRNTARDLLYYAVTQDAMLIFENLSRGFGRQGKRTFMAERQYTRMEDWLTAKLAYEGLPSKTYLSKTLAQYTSKTCSNCGFTITSADYDRVLEKLKKTATGWMTTINGKELKVEGQITYYNRYKRQNVVKDLSVELDRLSEESVNNDISSWTKGRSGEALSLLKKRFSHRPVQEKFVCLNCGFETHADEQAALNIARSWLFLRSQEYKKYQTNKTTGNTDKRAFVETWQSFYRKKLKEVWKPAV

SEQ ID NO: 2297 - protein, 978 aa, synthetic construct
QEIKRINKIRRRLVKDSNTKKAGKTGPMKTLLVRVMTPDLRERLENLRKKPENIPQPISNTSRANLNKLLTDYTEMKKAILHVYWEEFQKDPVGLMSRVAQPASKKIDQNKLKPEMDEKGNLTTAGFACSQCGQPLFVYKLEQVSEKGKAYTNYFGRCNVAEHEKLIQLYQLKPEKDSDEAVTYSLGKFGQRALDFYSIHVTKESTHPVKPLAQIAGNRYASGPVGKALSDACMGTIASFLSKYQDIIIEHQKVVKGNQKRLESLRELAGKENLEYPSVTLPPQPHTKEGVDAYNEVIARVRMWVNLNLWQKLKLSRDDAKPLLRLKGFPSFPLVERQANEVDWWDMVCNVKKLINEKKEDGKVFWQNLAGYKRQEALRPYLSSEEDRKKGKKFARYQLGDLLLHLEKKHGEDWGKVYDEAWERIDKKVEGLSKHIKLEEERRSEDAQSKAALTDWLRAKASFVIEGLKEADKDEFCRCELKLQKWYGDLRGKPFAIEAENSILDISGFSKQYNCAFIWQKDGVKKLNLYLIINYFKGGKLRFKKIKPEAFEANRFYTVINKKSGEIVPMEVNFNFDDPNLIILPLAFGKRQGREFIWNDLLSLETGSLKLANGRVIEKTLYNRRTRQDEPALFVALTFERREVLDSSNIKPMNLIGVDRGENIPAVIALTDPEGCPLSRFKDSLGNPTHILRIGESYKEKQRTIQAKKEVEQRRAGGYSRKYASKAKNLADDMVRNTARDLLYYAVTQDAMLIFENLSRGFGRQGKRTFMAERQYTRMEDWLTAKLAYEGLPSKTYLSKTLAQYTSKTCSNCGFTITSADYDRVLEKLKKTATGWMTTINGKELKVEGQITYYNRYKRQNVVKDLSVELDRLSEESVNNDISSWTKGRSGEALSLLKKRFSHRPVQEKFVCLNCGFETHADEQAALNIARSWLFLRSQEYKKYQTNKTTGNTDKRAFVETWQSFYRKKLKEVWKPAV

SEQ ID NO: 2298 - protein, 978 aa, synthetic construct
QEIKRINKIRRRLVKDSNTKKAGKTGPMKTLLVRVMTPDLRERLENLRKKPENIPQPISNTSRANLNKLLTDYTEMKKAILHVYWEEFQKDPVGLMSRVAQPASKKIDQNKLKPEMDEKGNLTTAGFACSQCGQPLFVYKLEQVSEKGKAYTNYFGRCNVAEHEKLIQLSQLKPEKDSDEAVTYSLGKFGQRALDFYSIHVTKESTHPVKPLAQIAGNRYASGPVGKALSDACMGTIASFLSKYQDIIIEHQKVVKGNQKRLESLRELAGKENLEYPSVTLPPQPHTKEGVDAYNEVIARVRMWVNLNLWQKLKLSRDDAKPLLRLKGFPSFPLVERQANEVDWWDMVCNVKKLINEKKEDGKVFWQNLAGYKRQEALRPYLSSEEDRKKGKKFARYQLGDLLLHLEKKHGEDWGKVYDEAWERIDKKVEGLSKHIKLEEERRSEDAQSKAALTDWLRAKASFVIEGLKEADKDEFCRCELKLQKWYGDLRGKPFAIEAENSILDISGFSKQYNCAFIWQKDGVKKLNLYLIINYFKGGKLRFKKIKPEAFEANRFYTVINKKSGEIVPMEVNFNFDDPNLIILPLAFGKRQGREFIWNDLLSLETGSLKLANGRVIEKTLYNRRTRQDEPALFVALTFERREVLDSSNIKPMNLIGVDRGENIPAVIALTDPEGCPLSRFKDSLGNPTHILRIGESYKEKQRTIQAKKEVEQRRAGGYSRKYASKAKNLADDMVRNTARDLLYYAVTQDAMLIFENLSRGFGRQGKRTFMAERQYTRMEDWLTAKLAYEGLPSKTYLSKTLAQYTSKTCSNCGFTITSADYDRVLEKLKKTATGWMTTINGKELKVEGQITYYNRYKRQNVVKDLSVELDRLSEESVNNDISSWTKGRSGEALSLLKKRFSHRPVQEKFVCLNCGFETHADEQAALNIARSWLFLRSQEYKKYQTNKTTGNTDKRAFVETWQSFYRKKLKEVWKPAV

SEQ ID NO: 2299 - protein, 978 aa, synthetic construct
QEIKRINKIRRRLVKDSNTKKAGKTGPMKTLLVRVMTPDLRERLENLRKKPENIPQPISNTSRANLNKLLTDYTEMKKAILHVYWEEFQKDPVGLMSRVAQPASKKIDQNKLKPEMDEKGNLTTAGFACSQCGQPLFVYKLEQVSEKGKAYTNYFGRCNVAEHEKLIQLAQLKPEKDSDEAVTYSLGKFGQRALDFYSIHVTKESTHPVKPLAQIAGNRYASTPVGKALSDACMGTIASFLSKYQDIIIEHQKVVKGNQKRLESLRELAGKENLEYPSVTLPPQPHTKEGVDAYNEVIARVRMWVNLNLWQKLKLSRDDAKPLLRLKGFPSFPLVERQANEVDWWDMVCNVKKLINEKKEDGKVFWQNLAGYKRQEALRPYLSSEEDRKKGKKFARYQLGDLLLHLEKKHGEDWGKVYDEAWERIDKKVEGLSKHIKLEEERRSEDAQSKAALTDWLRAKASFVIEGLKEADKDEFCRCELKLQKWYGDLRGKPFAIEAENSILDISGFSKQYNCAFIWQKDGVKKLNLYLIINYFKGGKLRFKKIKPEAFEANRFYTVINKKSGEIVPMEVNFNFDDPNLIILPLAFGKRQGREFIWNDLLSLETGSLKLANGRVIEKTLYNRRTRQDEPALFVALTFERREVLDSSNIKPMNLIGVDRGENIPAVIALTDPEGCPLSRFKDSLGNPTHILRIGESYKEKQRTIQAKKEVEQRRAGGYSRKYASKAKNLADDMVRNTARDLLYYAVTQDAMLIFENLSRGFGRQGKRTFMAERQYTRMEDWLTAKLAYEGLPSKTYLSKTLAQYTSKTCSNCGFTITSADYDRVLEKLKKTATGWMTTINGKELKVEGQITYYNRYKRQNVVKDLSVELDRLSEESVNNDISSWTKGRSGEALSLLKKRFSHRPVQEKFVCLNCGFETHADEQAALNIARSWLFLRSQEYKKYQTNKTTGNTDKRAFVETWQSFYRKKLKEVWKPAV

SEQ ID NO: 2300 - protein, 978 aa, synthetic construct
QEIKRINKIRRRLVKDSNTKKAGKTGPMKTLLVRVMTPDLRERLENLRKKPENIPQPISNTSRANLNKLLTDYTEMKKAILHVYWEEFQKDPVGLMSRVAQPASKKIDQNKLKPEMDEKGNLTTAGFACSQCGQPLFVYKLEQVSEKGKAYTNYFGRCNVAEHEKLIQLAQLKPEKDSDEAVTYSLGKFGQRALDFYSIHVTKESTHPVKPLAQIAGNRYASGPVGKALSDACMGTIASFLSKYQDIIIEHQKVVKGNQKRLESLRELAGKENLEYPSVTLPPQPHTKEGVDAYNEVIARVRTWVNLNLWQKLKLSRDDAKPLLRLKGFPSFPLVERQANEVDWWDMVCNVKKLINEKKEDGKVFWQNLAGYKRQEALRPYLSSEEDRKKGKKFARYQLGDLLLHLEKKHGEDWGKVYDEAWERIDKKVEGLSKHIKLEEERRSEDAQSKAALTDWLRAKASFVIEGLKEADKDEFCRCELKLQKWYGDLRGKPFAIEAENSILDISGFSKQYNCAFIWQKDGVKKLNLYLIINYFKGGKLRFKKIKPEAFEANRFYTVINKKSGEIVPMEVNFNFDDPNLIILPLAFGKRQGREFIWNDLLSLETGSLKLANGRVIEKTLYNRRTRQDEPALFVALTFERREVLDSSNIKPMNLIGVDRGENIPAVIALTDPEGCPLSRFKDSLGNPTHILRIGESYKEKQRTIQAKKEVEQRRAGGYSRKYASKAKNLADDMVRNTARDLLYYAVTQDAMLIFENLSRGFGRQGKRTFMAERQYTRMEDWLTAKLAYEGLPSKTYLSKTLAQYTSKTCSNCGFTITSADYDRVLEKLKKTATGWMTTINGKELKVEGQITYYNRYKRQNVVKDLSVELDRLSEESVNNDISSWTKGRSGEALSLLKKRFSHRPVQEKFVCLNCGFETHADEQAALNIARSWLFLRSQEYKKYQTNKTTGNTDKRAFVETWQSFYRKKLKEVWKPAV

SEQ ID NO: 2301 - protein, 978 aa, synthetic construct
QEIKRINKIRRRLVKDSNTKKAGKTGPMKTLLVRVMTPDLRERLENLRKKPENIPQPISNTSRANLNKLLTDYTEMKKAILHVYWEEFQKDPVGLMSRVAQPASKKIDQNKLKPEMDEKGNLTTAGFACSQCGQPLFVYKLEQVSEKGKAYTNYFGRCNVAEHEKLIQLAQLKPEKDSDEAVTYSLGKFGQRALDFYSIHVTKESTHPVKPLAQIAGNRYASGPVGKALSDACMGTIASFLSKYQDIIIEHQKVVKGNQKRLESLRELAGKENLEYPSVTLPPQPHTKEGVDAYNEVIARVRMWVNLNLWQKLKLSRDDAKPLLRLKGFPSFPLVERQANEVDWWDMVCNVKKLINEKKEDGKVFWQNLAGYKRQEALRPYLSSEEDRKKGKKFARTQLGDLLLHLEKKHGEDWGKVYDEAWERIDKKVEGLSKHIKLEEERRSEDAQSKAALTDWLRAKASFVIEGLKEADKDEFCRCELKLQKWYGDLRGKPFAIEAENSILDISGFSKQYNCAFIWQKDGVKKLNLYLIINYFKGGKLRFKKIKPEAFEANRFYTVINKKSGEIVPMEVNFNFDDPNLIILPLAFGKRQGREFIWNDLLSLETGSLKLANGRVIEKTLYNRRTRQDEPALFVALTFERREVLDSSNIKPMNLIGVDRGENIPAVIALTDPEGCPLSRFKDSLGNPTHILRIGESYKEKQRTIQAKKEVEQRRAGGYSRKYASKAKNLADDMVRNTARDLLYYAVTQDAMLIFENLSRGFGRQGKRTFMAERQYTRMEDWLTAKLAYEGLPSKTYLSKTLAQYTSKTCSNCGFTITSADYDRVLEKLKKTATGWMTTINGKELKVEGQITYYNRYKRQNVVKDLSVELDRLSEESVNNDISSWTKGRSGEALSLLKKRFSHRPVQEKFVCLNCGFETHADEQAALNIARSWLFLRSQEYKKYQTNKTTGNTDKRAFVETWQSFYRKKLKEVWKPAV

SEQ ID NO: 2302 - protein, 978 aa, synthetic construct
QEIKRINKIRRRLVKDSNTKKAGKTGPMKTLLVRVMTPDLRERLENLRKKPENIPQPISNTSRANLNKLLTDYTEMKKAILHVYWEEFQKDPVGLMSRVAQPASKKIDQNKLKPEMDEKGNLTTAGFACSQCGQPLFVYKLEQVSEKGKAYTNYFGRCNVAEHEKLIQLAQLKPEKDSDEAVTYSLGKFGQRALDFYSIHVTKESTHPVKPLAQIAGNRYASGPVGKALSDACMGTIASFLSKYQDIIIEHQKVVKGNQKRLESLRELAGKENLEYPSVTLPPQPHTKEGVDAYNEVIARVRMWVNLNLWQKLKLSRDDAKPLLRLKGFPSFPLVERQANEVDWWDMVCNVKKLINEKKEDGKVFWQNLAGYKRQEALRPYLSSEEDRKKGKKFARYQLGDLLLHLEKKHGEDWGKVYDEAWERIDKKVEGLSKHIKLEEERRSEDAQSKAALTDWLRAKASFVIEGLKEADKDEFCRCELKLQKWYGDLRGKPFAIEAENSILDISGFSKQYNCAFIWQKDGVKKLNLYLIINYFKGGKLRFKKIKPEAFEANRFYTVINKKSGEIVPMEVNFNFDDPNLIILPLAFGKRQGREFIWNDLLSLETGSLKLANGRVIEKTLYNRRTRQDEPALFVALTFERREVLDSSNIKPMNLIGVDRGENIPAVIALTDPEGCPLSRFKDSLGNPTHILRIGESYKEKQRTIQAKKEVEQRRAGGYSRKYASKAKNLADDMVRNTARDLLYYAVTQDAMLIFENLSRGFGRQGKRTFMAERQYTRMEDWLTAKLAYEGLPSKTYLSKTLAQYTSKTCSNCGFTITSADYDRMLEKLKKTATGWMTTINGKELKVEGQITYYNRYKRQNVVKDLSVELDRLSEESVNNDISSWTKGRSGEALSLLKKRFSHRPVQEKFVCLNCGFETHADEQAALNIARSWLFLRSQEYKKYQTNKTTGNTDKRAFVETWQSFYRKKLKEVWKPAV

SEQ ID NO: 2303 - protein, 978 aa, synthetic construct
QEIKRINKIRRRLVKDSNTKKAGKTGPMKTLLVRVMTPDLRERLENLRKKPENIPQPISNTSRANLNKLLTDYTEMKKAILHVYWEEFQKDPVGLMSRVAQPASKKIDQNKLKPEMDEKGNLTTAGFACSQCGQPLFVYKLEQVSEKGKAYTNYFGRCNVAEHEKLIQLAQLKPEKDSDEAVTYSLGKFGQRALDFYSIHVTKESTHPVKPLAQIAGNRYASGPVGKALSDACMGTIASFLSKYQDIIIEHQKVVKGNQKRLESLRELAGKENLEYPSVTLPPQPHTKEGVDAYNEVIARVRMWVNLNLWQKLKLSRDDAKPLLRLKGFPSFPLVERQANEVDWWDMVCNVKKLINEKKEDGKVFWQNLAGYKRQEALRPYLSSEEDRKKGKKFARYQLGDLLLHLEKKHGEDWGKVYDEAWERIDKKVEGLSKHIKLEEERRSEDAQSKAALTDWLRAKASFVIEGLKEADKDEFCRCELKLQKWYGDLRGKPFAIEAENSILDISGFSKQYNCAFIWQKDGVKKLNLYLIINYFKGGKLRFKKIKPEAFEANRFYTVINKKSGEIVPMEVNFNFDDPNLIILPLAFGKRQGREFIWNDLLSLETGSLKLANGRVIEKTLYNRRTRQDEPALFVALTFERREVLDSSNIKPMNLIGVDRGENIPAVIALTDPEGCPLSRFKDSLGNPTHILRIGESYKEKQRTIQAKKEVEQRRAGGYSRKYASKAKNLADDMVRNTARDLLYYAVTQDAMLIFENLSRGFGRQGKRTFMAERQYTRMEDWLTAKLAYEGLPSKTYLSKTLAQYTSKTCSNCGFTITSADYDRVLEKLKKTATGWMTTINGKELKVEGQITYYNRYKRQNVVKDLSVELDRLSEESVNNDISSWDKGRSGEALSLLKKRFSHRPVQEKFVCLNCGFETHADEQAALNIARSWLFLRSQEYKKYQTNKTTGNTDKRAFVETWQSFYRKKLKEVWKPAV

SEQ ID NO: 2304 - protein, 978 aa, synthetic construct
QEIKRINKIRRRLVKDSNTKKAGKTGPMKTLLVRVMTPDLRERLENLRKKPENIPQPISNTSRANLNKLLTDYTEMKKAILHVYWEEFQKDPVGLMSRVAQPASKKIDQNKLKPEMDEKGNLTTAGFACSQCGQPLFVYKLEQVSEKGKAYTNYFGRCNVAEHEKLIQLAQLKPEKDSDEAVTYSLGKFGQRALDFYSIHVTKESTHPVKPLAQIAGNRYASGPVGKALSDACMGTIASFLSKYQDIIIEHQKVVKGNQKRLESLRELAGKENLEYPSVTLPPQPHTKEGVDAYNEVIARVRMWVNLNLWQKLKLSRDDAKPLLRLKGFPSFPLVERQANEVDWWDMVCNVKKLINEKKEDGKVFWQNLAGYKRQEALRPYLSSEEDRKKGKKFARYQLGDLLLHLEKKHGEDWGKVYDEAWERIDKKVEGLSKHIKLEEERRSEDAQSKAALTDWLRAKASFVIEGLKEADKDEFCRCELKLQKWYGDLRGKPFAIEAENSILDISGFSKQYNCAFIWQKDGVKKLNLYLIINYFKGGKLRFKKIKPEAFEANRFYTVINKKSGEIVPMEVNFNFDDPNLIILPLAFGKRQGREFIWNDLLSLETGSLKLANGRVIEKTLYNRRTRQDEPALFVALTFERREVLDSSNIKPMNLIGVDRGENIPAVIALTDPEGCPLSRFKDSLGNPTHILRIGESYKEKQRTIQAKKEVEQRRAGGYSRKYASKAKNLADDMVRNTARDLLYYAVTQDAMLIFENLSRGFGRQGKRTFMAERQYTRMEDWLTAKLAYEGLPSKTYLSKTLAQYTSKTCSNCGFTITSADYDRVLEKLKKTATGWMTTINGKELKVEGQITYYNRYKRQNVVKDLSVELDRLSEESVNNDISSWTKGRQGEALSLLKKRFSHRPVQEKFVCLNCGFETHADEQAALNIARSWLFLRSQEYKKYQTNKTTGNTDKRAFVETWQSFYRKKLKEVWKPAV

SEQ ID NO: 2305 - protein, 978 aa, synthetic construct
QEIKRINKIRRRLVKDSNTKKAGKTGPMKTLLVRVMTPDLRERLENLRKKPENIPQPISNTSRANLNKLLTDYTEMKKAILHVYWEEFQKDPVGLMSRVAQPASKKIDQNKLKPEMDEKGNLTTAGFACSQCGQPLFVYKLEQVSEKGKAYTNYFGRCNVAEHEKLILLDQLKPEKDSDEAVTYSLGKFGQRALDFYSIHVTKESTHPVKPLAQIAGNRYASTPVGKALSDACMGTIASFLSKYQDIIIEHQKVVKGNQKRLESLRELAGKENLEYPSVTLPPQPHTKEGVDAYNEVIARVRMWVNLNLWQKLKLSRDDAKPLLRLKGFPSFPLVERQANEVDWWDMVCNVKKLINEKKEDGKVFWQNLAGYKRQEALRPYLSSEEDRKKGKKFARYQLGDLLLHLEKKHGEDWGKVYDEAWERIDKKVEGLSKHIKLEEERRSEDAQSKAALTDWLRAKASFVIEGLKEADKDEFCRCELKLQKWYGDLRGKPFAIEAENSILDISGFSKQYNCAFIWQKDGVKKLNLYLIINYFKGGKLRFKKIKPEAFEANRFYTVINKKSGEIVPMEVNFNFDDPNLIILPLAFGKRQGREFIWNDLLSLETGSLKLANGRVIEKTLYNRRTRQDEPALFVALTFERREVLDSSNIKPMNLIGVDRGENIPAVIALTDPEGCPLSRFKDSLGNPTHILRIGESYKEKQRTIQAKKEVEQRRAGGYSRKYASKAKNLADDMVRNTARDLLYYAVTQDAMLIFENLSRGFGRQGKRTFMAERQYTRMEDWLTAKLAYEGLPSKTYLSKTLAQYTSKTCSNCGFTITSADYDRVLEKLKKTATGWMTTINGKELKVEGQITYYNRYKRQNVVKDLSVELDRLSEESVNNDISSWTKGRSGEALSLLKKRFSHRPVQEKFVCLNCGFETHADEQAALNIARSWLFLRSQEYKKYQTNKTTGNTDKRAFVETWQSFYRKKLKEVWKPAV

SEQ ID NO: 2306 - protein, 978 aa, synthetic construct
QEIKRINKIRRRLVKDSNTKKAGKTGPMKTLLVRVMTPDLRERLENLRKKPENIPQPISNTSRANLNKLLTDYTEMKKAILHVYWEEFQKDPVGLMSRVAQPASKKIDQNKLKPEMDEKGNLTTAGFACSQCGQPLFVYKLEQVSEKGKAYTNYFGRCNVAEHEKLILLDQLKPEKDSDEAVTYSLGKFGQRALDFYSIHVTKESTHPVKPLAQIAGNRYASGPVGKALSDACMGTIASFLSKYQDIIIEHQKVVKGNQKRLESLRELAGKENLEYPSVTLPPQPHTKEGVDAYNEVIARVRTWVNLNLWQKLKLSRDDAKPLLRLKGFPSFPLVERQANEVDWWDMVCNVKKLINEKKEDGKVFWQNLAGYKRQEALRPYLSSEEDRKKGKKFARYQLGDLLLHLEKKHGEDWGKVYDEAWERIDKKVEGLSKHIKLEEERRSEDAQSKAALTDWLRAKASFVIEGLKEADKDEFCRCELKLQKWYGDLRGKPFAIEAENSILDISGFSKQYNCAFIWQKDGVKKLNLYLIINYFKGGKLRFKKIKPEAFEANRFYTVINKKSGEIVPMEVNFNFDDPNLIILPLAFGKRQGREFIWNDLLSLETGSLKLANGRVIEKTLYNRRTRQDEPALFVALTFERREVLDSSNIKPMNLIGVDRGENIPAVIALTDPEGCPLSRFKDSLGNPTHILRIGESYKEKQRTIQAKKEVEQRRAGGYSRKYASKAKNLADDMVRNTARDLLYYAVTQDAMLIFENLSRGFGRQGKRTFMAERQYTRMEDWLTAKLAYEGLPSKTYLSKTLAQYTSKTCSNCGFTITSADYDRVLEKLKKTATGWMTTINGKELKVEGQITYYNRYKRQNVVKDLSVELDRLSEESVNNDISSWTKGRSGEALSLLKKRFSHRPVQEKFVCLNCGFETHADEQAALNIARSWLFLRSQEYKKYQTNKTTGNTDKRAFVETWQSFYRKKLKEVWKPAV

SEQ ID NO: 2307 - protein, 978 aa, synthetic construct
QEIKRINKIRRRLVKDSNTKKAGKTGPMKTLLVRVMTPDLRERLENLRKKPENIPQPISNTSRANLNKLLTDYTEMKKAILHVYWEEFQKDPVGLMSRVAQPASKKIDQNKLKPEMDEKGNLTTAGFACSQCGQPLFVYKLEQVSEKGKAYTNYFGRCNVAEHEKLILLDQLKPEKDSDEAVTYSLGKFGQRALDFYSIHVTKESTHPVKPLAQIAGNRYASGPVGKALSDACMGTIASFLSKYQDIIIEHQKVVKGNQKRLESLRELAGKENLEYPSVTLPPQPHTKEGVDAYNEVIARVRMWVNLNLWQKLKLSRDDAKPLLRLKGFPSFPLVERQANEVDWWDMVCNVKKLINEKKEDGKVFWQNLAGYKRQEALRPYLSSEEDRKKGKKFARTQLGDLLLHLEKKHGEDWGKVYDEAWERIDKKVEGLSKHIKLEEERRSEDAQSKAALTDWLRAKASFVIEGLKEADKDEFCRCELKLQKWYGDLRGKPFAIEAENSILDISGFSKQYNCAFIWQKDGVKKLNLYLIINYFKGGKLRFKKIKPEAFEANRFYTVINKKSGEIVPMEVNFNFDDPNLIILPLAFGKRQGREFIWNDLLSLETGSLKLANGRVIEKTLYNRRTRQDEPALFVALTFERREVLDSSNIKPMNLIGVDRGENIPAVIALTDPEGCPLSRFKDSLGNPTHILRIGESYKEKQRTIQAKKEVEQRRAGGYSRKYASKAKNLADDMVRNTARDLLYYAVTQDAMLIFENLSRGFGRQGKRTFMAERQYTRMEDWLTAKLAYEGLPSKTYLSKTLAQYTSKTCSNCGFTITSADYDRVLEKLKKTATGWMTTINGKELKVEGQITYYNRYKRQNVVKDLSVELDRLSEESVNNDISSWTKGRSGEALSLLKKRFSHRPVQEKFVCLNCGFETHADEQAALNIARSWLFLRSQEYKKYQTNKTTGNTDKRAFVETWQSFYRKKLKEVWKPAV

SEQ ID NO: 2308 - protein, 978 aa, synthetic construct
QEIKRINKIRRRLVKDSNTKKAGKTGPMKTLLVRVMTPDLRERLENLRKKPENIPQPISNTSRANLNKLLTDYTEMKKAILHVYWEEFQKDPVGLMSRVAQPASKKIDQNKLKPEMDEKGNLTTAGFACSQCGQPLFVYKLEQVSEKGKAYTNYFGRCNVAEHEKLILLDQLKPEKDSDEAVTYSLGKFGQRALDFYSIHVTKESTHPVKPLAQIAGNRYASGPVGKALSDACMGTIASFLSKYQDIIIEHQKVVKGNQKRLESLRELAGKENLEYPSVTLPPQPHTKEGVDAYNEVIARVRMWVNLNLWQKLKLSRDDAKPLLRLKGFPSFPLVERQANEVDWWDMVCNVKKLINEKKEDGKVFWQNLAGYKRQEALRPYLSSEEDRKKGKKFARYQLGDLLLHLEKKHGEDWGKVYDEAWERIDKKVEGLSKHIKLEEERRSEDAQSKAALTDWLRAKASFVIEGLKEADKDEFCRCELKLQKWYGDLRGKPFAIEAENSILDISGFSKQYNCAFIWQKDGVKKLNLYLIINYFKGGKLRFKKIKPEAFEANRFYTVINKKSGEIVPMEVNFNFDDPNLIILPLAFGKRQGREFIWNDLLSLETGSLKLANGRVIEKTLYNRRTRQDEPALFVALTFERREVLDSSNIKPMNLIGVDRGENIPAVIALTDPEGCPLSRFKDSLGNPTHILRIGESYKEKQRTIQAKKEVEQRRAGGYSRKYASKAKNLADDMVRNTARDLLYYAVTQDAMLIFENLSRGFGRQGKRTFMAERQYTRMEDWLTAKLAYEGLPSKTYLSKTLAQYTSKTCSNCGFTITSADYDRMLEKLKKTATGWMTTINGKELKVEGQITYYNRYKRQNVVKDLSVELDRLSEESVNNDISSWTKGRSGEALSLLKKRFSHRPVQEKFVCLNCGFETHADEQAALNIARSWLFLRSQEYKKYQTNKTTGNTDKRAFVETWQSFYRKKLKEVWKPAV

SEQ ID NO: 2309 - protein, 978 aa, synthetic construct
QEIKRINKIRRRLVKDSNTKKAGKTGPMKTLLVRVMTPDLRERLENLRKKPENIPQPISNTSRANLNKLLTDYTEMKKAILHVYWEEFQKDPVGLMSRVAQPASKKIDQNKLKPEMDEKGNLTTAGFACSQCGQPLFVYKLEQVSEKGKAYTNYFGRCNVAEHEKLILLDQLKPEKDSDEAVTYSLGKFGQRALDFYSIHVTKESTHPVKPLAQIAGNRYASGPVGKALSDACMGTIASFLSKYQDIIIEHQKVVKGNQKRLESLRELAGKENLEYPSVTLPPQPHTKEGVDAYNEVIARVRMWVNLNLWQKLKLSRDDAKPLLRLKGFPSFPLVERQANEVDWWDMVCNVKKLINEKKEDGKVFWQNLAGYKRQEALRPYLSSEEDRKKGKKFARYQLGDLLLHLEKKHGEDWGKVYDEAWERIDKKVEGLSKHIKLEEERRSEDAQSKAALTDWLRAKASFVIEGLKEADKDEFCRCELKLQKWYGDLRGKPFAIEAENSILDISGFSKQYNCAFIWQKDGVKKLNLYLIINYFKGGKLRFKKIKPEAFEANRFYTVINKKSGEIVPMEVNFNFDDPNLIILPLAFGKRQGREFIWNDLLSLETGSLKLANGRVIEKTLYNRRTRQDEPALFVALTFERREVLDSSNIKPMNLIGVDRGENIPAVIALTDPEGCPLSRFKDSLGNPTHILRIGESYKEKQRTIQAKKEVEQRRAGGYSRKYASKAKNLADDMVRNTARDLLYYAVTQDAMLIFENLSRGFGRQGKRTFMAERQYTRMEDWLTAKLAYEGLPSKTYLSKTLAQYTSKTCSNCGFTITSADYDRVLEKLKKTATGWMTTINGKELKVEGQITYYNRYKRQNVVKDLSVELDRLSEESVNNDISSWDKGRSGEALSLLKKRFSHRPVQEKFVCLNCGFETHADEQAALNIARSWLFLRSQEYKKYQTNKTTGNTDKRAFVETWQSFYRKKLKEVWKPAV

SEQ ID NO: 2310 - protein, 978 aa, synthetic construct
QEIKRINKIRRRLVKDSNTKKAGKTGPMKTLLVRVMTPDLRERLENLRKKPENIPQPISNTSRANLNKLLTDYTEMKKAILHVYWEEFQKDPVGLMSRVAQPASKKIDQNKLKPEMDEKGNLTTAGFACSQCGQPLFVYKLEQVSEKGKAYTNYFGRCNVAEHEKLILLDQLKPEKDSDEAVTYSLGKFGQRALDFYSIHVTKESTHPVKPLAQIAGNRYASGPVGKALSDACMGTIASFLSKYQDIIIEHQKVVKGNQKRLESLRELAGKENLEYPSVTLPPQPHTKEGVDAYNEVIARVRMWVNLNLWQKLKLSRDDAKPLLRLKGFPSFPLVERQANEVDWWDMVCNVKKLINEKKEDGKVFWQNLAGYKRQEALRPYLSSEEDRKKGKKFARYQLGDLLLHLEKKHGEDWGKVYDEAWERIDKKVEGLSKHIKLEEERRSEDAQSKAALTDWLRAKASFVIEGLKEADKDEFCRCELKLQKWYGDLRGKPFAIEAENSILDISGFSKQYNCAFIWQKDGVKKLNLYLIINYFKGGKLRFKKIKPEAFEANRFYTVINKKSGEIVPMEVNFNFDDPNLIILPLAFGKRQGREFIWNDLLSLETGSLKLANGRVIEKTLYNRRTRQDEPALFVALTFERREVLDSSNIKPMNLIGVDRGENIPAVIALTDPEGCPLSRFKDSLGNPTHILRIGESYKEKQRTIQAKKEVEQRRAGGYSRKYASKAKNLADDMVRNTARDLLYYAVTQDAMLIFENLSRGFGRQGKRTFMAERQYTRMEDWLTAKLAYEGLPSKTYLSKTLAQYTSKTCSNCGFTITSADYDRVLEKLKKTATGWMTTINGKELKVEGQITYYNRYKRQNVVKDLSVELDRLSEESVNNDISSWTKGRQGEALSLLKKRFSHRPVQEKFVCLNCGFETHADEQAALNIARSWLFLRSQEYKKYQTNKTTGNTDKRAFVETWQSFYRKKLKEVWKPAV

SEQ ID NO: 2311 - protein, 978 aa, synthetic construct
QEIKRINKIRRRLVKDSNTKKAGKTGPMKTLLVRVMTPDLRERLENLRKKPENIPQPISNTSRANLNKLLTDYTEMKKAILHVYWEEFQKDPVGLMSRVAQPASKKIDQNKLKPEMDEKGNLTTAGFACSQCGQPLFVYKLEQVSEKGKAYTNYFGRCNVAEHEKLILLYQLKPEKDSDEAVTYSLGKFGQRALDFYSIHVTKESTHPVKPLAQIAGNRYASTPVGKALSDACMGTIASFLSKYQDIIIEHQKVVKGNQKRLESLRELAGKENLEYPSVTLPPQPHTKEGVDAYNEVIARVRMWVNLNLWQKLKLSRDDAKPLLRLKGFPSFPLVERQANEVDWWDMVCNVKKLINEKKEDGKVFWQNLAGYKRQEALRPYLSSEEDRKKGKKFARYQLGDLLLHLEKKHGEDWGKVYDEAWERIDKKVEGLSKHIKLEEERRSEDAQSKAALTDWLRAKASFVIEGLKEADKDEFCRCELKLQKWYGDLRGKPFAIEAENSILDISGFSKQYNCAFIWQKDGVKKLNLYLIINYFKGGKLRFKKIKPEAFEANRFYTVINKKSGEIVPMEVNFNFDDPNLIILPLAFGKRQGREFIWNDLLSLETGSLKLANGRVIEKTLYNRRTRQDEPALFVALTFERREVLDSSNIKPMNLIGVDRGENIPAVIALTDPEGCPLSRFKDSLGNPTHILRIGESYKEKQRTIQAKKEVEQRRAGGYSRKYASKAKNLADDMVRNTARDLLYYAVTQDAMLIFENLSRGFGRQGKRTFMAERQYTRMEDWLTAKLAYEGLPSKTYLSKTLAQYTSKTCSNCGFTITSADYDRVLEKLKKTATGWMTTINGKELKVEGQITYYNRYKRQNVVKDLSVELDRLSEESVNNDISSWTKGRSGEALSLLKKRFSHRPVQEKFVCLNCGFETHADEQAALNIARSWLFLRSQEYKKYQTNKTTGNTDKRAFVETWQSFYRKKLKEVWKPAV

SEQ ID NO: 2312 - protein, 978 aa, synthetic construct
QEIKRINKIRRRLVKDSNTKKAGKTGPMKTLLVRVMTPDLRERLENLRKKPENIPQPISNTSRANLNKLLTDYTEMKKAILHVYWEEFQKDPVGLMSRVAQPASKKIDQNKLKPEMDEKGNLTTAGFACSQCGQPLFVYKLEQVSEKGKAYTNYFGRCNVAEHEKLILLYQLKPEKDSDEAVTYSLGKFGQRALDFYSIHVTKESTHPVKPLAQIAGNRYASGPVGKALSDACMGTIASFLSKYQDIIIEHQKVVKGNQKRLESLRELAGKENLEYPSVTLPPQPHTKEGVDAYNEVIARVRTWVNLNLWQKLKLSRDDAKPLLRLKGFPSFPLVERQANEVDWWDMVCNVKKLINEKKEDGKVFWQNLAGYKRQEALRPYLSSEEDRKKGKKFARYQLGDLLLHLEKKHGEDWGKVYDEAWERIDKKVEGLSKHIKLEEERRSEDAQSKAALTDWLRAKASFVIEGLKEADKDEFCRCELKLQKWYGDLRGKPFAIEAENSILDISGFSKQYNCAFIWQKDGVKKLNLYLIINYFKGGKLRFKKIKPEAFEANRFYTVINKKSGEIVPMEVNFNFDDPNLIILPLAFGKRQGREFIWNDLLSLETGSLKLANGRVIEKTLYNRRTRQDEPALFVALTFERREVLDSSNIKPMNLIGVDRGENIPAVIALTDPEGCPLSRFKDSLGNPTHILRIGESYKEKQRTIQAKKEVEQRRAGGYSRKYASKAKNLADDMVRNTARDLLYYAVTQDAMLIFENLSRGFGRQGKRTFMAERQYTRMEDWLTAKLAYEGLPSKTYLSKTLAQYTSKTCSNCGFTITSADYDRVLEKLKKTATGWMTTINGKELKVEGQITYYNRYKRQNVVKDLSVELDRLSEESVNNDISSWTKGRSGEALSLLKKRFSHRPVQEKFVCLNCGFETHADEQAALNIARSWLFLRSQEYKKYQTNKTTGNTDKRAFVETWQSFYRKKLKEVWKPAV

SEQ ID NO: 2313 - protein, 978 aa, synthetic construct
QEIKRINKIRRRLVKDSNTKKAGKTGPMKTLLVRVMTPDLRERLENLRKKPENIPQPISNTSRANLNKLLTDYTEMKKAILHVYWEEFQKDPVGLMSRVAQPASKKIDQNKLKPEMDEKGNLTTAGFACSQCGQPLFVYKLEQVSEKGKAYTNYFGRCNVAEHEKLILLYQLKPEKDSDEAVTYSLGKFGQRALDFYSIHVTKESTHPVKPLAQIAGNRYASGPVGKALSDACMGTIASFLSKYQDIIIEHQKVVKGNQKRLESLRELAGKENLEYPSVTLPPQPHTKEGVDAYNEVIARVRMWVNLNLWQKLKLSRDDAKPLLRLKGFPSFPLVERQANEVDWWDMVCNVKKLINEKKEDGKVFWQNLAGYKRQEALRPYLSSEEDRKKGKKFARTQLGDLLLHLEKKHGEDWGKVYDEAWERIDKKVEGLSKHIKLEEERRSEDAQSKAALTDWLRAKASFVIEGLKEADKDEFCRCELKLQKWYGDLRGKPFAIEAENSILDISGFSKQYNCAFIWQKDGVKKLNLYLIINYFKGGKLRFKKIKPEAFEANRFYTVINKKSGEIVPMEVNFNFDDPNLIILPLAFGKRQGREFIWNDLLSLETGSLKLANGRVIEKTLYNRRTRQDEPALFVALTFERREVLDSSNIKPMNLIGVDRGENIPAVIALTDPEGCPLSRFKDSLGNPTHILRIGESYKEKQRTIQAKKEVEQRRAGGYSRKYASKAKNLADDMVRNTARDLLYYAVTQDAMLIFENLSRGFGRQGKRTFMAERQYTRMEDWLTAKLAYEGLPSKTYLSKTLAQYTSKTCSNCGFTITSADYDRVLEKLKKTATGWMTTINGKELKVEGQITYYNRYKRQNVVKDLSVELDRLSEESVNNDISSWTKGRSGEALSLLKKRFSHRPVQEKFVCLNCGFETHADEQAALNIARSWLFLRSQEYKKYQTNKTTGNTDKRAFVETWQSFYRKKLKEVWKPAV

SEQ ID NO: 2314 - protein, 978 aa, synthetic construct
QEIKRINKIRRRLVKDSNTKKAGKTGPMKTLLVRVMTPDLRERLENLRKKPENIPQPISNTSRANLNKLLTDYTEMKKAILHVYWEEFQKDPVGLMSRVAQPASKKIDQNKLKPEMDEKGNLTTAGFACSQCGQPLFVYKLEQVSEKGKAYTNYFGRCNVAEHEKLILLYQLKPEKDSDEAVTYSLGKFGQRALDFYSIHVTKESTHPVKPLAQIAGNRYASGPVGKALSDACMGTIASFLSKYQDIIIEHQKVVKGNQKRLESLRELAGKENLEYPSVTLPPQPHTKEGVDAYNEVIARVRMWVNLNLWQKLKLSRDDAKPLLRLKGFPSFPLVERQANEVDWWDMVCNVKKLINEKKEDGKVFWQNLAGYKRQEALRPYLSSEEDRKKGKKFARYQLGDLLLHLEKKHGEDWGKVYDEAWERIDKKVEGLSKHIKLEEERRSEDAQSKAALTDWLRAKASFVIEGLKEADKDEFCRCELKLQKWYGDLRGKPFAIEAENSILDISGFSKQYNCAFIWQKDGVKKLNLYLIINYFKGGKLRFKKIKPEAFEANRFYTVINKKSGEIVPMEVNFNFDDPNLIILPLAFGKRQGREFIWNDLLSLETGSLKLANGRVIEKTLYNRRTRQDEPALFVALTFERREVLDSSNIKPMNLIGVDRGENIPAVIALTDPEGCPLSRFKDSLGNPTHILRIGESYKEKQRTIQAKKEVEQRRAGGYSRKYASKAKNLADDMVRNTARDLLYYAVTQDAMLIFENLSRGFGRQGKRTFMAERQYTRMEDWLTAKLAYEGLPSKTYLSKTLAQYTSKTCSNCGFTITSADYDRMLEKLKKTATGWMTTINGKELKVEGQITYYNRYKRQNVVKDLSVELDRLSEESVNNDISSWTKGRSGEALSLLKKRFSHRPVQEKFVCLNCGFETHADEQAALNIARSWLFLRSQEYKKYQTNKTTGNTDKRAFVETWQSFYRKKLKEVWKPAV

SEQ ID NO: 2315 - protein, 978 aa, synthetic construct
QEIKRINKIRRRLVKDSNTKKAGKTGPMKTLLVRVMTPDLRERLENLRKKPENIPQPISNTSRANLNKLLTDYTEMKKAILHVYWEEFQKDPVGLMSRVAQPASKKIDQNKLKPEMDEKGNLTTAGFACSQCGQPLFVYKLEQVSEKGKAYTNYFGRCNVAEHEKLILLYQLKPEKDSDEAVTYSLGKFGQRALDFYSIHVTKESTHPVKPLAQIAGNRYASGPVGKALSDACMGTIASFLSKYQDIIIEHQKVVKGNQKRLESLRELAGKENLEYPSVTLPPQPHTKEGVDAYNEVIARVRMWVNLNLWQKLKLSRDDAKPLLRLKGFPSFPLVERQANEVDWWDMVCNVKKLINEKKEDGKVFWQNLAGYKRQEALRPYLSSEEDRKKGKKFARYQLGDLLLHLEKKHGEDWGKVYDEAWERIDKKVEGLSKHIKLEEERRSEDAQSKAALTDWLRAKASFVIEGLKEADKDEFCRCELKLQKWYGDLRGKPFAIEAENSILDISGFSKQYNCAFIWQKDGVKKLNLYLIINYFKGGKLRFKKIKPEAFEANRFYTVINKKSGEIVPMEVNFNFDDPNLIILPLAFGKRQGREFIWNDLLSLETGSLKLANGRVIEKTLYNRRTRQDEPALFVALTFERREVLDSSNIKPMNLIGVDRGENIPAVIALTDPEGCPLSRFKDSLGNPTHILRIGESYKEKQRTIQAKKEVEQRRAGGYSRKYASKAKNLADDMVRNTARDLLYYAVTQDAMLIFENLSRGFGRQGKRTFMAERQYTRMEDWLTAKLAYEGLPSKTYLSKTLAQYTSKTCSNCGFTITSADYDRVLEKLKKTATGWMTTINGKELKVEGQITYYNRYKRQNVVKDLSVELDRLSEESVNNDISSWDKGRSGEALSLLKKRFSHRPVQEKFVCLNCGFETHADEQAALNIARSWLFLRSQEYKKYQTNKTTGNTDKRAFVETWQSFYRKKLKEVWKPAV

SEQ ID NO: 2316 - protein, 978 aa, synthetic construct
QEIKRINKIRRRLVKDSNTKKAGKTGPMKTLLVRVMTPDLRERLENLRKKPENIPQPISNTSRANLNKLLTDYTEMKKAILHVYWEEFQKDPVGLMSRVAQPASKKIDQNKLKPEMDEKGNLTTAGFACSQCGQPLFVYKLEQVSEKGKAYTNYFGRCNVAEHEKLILLYQLKPEKDSDEAVTYSLGKFGQRALDFYSIHVTKESTHPVKPLAQIAGNRYASGPVGKALSDACMGTIASFLSKYQDIIIEHQKVVKGNQKRLESLRELAGKENLEYPSVTLPPQPHTKEGVDAYNEVIARVRMWVNLNLWQKLKLSRDDAKPLLRLKGFPSFPLVERQANEVDWWDMVCNVKKLINEKKEDGKVFWQNLAGYKRQEALRPYLSSEEDRKKGKKFARYQLGDLLLHLEKKHGEDWGKVYDEAWERIDKKVEGLSKHIKLEEERRSEDAQSKAALTDWLRAKASFVIEGLKEADKDEFCRCELKLQKWYGDLRGKPFAIEAENSILDISGFSKQYNCAFIWQKDGVKKLNLYLIINYFKGGKLRFKKIKPEAFEANRFYTVINKKSGEIVPMEVNFNFDDPNLIILPLAFGKRQGREFIWNDLLSLETGSLKLANGRVIEKTLYNRRTRQDEPALFVALTFERREVLDSSNIKPMNLIGVDRGENIPAVIALTDPEGCPLSRFKDSLGNPTHILRIGESYKEKQRTIQAKKEVEQRRAGGYSRKYASKAKNLADDMVRNTARDLLYYAVTQDAMLIFENLSRGFGRQGKRTFMAERQYTRMEDWLTAKLAYEGLPSKTYLSKTLAQYTSKTCSNCGFTITSADYDRVLEKLKKTATGWMTTINGKELKVEGQITYYNRYKRQNVVKDLSVELDRLSEESVNNDISSWTKGRQGEALSLLKKRFSHRPVQEKFVCLNCGFETHADEQAALNIARSWLFLRSQEYKKYQTNKTTGNTDKRAFVETWQSFYRKKLKEVWKPAV

SEQ ID NO: 2317 - protein, 978 aa, synthetic construct
QEIKRINKIRRRLVKDSNTKKAGKTGPMKTLLVRVMTPDLRERLENLRKKPENIPQPISNTSRANLNKLLTDYTEMKKAILHVYWEEFQKDPVGLMSRVAQPASKKIDQNKLKPEMDEKGNLTTAGFACSQCGQPLFVYKLEQVSEKGKAYTNYFGRCNVAEHEKLILLSQLKPEKDSDEAVTYSLGKFGQRALDFYSIHVTKESTHPVKPLAQIAGNRYASTPVGKALSDACMGTIASFLSKYQDIIIEHQKVVKGNQKRLESLRELAGKENLEYPSVTLPPQPHTKEGVDAYNEVIARVRMWVNLNLWQKLKLSRDDAKPLLRLKGFPSFPLVERQANEVDWWDMVCNVKKLINEKKEDGKVFWQNLAGYKRQEALRPYLSSEEDRKKGKKFARYQLGDLLLHLEKKHGEDWGKVYDEAWERIDKKVEGLSKHIKLEEERRSEDAQSKAALTDWLRAKASFVIEGLKEADKDEFCRCELKLQKWYGDLRGKPFAIEAENSILDISGFSKQYNCAFIWQKDGVKKLNLYLIINYFKGGKLRFKKIKPEAFEANRFYTVINKKSGEIVPMEVNFNFDDPNLIILPLAFGKRQGREFIWNDLLSLETGSLKLANGRVIEKTLYNRRTRQDEPALFVALTFERREVLDSSNIKPMNLIGVDRGENIPAVIALTDPEGCPLSRFKDSLGNPTHILRIGESYKEKQRTIQAKKEVEQRRAGGYSRKYASKAKNLADDMVRNTARDLLYYAVTQDAMLIFENLSRGFGRQGKRTFMAERQYTRMEDWLTAKLAYEGLPSKTYLSKTLAQYTSKTCSNCGFTITSADYDRVLEKLKKTATGWMTTINGKELKVEGQITYYNRYKRQNVVKDLSVELDRLSEESVNNDISSWTKGRSGEALSLLKKRFSHRPVQEKFVCLNCGFETHADEQAALNIARSWLFLRSQEYKKYQTNKTTGNTDKRAFVETWQSFYRKKLKEVWKPAV

SEQ ID NO: 2318 - protein, 978 aa, synthetic construct
QEIKRINKIRRRLVKDSNTKKAGKTGPMKTLLVRVMTPDLRERLENLRKKPENIPQPISNTSRANLNKLLTDYTEMKKAILHVYWEEFQKDPVGLMSRVAQPASKKIDQNKLKPEMDEKGNLTTAGFACSQCGQPLFVYKLEQVSEKGKAYTNYFGRCNVAEHEKLILLSQLKPEKDSDEAVTYSLGKFGQRALDFYSIHVTKESTHPVKPLAQIAGNRYASGPVGKALSDACMGTIASFLSKYQDIIIEHQKVVKGNQKRLESLRELAGKENLEYPSVTLPPQPHTKEGVDAYNEVIARVRTWVNLNLWQKLKLSRDDAKPLLRLKGFPSFPLVERQANEVDWWDMVCNVKKLINEKKEDGKVFWQNLAGYKRQEALRPYLSSEEDRKKGKKFARYQLGDLLLHLEKKHGEDWGKVYDEAWERIDKKVEGLSKHIKLEEERRSEDAQSKAALTDWLRAKASFVIEGLKEADKDEFCRCELKLQKWYGDLRGKPFAIEAENSILDISGFSKQYNCAFIWQKDGVKKLNLYLIINYFKGGKLRFKKIKPEAFEANRFYTVINKKSGEIVPMEVNFNFDDPNLIILPLAFGKRQGREFIWNDLLSLETGSLKLANGRVIEKTLYNRRTRQDEPALFVALTFERREVLDSSNIKPMNLIGVDRGENIPAVIALTDPEGCPLSRFKDSLGNPTHILRIGESYKEKQRTIQAKKEVEQRRAGGYSRKYASKAKNLADDMVRNTARDLLYYAVTQDAMLIFENLSRGFGRQGKRTFMAERQYTRMEDWLTAKLAYEGLPSKTYLSKTLAQYTSKTCSNCGFTITSADYDRVLEKLKKTATGWMTTINGKELKVEGQITYYNRYKRQNVVKDLSVELDRLSEESVNNDISSWTKGRSGEALSLLKKRFSHRPVQEKFVCLNCGFETHADEQAALNIARSWLFLRSQEYKKYQTNKTTGNTDKRAFVETWQSFYRKKLKEVWKPAV

SEQ ID NO: 2319 - protein, 978 aa, synthetic construct
QEIKRINKIRRRLVKDSNTKKAGKTGPMKTLLVRVMTPDLRERLENLRKKPENIPQPISNTSRANLNKLLTDYTEMKKAILHVYWEEFQKDPVGLMSRVAQPASKKIDQNKLKPEMDEKGNLTTAGFACSQCGQPLFVYKLEQVSEKGKAYTNYFGRCNVAEHEKLILLSQLKPEKDSDEAVTYSLGKFGQRALDFYSIHVTKESTHPVKPLAQIAGNRYASGPVGKALSDACMGTIASFLSKYQDIIIEHQKVVKGNQKRLESLRELAGKENLEYPSVTLPPQPHTKEGVDAYNEVIARVRMWVNLNLWQKLKLSRDDAKPLLRLKGFPSFPLVERQANEVDWWDMVCNVKKLINEKKEDGKVFWQNLAGYKRQEALRPYLSSEEDRKKGKKFARTQLGDLLLHLEKKHGEDWGKVYDEAWERIDKKVEGLSKHIKLEEERRSEDAQSKAALTDWLRAKASFVIEGLKEADKDEFCRCELKLQKWYGDLRGKPFAIEAENSILDISGFSKQYNCAFIWQKDGVKKLNLYLIINYFKGGKLRFKKIKPEAFEANRFYTVINKKSGEIVPMEVNFNFDDPNLIILPLAFGKRQGREFIWNDLLSLETGSLKLANGRVIEKTLYNRRTRQDEPALFVALTFERREVLDSSNIKPMNLIGVDRGENIPAVIALTDPEGCPLSRFKDSLGNPTHILRIGESYKEKQRTIQAKKEVEQRRAGGYSRKYASKAKNLADDMVRNTARDLLYYAVTQDAMLIFENLSRGFGRQGKRTFMAERQYTRMEDWLTAKLAYEGLPSKTYLSKTLAQYTSKTCSNCGFTITSADYDRVLEKLKKTATGWMTTINGKELKVEGQITYYNRYKRQNVVKDLSVELDRLSEESVNNDISSWTKGRSGEALSLLKKRFSHRPVQEKFVCLNCGFETHADEQAALNIARSWLFLRSQEYKKYQTNKTTGNTDKRAFVETWQSFYRKKLKEVWKPAV

SEQ ID NO: 2320 - protein, 978 aa, synthetic construct
QEIKRINKIRRRLVKDSNTKKAGKTGPMKTLLVRVMTPDLRERLENLRKKPENIPQPISNTSRANLNKLLTDYTEMKKAILHVYWEEFQKDPVGLMSRVAQPASKKIDQNKLKPEMDEKGNLTTAGFACSQCGQPLFVYKLEQVSEKGKAYTNYFGRCNVAEHEKLILLSQLKPEKDSDEAVTYSLGKFGQRALDFYSIHVTKESTHPVKPLAQIAGNRYASGPVGKALSDACMGTIASFLSKYQDIIIEHQKVVKGNQKRLESLRELAGKENLEYPSVTLPPQPHTKEGVDAYNEVIARVRMWVNLNLWQKLKLSRDDAKPLLRLKGFPSFPLVERQANEVDWWDMVCNVKKLINEKKEDGKVFWQNLAGYKRQEALRPYLSSEEDRKKGKKFARYQLGDLLLHLEKKHGEDWGKVYDEAWERIDKKVEGLSKHIKLEEERRSEDAQSKAALTDWLRAKASFVIEGLKEADKDEFCRCELKLQKWYGDLRGKPFAIEAENSILDISGFSKQYNCAFIWQKDGVKKLNLYLIINYFKGGKLRFKKIKPEAFEANRFYTVINKKSGEIVPMEVNFNFDDPNLIILPLAFGKRQGREFIWNDLLSLETGSLKLANGRVIEKTLYNRRTRQDEPALFVALTFERREVLDSSNIKPMNLIGVDRGENIPAVIALTDPEGCPLSRFKDSLGNPTHILRIGESYKEKQRTIQAKKEVEQRRAGGYSRKYASKAKNLADDMVRNTARDLLYYAVTQDAMLIFENLSRGFGRQGKRTFMAERQYTRMEDWLTAKLAYEGLPSKTYLSKTLAQYTSKTCSNCGFTITSADYDRMLEKLKKTATGWMTTINGKELKVEGQITYYNRYKRQNVVKDLSVELDRLSEESVNNDISSWTKGRSGEALSLLKKRFSHRPVQEKFVCLNCGFETHADEQAALNIARSWLFLRSQEYKKYQTNKTTGNTDKRAFVETWQSFYRKKLKEVWKPAV

SEQ ID NO: 2321 - protein, 978 aa, synthetic construct
QEIKRINKIRRRLVKDSNTKKAGKTGPMKTLLVRVMTPDLRERLENLRKKPENIPQPISNTSRANLNKLLTDYTEMKKAILHVYWEEFQKDPVGLMSRVAQPASKKIDQNKLKPEMDEKGNLTTAGFACSQCGQPLFVYKLEQVSEKGKAYTNYFGRCNVAEHEKLILLSQLKPEKDSDEAVTYSLGKFGQRALDFYSIHVTKESTHPVKPLAQIAGNRYASGPVGKALSDACMGTIASFLSKYQDIIIEHQKVVKGNQKRLESLRELAGKENLEYPSVTLPPQPHTKEGVDAYNEVIARVRMWVNLNLWQKLKLSRDDAKPLLRLKGFPSFPLVERQANEVDWWDMVCNVKKLINEKKEDGKVFWQNLAGYKRQEALRPYLSSEEDRKKGKKFARYQLGDLLLHLEKKHGEDWGKVYDEAWERIDKKVEGLSKHIKLEEERRSEDAQSKAALTDWLRAKASFVIEGLKEADKDEFCRCELKLQKWYGDLRGKPFAIEAENSILDISGFSKQYNCAFIWQKDGVKKLNLYLIINYFKGGKLRFKKIKPEAFEANRFYTVINKKSGEIVPMEVNFNFDDPNLIILPLAFGKRQGREFIWNDLLSLETGSLKLANGRVIEKTLYNRRTRQDEPALFVALTFERREVLDSSNIKPMNLIGVDRGENIPAVIALTDPEGCPLSRFKDSLGNPTHILRIGESYKEKQRTIQAKKEVEQRRAGGYSRKYASKAKNLADDMVRNTARDLLYYAVTQDAMLIFENLSRGFGRQGKRTFMAERQYTRMEDWLTAKLAYEGLPSKTYLSKTLAQYTSKTCSNCGFTITSADYDRVLEKLKKTATGWMTTINGKELKVEGQITYYNRYKRQNVVKDLSVELDRLSEESVNNDISSWDKGRSGEALSLLKKRFSHRPVQEKFVCLNCGFETHADEQAALNIARSWLFLRSQEYKKYQTNKTTGNTDKRAFVETWQSFYRKKLKEVWKPAV

SEQ ID NO: 2322 - protein, 978 aa, synthetic construct
QEIKRINKIRRRLVKDSNTKKAGKTGPMKTLLVRVMTPDLRERLENLRKKPENIPQPISNTSRANLNKLLTDYTEMKKAILHVYWEEFQKDPVGLMSRVAQPASKKIDQNKLKPEMDEKGNLTTAGFACSQCGQPLFVYKLEQVSEKGKAYTNYFGRCNVAEHEKLILLSQLKPEKDSDEAVTYSLGKFGQRALDFYSIHVTKESTHPVKPLAQIAGNRYASGPVGKALSDACMGTIASFLSKYQDIIIEHQKVVKGNQKRLESLRELAGKENLEYPSVTLPPQPHTKEGVDAYNEVIARVRMWVNLNLWQKLKLSRDDAKPLLRLKGFPSFPLVERQANEVDWWDMVCNVKKLINEKKEDGKVFWQNLAGYKRQEALRPYLSSEEDRKKGKKFARYQLGDLLLHLEKKHGEDWGKVYDEAWERIDKKVEGLSKHIKLEEERRSEDAQSKAALTDWLRAKASFVIEGLKEADKDEFCRCELKLQKWYGDLRGKPFAIEAENSILDISGFSKQYNCAFIWQKDGVKKLNLYLIINYFKGGKLRFKKIKPEAFEANRFYTVINKKSGEIVPMEVNFNFDDPNLIILPLAFGKRQGREFIWNDLLSLETGSLKLANGRVIEKTLYNRRTRQDEPALFVALTFERREVLDSSNIKPMNLIGVDRGENIPAVIALTDPEGCPLSRFKDSLGNPTHILRIGESYKEKQRTIQAKKEVEQRRAGGYSRKYASKAKNLADDMVRNTARDLLYYAVTQDAMLIFENLSRGFGRQGKRTFMAERQYTRMEDWLTAKLAYEGLPSKTYLSKTLAQYTSKTCSNCGFTITSADYDRVLEKLKKTATGWMTTINGKELKVEGQITYYNRYKRQNVVKDLSVELDRLSEESVNNDISSWTKGRQGEALSLLKKRFSHRPVQEKFVCLNCGFETHADEQAALNIARSWLFLRSQEYKKYQTNKTTGNTDKRAFVETWQSFYRKKLKEVWKPAV

SEQ ID NO: 2323 - protein, 978 aa, synthetic construct
QEGKRINKIRRRLVKDSNTKKAGKTGPMKTLLVPVMTPDLRERLENLRKKPENIPQPISNTSRANLNKLLTDYTEMKKAILHVYWEEFQKDPVGLMSRVAQPASKKIDQNKLKPEMDEKGNLTTAGFACSQCGQPLFVYKLEQVSEKGKAYTNYFGRCNVAEHEKLILLAQLKPEKDSDEAVTYSLGKFGQRALDFYSIHVTKESTHPVKPLAQIAGNRYASGPVGKALSDACMGTIASFLSKYQDIIIEHQKVVKGNQKRLESLRELAGKENLEYPSVTLPPQPHTKEGVDAYNEVIARVRMWVNLNLWQKLKLSRDDAKPLLRLKGFPSFPLVERQANEVDWWDMVCNVKKLINEKKEDGKVFWQNLAGYKRQEALRPYLSSEEDRKKGKKFARYQLGDLLLHLEKKHGEDWGKVYDEAWERIDKKVEGLSKHIKLEEERRSEDAQSKAALTDWLRAKASFVIEGLKEADKDEFCRCELKLQKWYGDLRGKPFAIEAENSILDISGFSKQYNCAFIWQKDGVKKLNLYLIINYFKGGKLRFKKIKPEAFEANRFYTVINKKSGEIVPMEVNFNFDDPNLIILPLAFGKRQGREFIWNDLLSLETGSLKLANGRVIEKTLYNRRTRQDEPALFVALTFERREVLDSSNIKPMNLIGVDRGENIPAVIALTDPEGCPLSRFKDSLGNPTHILRIGESYKEKQRTIQAKKEVEQRRAGGYSRKYASKAKNLADDMVRNTARDLLYYAVTQDAMLIFENLSRGFGRQGKRTFMAERQYTRMEDWLTAKLAYEGLPSKTYLSKTLAQYTSKTCSNCGFTITSADYDRVLEKLKKTATGWMTTINGKELKVEGQITYYNRYKRQNVVKDLSVELDRLSEESVNNDISSWTKGRSGEALSLLKKRFSHRPVQEKFVCLNCGFETHADEQAALNIARSWLFLRSQEYKKYQTNKTTGNTDKRAFVETWQSFYRKKLKEVWKPAV

SEQ ID NO: 2324 - protein, 978 aa, synthetic construct
QEIKRINKIRRRLVKDSNTKKAGKTGPMKTLLVRVMTPDLRERLENLRKKPENIPQPISNTSRANLNKLLTDYTEMKKAILHVYWEEFQKDPVGLMSRVAQPASKKIDQNKLKPEMDEKGNLTTAGFACSQCGQPLFVYKLEQVSEKGKAYTNYFGRCNVAEHEKLILLAQLKPEKDSDEAVTYSLGKFGQRALDFYSIHVTKESTHPVKPLAQIAGNRYASTPVGKALSDACMGTIASFLSKYQDIIIEHQKVVKGNQKRLESLRELAGKENLEYPSVTLPPQPHTKEGVDAYNEVIARVRTWVNLNLWQKLKLSRDDAKPLLRLKGFPSFPLVERQANEVDWWDMVCNVKKLINEKKEDGKVFWQNLAGYKRQEALRPYLSSEEDRKKGKKFARYQLGDLLLHLEKKHGEDWGKVYDEAWERIDKKVEGLSKHIKLEEERRSEDAQSKAALTDWLRAKASFVIEGLKEADKDEFCRCELKLQKWYGDLRGKPFAIEAENSILDISGFSKQYNCAFIWQKDGVKKLNLYLIINYFKGGKLRFKKIKPEAFEANRFYTVINKKSGEIVPMEVNFNFDDPNLIILPLAFGKRQGREFIWNDLLSLETGSLKLANGRVIEKTLYNRRTRQDEPALFVALTFERREVLDSSNIKPMNLIGVDRGENIPAVIALTDPEGCPLSRFKDSLGNPTHILRIGESYKEKQRTIQAKKEVEQRRAGGYSRKYASKAKNLADDMVRNTARDLLYYAVTQDAMLIFENLSRGFGRQGKRTFMAERQYTRMEDWLTAKLAYEGLPSKTYLSKTLAQYTSKTCSNCGFTITSADYDRVLEKLKKTATGWMTTINGKELKVEGQITYYNRYKRQNVVKDLSVELDRLSEESVNNDISSWTKGRSGEALSLLKKRFSHRPVQEKFVCLNCGFETHADEQAALNIARSWLFLRSQEYKKYQTNKTTGNTDKRAFVETWQSFYRKKLKEVWKPAV

SEQ ID NO: 2325 - protein, 978 aa, synthetic construct
QEIKRINKIRRRLVKDSNTKKAGKTGPMKTLLVRVMTPDLRERLENLRKKPENIPQPISNTSRANLNKLLTDYTEMKKAILHVYWEEFQKDPVGLMSRVAQPASKKIDQNKLKPEMDEKGNLTTAGFACSQCGQPLFVYKLEQVSEKGKAYTNYFGRCNVAEHEKLILLAQLKPEKDSDEAVTYSLGKFGQRALDFYSIHVTKESTHPVKPLAQIAGNRYASTPVGKALSDACMGTIASFLSKYQDIIIEHQKVVKGNQKRLESLRELAGKENLEYPSVTLPPQPHTKEGVDAYNEVIARVRMWVNLNLWQKLKLSRDDAKPLLRLKGFPSFPLVERQANEVDWWDMVCNVKKLINEKKEDGKVFWQNLAGYKRQEALRPYLSSEEDRKKGKKFARTQLGDLLLHLEKKHGEDWGKVYDEAWERIDKKVEGLSKHIKLEEERRSEDAQSKAALTDWLRAKASFVIEGLKEADKDEFCRCELKLQKWYGDLRGKPFAIEAENSILDISGFSKQYNCAFIWQKDGVKKLNLYLIINYFKGGKLRFKKIKPEAFEANRFYTVINKKSGEIVPMEVNFNFDDPNLIILPLAFGKRQGREFIWNDLLSLETGSLKLANGRVIEKTLYNRRTRQDEPALFVALTFERREVLDSSNIKPMNLIGVDRGENIPAVIALTDPEGCPLSRFKDSLGNPTHILRIGESYKEKQRTIQAKKEVEQRRAGGYSRKYASKAKNLADDMVRNTARDLLYYAVTQDAMLIFENLSRGFGRQGKRTFMAERQYTRMEDWLTAKLAYEGLPSKTYLSKTLAQYTSKTCSNCGFTITSADYDRVLEKLKKTATGWMTTINGKELKVEGQITYYNRYKRQNVVKDLSVELDRLSEESVNNDISSWTKGRSGEALSLLKKRFSHRPVQEKFVCLNCGFETHADEQAALNIARSWLFLRSQEYKKYQTNKTTGNTDKRAFVETWQSFYRKKLKEVWKPAV

SEQ ID NO: 2326 - protein, 978 aa, synthetic construct
QEIKRINKIRRRLVKDSNTKKAGKTGPMKTLLVRVMTPDLRERLENLRKKPENIPQPISNTSRANLNKLLTDYTEMKKAILHVYWEEFQKDPVGLMSRVAQPASKKIDQNKLKPEMDEKGNLTTAGFACSQCGQPLFVYKLEQVSEKGKAYTNYFGRCNVAEHEKLILLAQLKPEKDSDEAVTYSLGKFGQRALDFYSIHVTKESTHPVKPLAQIAGNRYASTPVGKALSDACMGTIASFLSKYQDIIIEHQKVVKGNQKRLESLRELAGKENLEYPSVTLPPQPHTKEGVDAYNEVIARVRMWVNLNLWQKLKLSRDDAKPLLRLKGFPSFPLVERQANEVDWWDMVCNVKKLINEKKEDGKVFWQNLAGYKRQEALRPYLSSEEDRKKGKKFARYQLGDLLLHLEKKHGEDWGKVYDEAWERIDKKVEGLSKHIKLEEERRSEDAQSKAALTDWLRAKASFVIEGLKEADKDEFCRCELKLQKWYGDLRGKPFAIEAENSILDISGFSKQYNCAFIWQKDGVKKLNLYLIINYFKGGKLRFKKIKPEAFEANRFYTVINKKSGEIVPMEVNFNFDDPNLIILPLAFGKRQGREFIWNDLLSLETGSLKLANGRVIEKTLYNRRTRQDEPALFVALTFERREVLDSSNIKPMNLIGVDRGENIPAVIALTDPEGCPLSRFKDSLGNPTHILRIGESYKEKQRTIQAKKEVEQRRAGGYSRKYASKAKNLADDMVRNTARDLLYYAVTQDAMLIFENLSRGFGRQGKRTFMAERQYTRMEDWLTAKLAYEGLPSKTYLSKTLAQYTSKTCSNCGFTITSADYDRMLEKLKKTATGWMTTINGKELKVEGQITYYNRYKRQNVVKDLSVELDRLSEESVNNDISSWTKGRSGEALSLLKKRFSHRPVQEKFVCLNCGFETHADEQAALNIARSWLFLRSQEYKKYQTNKTTGNTDKRAFVETWQSFYRKKLKEVWKPAV

SEQ ID NO: 2327 - protein, 978 aa, synthetic construct
QEIKRINKIRRRLVKDSNTKKAGKTGPMKTLLVRVMTPDLRERLENLRKKPENIPQPISNTSRANLNKLLTDYTEMKKAILHVYWEEFQKDPVGLMSRVAQPASKKIDQNKLKPEMDEKGNLTTAGFACSQCGQPLFVYKLEQVSEKGKAYTNYFGRCNVAEHEKLILLAQLKPEKDSDEAVTYSLGKFGQRALDFYSIHVTKESTHPVKPLAQIAGNRYASTPVGKALSDACMGTIASFLSKYQDIIIEHQKVVKGNQKRLESLRELAGKENLEYPSVTLPPQPHTKEGVDAYNEVIARVRMWVNLNLWQKLKLSRDDAKPLLRLKGFPSFPLVERQANEVDWWDMVCNVKKLINEKKEDGKVFWQNLAGYKRQEALRPYLSSEEDRKKGKKFARYQLGDLLLHLEKKHGEDWGKVYDEAWERIDKKVEGLSKHIKLEEERRSEDAQSKAALTDWLRAKASFVIEGLKEADKDEFCRCELKLQKWYGDLRGKPFAIEAENSILDISGFSKQYNCAFIWQKDGVKKLNLYLIINYFKGGKLRFKKIKPEAFEANRFYTVINKKSGEIVPMEVNFNFDDPNLIILPLAFGKRQGREFIWNDLLSLETGSLKLANGRVIEKTLYNRRTRQDEPALFVALTFERREVLDSSNIKPMNLIGVDRGENIPAVIALTDPEGCPLSRFKDSLGNPTHILRIGESYKEKQRTIQAKKEVEQRRAGGYSRKYASKAKNLADDMVRNTARDLLYYAVTQDAMLIFENLSRGFGRQGKRTFMAERQYTRMEDWLTAKLAYEGLPSKTYLSKTLAQYTSKTCSNCGFTITSADYDRVLEKLKKTATGWMTTINGKELKVEGQITYYNRYKRQNVVKDLSVELDRLSEESVNNDISSWDKGRSGEALSLLKKRFSHRPVQEKFVCLNCGFETHADEQAALNIARSWLFLRSQEYKKYQTNKTTGNTDKRAFVETWQSFYRKKLKEVWKPAV

SEQ ID NO: 2328 - protein, 978 aa, synthetic construct
QEIKRINKIRRRLVKDSNTKKAGKTGPMKTLLVRVMTPDLRERLENLRKKPENIPQPISNTSRANLNKLLTDYTEMKKAILHVYWEEFQKDPVGLMSRVAQPASKKIDQNKLKPEMDEKGNLTTAGFACSQCGQPLFVYKLEQVSEKGKAYTNYFGRCNVAEHEKLILLAQLKPEKDSDEAVTYSLGKFGQRALDFYSIHVTKESTHPVKPLAQIAGNRYASTPVGKALSDACMGTIASFLSKYQDIIIEHQKVVKGNQKRLESLRELAGKENLEYPSVTLPPQPHTKEGVDAYNEVIARVRMWVNLNLWQKLKLSRDDAKPLLRLKGFPSFPLVERQANEVDWWDMVCNVKKLINEKKEDGKVFWQNLAGYKRQEALRPYLSSEEDRKKGKKFARYQLGDLLLHLEKKHGEDWGKVYDEAWERIDKKVEGLSKHIKLEEERRSEDAQSKAALTDWLRAKASFVIEGLKEADKDEFCRCELKLQKWYGDLRGKPFAIEAENSILDISGFSKQYNCAFIWQKDGVKKLNLYLIINYFKGGKLRFKKIKPEAFEANRFYTVINKKSGEIVPMEVNFNFDDPNLIILPLAFGKRQGREFIWNDLLSLETGSLKLANGRVIEKTLYNRRTRQDEPALFVALTFERREVLDSSNIKPMNLIGVDRGENIPAVIALTDPEGCPLSRFKDSLGNPTHILRIGESYKEKQRTIQAKKEVEQRRAGGYSRKYASKAKNLADDMVRNTARDLLYYAVTQDAMLIFENLSRGFGRQGKRTFMAERQYTRMEDWLTAKLAYEGLPSKTYLSKTLAQYTSKTCSNCGFTITSADYDRVLEKLKKTATGWMTTINGKELKVEGQITYYNRYKRQNVVKDLSVELDRLSEESVNNDISSWTKGRQGEALSLLKKRFSHRPVQEKFVCLNCGFETHADEQAALNIARSWLFLRSQEYKKYQTNKTTGNTDKRAFVETWQSFYRKKLKEVWKPAV

SEQ ID NO: 2329 - protein, 979 aa, synthetic construct
QEIGKRINKIRRRLVKDSNTKKAGKTGPMKTLLVPVMTPDLRERLENLRKKPENIPQPISNTSRANLNKLLTDYTEMKKAILHVYWEEFQKDPVGLMSRVAQPASKKIDQNKLKPEMDEKGNLTTAGFACSQCGQPLFVYKLEQVSEKGKAYTNYFGRCNVAEHEKLILLAQLKPEKDSDEAVTYSLGKFGQRALDFYSIHVTKESTHPVKPLAQIAGNRYASGPVGKALSDACMGTIASFLSKYQDIIIEHQKVVKGNQKRLESLRELAGKENLEYPSVTLPPQPHTKEGVDAYNEVIARVRMWVNLNLWQKLKLSRDDAKPLLRLKGFPSFPLVERQANEVDWWDMVCNVKKLINEKKEDGKVFWQNLAGYKRQEALRPYLSSEEDRKKGKKFARYQLGDLLLHLEKKHGEDWGKVYDEAWERIDKKVEGLSKHIKLEEERRSEDAQSKAALTDWLRAKASFVIEGLKEADKDEFCRCELKLQKWYGDLRGKPFAIEAENSILDISGFSKQYNCAFIWQKDGVKKLNLYLIINYFKGGKLRFKKIKPEAFEANRFYTVINKKSGEIVPMEVNFNFDDPNLIILPLAFGKRQGREFIWNDLLSLETGSLKLANGRVIEKTLYNRRTRQDEPALFVALTFERREVLDSSNIKPMNLIGVDRGENIPAVIALTDPEGCPLSRFKDSLGNPTHILRIGESYKEKQRTIQAKKEVEQRRAGGYSRKYASKAKNLADDMVRNTARDLLYYAVTQDAMLIFENLSRGFGRQGKRTFMAERQYTRMEDWLTAKLAYEGLPSKTYLSKTLAQYTSKTCSNCGFTITSADYDRVLEKLKKTATGWMTTINGKELKVEGQITYYNRYKRQNVVKDLSVELDRLSEESVNNDISSWTKGRSGEALSLLKKRFSHRPVQEKFVCLNCGFETHADEQAALNIARSWLFLRSQEYKKYQTNKTTGNTDKRAFVETWQSFYRKKLKEVWKPAV

SEQ ID NO: 2330 - protein, 979 aa, synthetic construct
QEGKRINKIRRRLVKDSNTKKAGKTRGPMKTLLVRVMTPDLRERLENLRKKPENIPQPISNTSRANLNKLLTDYTEMKKAILHVYWEEFQKDPVGLMSRVAQPASKKIDQNKLKPEMDEKGNLTTAGFACSQCGQPLFVYKLEQVSEKGKAYTNYFGRCNVAEHEKLILLAQLKPEKDSDEAVTYSLGKFGQRALDFYSIHVTKESTHPVKPLAQIAGNRYASGPVGKALSDACMGTIASFLSKYQDIIIEHQKVVKGNQKRLESLRELAGKENLEYPSVTLPPQPHTKEGVDAYNEVIARVRMWVNLNLWQKLKLSRDDAKPLLRLKGFPSFPLVERQANEVDWWDMVCNVKKLINEKKEDGKVFWQNLAGYKRQEALRPYLSSEEDRKKGKKFARYQLGDLLLHLEKKHGEDWGKVYDEAWERIDKKVEGLSKHIKLEEERRSEDAQSKAALTDWLRAKASFVIEGLKEADKDEFCRCELKLQKWYGDLRGKPFAIEAENSILDISGFSKQYNCAFIWQKDGVKKLNLYLIINYFKGGKLRFKKIKPEAFEANRFYTVINKKSGEIVPMEVNFNFDDPNLIILPLAFGKRQGREFIWNDLLSLETGSLKLANGRVIEKTLYNRRTRQDEPALFVALTFERREVLDSSNIKPMNLIGVDRGENIPAVIALTDPEGCPLSRFKDSLGNPTHILRIGESYKEKQRTIQAKKEVEQRRAGGYSRKYASKAKNLADDMVRNTARDLLYYAVTQDAMLIFENLSRGFGRQGKRTFMAERQYTRMEDWLTAKLAYEGLPSKTYLSKTLAQYTSKTCSNCGFTITSADYDRVLEKLKKTATGWMTTINGKELKVEGQITYYNRYKRQNVVKDLSVELDRLSEESVNNDISSWTKGRSGEALSLLKKRFSHRPVQEKFVCLNCGFETHADEQAALNIARSWLFLRSQEYKKYQTNKTTGNTDKRAFVETWQSFYRKKLKEVWKPAV

SEQ ID NO: 2331 - protein, 978 aa, synthetic construct
QEIKRINKIRRRLVKDSNTKKAGKTGPMKTLLVRVMTPDLRERLENLRKKPENIPQPISNTSRANLNKLLTDYTEMKKAILHVYWEEFQKDPVGLMSRVAQPASKKIDQNKLKPEMDEKGNLTTAGFACSQCGQPLFVYKLEQVSEKGKAYTNYFGRCNVAEHEKLILLAQLKPEKDSDEAVTYSLGKFGQRALDFYSIHVTKESTHPVKPLAQIAGNRYASGPVGKALSDACMGTIASFLSKYQDIIIEHQKVVKGNQKRLESLRELAGKENLEYPSVTLPPQPHTKEGVDAYNEVIARVRTWVNLNLWQKLKLSRDDAKPLLRLKGFPSFPLVERQANEVDWWDMVCNVKKLINEKKEDGKVFWQNLAGYKRQEALRPYLSSEEDRKKGKKFARTQLGDLLLHLEKKHGEDWGKVYDEAWERIDKKVEGLSKHIKLEEERRSEDAQSKAALTDWLRAKASFVIEGLKEADKDEFCRCELKLQKWYGDLRGKPFAIEAENSILDISGFSKQYNCAFIWQKDGVKKLNLYLIINYFKGGKLRFKKIKPEAFEANRFYTVINKKSGEIVPMEVNFNFDDPNLIILPLAFGKRQGREFIWNDLLSLETGSLKLANGRVIEKTLYNRRTRQDEPALFVALTFERREVLDSSNIKPMNLIGVDRGENIPAVIALTDPEGCPLSRFKDSLGNPTHILRIGESYKEKQRTIQAKKEVEQRRAGGYSRKYASKAKNLADDMVRNTARDLLYYAVTQDAMLIFENLSRGFGRQGKRTFMAERQYTRMEDWLTAKLAYEGLPSKTYLSKTLAQYTSKTCSNCGFTITSADYDRVLEKLKKTATGWMTTINGKELKVEGQITYYNRYKRQNVVKDLSVELDRLSEESVNNDISSWTKGRSGEALSLLKKRFSHRPVQEKFVCLNCGFETHADEQAALNIARSWLFLRSQEYKKYQTNKTTGNTDKRAFVETWQSFYRKKLKEVWKPAV

SEQ ID NO: 2332 - protein, 978 aa, synthetic construct
QEIKRINKIRRRLVKDSNTKKAGKTGPMKTLLVRVMTPDLRERLENLRKKPENIPQPISNTSRANLNKLLTDYTEMKKAILHVYWEEFQKDPVGLMSRVAQPASKKIDQNKLKPEMDEKGNLTTAGFACSQCGQPLFVYKLEQVSEKGKAYTNYFGRCNVAEHEKLILLAQLKPEKDSDEAVTYSLGKFGQRALDFYSIHVTKESTHPVKPLAQIAGNRYASGPVGKALSDACMGTIASFLSKYQDIIIEHQKVVKGNQKRLESLRELAGKENLEYPSVTLPPQPHTKEGVDAYNEVIARVRTWVNLNLWQKLKLSRDDAKPLLRLKGFPSFPLVERQANEVDWWDMVCNVKKLINEKKEDGKVFWQNLAGYKRQEALRPYLSSEEDRKKGKKFARYQLGDLLLHLEKKHGEDWGKVYDEAWERIDKKVEGLSKHIKLEEERRSEDAQSKAALTDWLRAKASFVIEGLKEADKDEFCRCELKLQKWYGDLRGKPFAIEAENSILDISGFSKQYNCAFIWQKDGVKKLNLYLIINYFKGGKLRFKKIKPEAFEANRFYTVINKKSGEIVPMEVNFNFDDPNLIILPLAFGKRQGREFIWNDLLSLETGSLKLANGRVIEKTLYNRRTRQDEPALFVALTFERREVLDSSNIKPMNLIGVDRGENIPAVIALTDPEGCPLSRFKDSLGNPTHILRIGESYKEKQRTIQAKKEVEQRRAGGYSRKYASKAKNLADDMVRNTARDLLYYAVTQDAMLIFENLSRGFGRQGKRTFMAERQYTRMEDWLTAKLAYEGLPSKTYLSKTLAQYTSKTCSNCGFTITSADYDRMLEKLKKTATGWMTTINGKELKVEGQITYYNRYKRQNVVKDLSVELDRLSEESVNNDISSWTKGRSGEALSLLKKRFSHRPVQEKFVCLNCGFETHADEQAALNIARSWLFLRSQEYKKYQTNKTTGNTDKRAFVETWQSFYRKKLKEVWKPAV

SEQ ID NO: 2333 - protein, 978 aa, synthetic construct
QEIKRINKIRRRLVKDSNTKKAGKTGPMKTLLVRVMTPDLRERLENLRKKPENIPQPISNTSRANLNKLLTDYTEMKKAILHVYWEEFQKDPVGLMSRVAQPASKKIDQNKLKPEMDEKGNLTTAGFACSQCGQPLFVYKLEQVSEKGKAYTNYFGRCNVAEHEKLILLAQLKPEKDSDEAVTYSLGKFGQRALDFYSIHVTKESTHPVKPLAQIAGNRYASGPVGKALSDACMGTIASFLSKYQDIIIEHQKVVKGNQKRLESLRELAGKENLEYPSVTLPPQPHTKEGVDAYNEVIARVRTWVNLNLWQKLKLSRDDAKPLLRLKGFPSFPLVERQANEVDWWDMVCNVKKLINEKKEDGKVFWQNLAGYKRQEALRPYLSSEEDRKKGKKFARYQLGDLLLHLEKKHGEDWGKVYDEAWERIDKKVEGLSKHIKLEEERRSEDAQSKAALTDWLRAKASFVIEGLKEADKDEFCRCELKLQKWYGDLRGKPFAIEAENSILDISGFSKQYNCAFIWQKDGVKKLNLYLIINYFKGGKLRFKKIKPEAFEANRFYTVINKKSGEIVPMEVNFNFDDPNLIILPLAFGKRQGREFIWNDLLSLETGSLKLANGRVIEKTLYNRRTRQDEPALFVALTFERREVLDSSNIKPMNLIGVDRGENIPAVIALTDPEGCPLSRFKDSLGNPTHILRIGESYKEKQRTIQAKKEVEQRRAGGYSRKYASKAKNLADDMVRNTARDLLYYAVTQDAMLIFENLSRGFGRQGKRTFMAERQYTRMEDWLTAKLAYEGLPSKTYLSKTLAQYTSKTCSNCGFTITSADYDRVLEKLKKTATGWMTTINGKELKVEGQITYYNRYKRQNVVKDLSVELDRLSEESVNNDISSWDKGRSGEALSLLKKRFSHRPVQEKFVCLNCGFETHADEQAALNIARSWLFLRSQEYKKYQTNKTTGNTDKRAFVETWQSFYRKKLKEVWKPAV

SEQ ID NO: 2334 - protein, 978 aa, synthetic construct
QEIKRINKIRRRLVKDSNTKKAGKTGPMKTLLVRVMTPDLRERLENLRKKPENIPQPISNTSRANLNKLLTDYTEMKKAILHVYWEEFQKDPVGLMSRVAQPASKKIDQNKLKPEMDEKGNLTTAGFACSQCGQPLFVYKLEQVSEKGKAYTNYFGRCNVAEHEKLILLAQLKPEKDSDEAVTYSLGKFGQRALDFYSIHVTKESTHPVKPLAQIAGNRYASGPVGKALSDACMGTIASFLSKYQDIIIEHQKVVKGNQKRLESLRELAGKENLEYPSVTLPPQPHTKEGVDAYNEVIARVRTWVNLNLWQKLKLSRDDAKPLLRLKGFPSFPLVERQANEVDWWDMVCNVKKLINEKKEDGKVFWQNLAGYKRQEALRPYLSSEEDRKKGKKFARYQLGDLLLHLEKKHGEDWGKVYDEAWERIDKKVEGLSKHIKLEEERRSEDAQSKAALTDWLRAKASFVIEGLKEADKDEFCRCELKLQKWYGDLRGKPFAIEAENSILDISGFSKQYNCAFIWQKDGVKKLNLYLIINYFKGGKLRFKKIKPEAFEANRFYTVINKKSGEIVPMEVNFNFDDPNLIILPLAFGKRQGREFIWNDLLSLETGSLKLANGRVIEKTLYNRRTRQDEPALFVALTFERREVLDSSNIKPMNLIGVDRGENIPAVIALTDPEGCPLSRFKDSLGNPTHILRIGESYKEKQRTIQAKKEVEQRRAGGYSRKYASKAKNLADDMVRNTARDLLYYAVTQDAMLIFENLSRGFGRQGKRTFMAERQYTRMEDWLTAKLAYEGLPSKTYLSKTLAQYTSKTCSNCGFTITSADYDRVLEKLKKTATGWMTTINGKELKVEGQITYYNRYKRQNVVKDLSVELDRLSEESVNNDISSWTKGRQGEALSLLKKRFSHRPVQEKFVCLNCGFETHADEQAALNIARSWLFLRSQEYKKYQTNKTTGNTDKRAFVETWQSFYRKKLKEVWKPAV

SEQ ID NO: 2335 - protein, 978 aa, synthetic construct
QEIKRINGIRRRLVKDSNTKKAGKTGPMKTLLVPVMTPDLRERLENLRKKPENIPQPISNTSRANLNKLLTDYTEMKKAILHVYWEEFQKDPVGLMSRVAQPASKKIDQNKLKPEMDEKGNLTTAGFACSQCGQPLFVYKLEQVSEKGKAYTNYFGRCNVAEHEKLILLAQLKPEKDSDEAVTYSLGKFGQRALDFYSIHVTKESTHPVKPLAQIAGNRYASGPVGKALSDACMGTIASFLSKYQDIIIEHQKVVKGNQKRLESLRELAGKENLEYPSVTLPPQPHTKEGVDAYNEVIARVRMWVNLNLWQKLKLSRDDAKPLLRLKGFPSFPLVERQANEVDWWDMVCNVKKLINEKKEDGKVFWQNLAGYKRQEALRPYLSSEEDRKKGKKFARYQLGDLLLHLEKKHGEDWGKVYDEAWERIDKKVEGLSKHIKLEEERRSEDAQSKAALTDWLRAKASFVIEGLKEADKDEFCRCELKLQKWYGDLRGKPFAIEAENSILDISGFSKQYNCAFIWQKDGVKKLNLYLIINYFKGGKLRFKKIKPEAFEANRFYTVINKKSGEIVPMEVNFNFDDPNLIILPLAFGKRQGREFIWNDLLSLETGSLKLANGRVIEKTLYNRRTRQDEPALFVALTFERREVLDSSNIKPMNLIGVDRGENIPAVIALTDPEGCPLSRFKDSLGNPTHILRIGESYKEKQRTIQAKKEVEQRRAGGYSRKYASKAKNLADDMVRNTARDLLYYAVTQDAMLIFENLSRGFGRQGKRTFMAERQYTRMEDWLTAKLAYEGLPSKTYLSKTLAQYTSKTCSNCGFTITSADYDRVLEKLKKTATGWMTTINGKELKVEGQITYYNRYKRQNVVKDLSVELDRLSEESVNNDISSWTKGRSGEALSLLKKRFSHRPVQEKFVCLNCGFETHADEQAALNIARSWLFLRSQEYKKYQTNKTTGNTDKRAFVETWQSFYRKKLKEVWKPAV

SEQ ID NO: 2336 - protein, 982 aa, synthetic construct
QEIGKRINKIRRRLVKDSNTKKAGKTRKTGPMKTLLVRVMTPDLRERLENLRKKPENIPQPISNTSRANLNKLLTDYTEMKKAILHVYWEEFQKDPVGLMSRVAQPASKKIDQNKLKPEMDEKGNLTTAGFACSQCGQPLFVYKLEQVSEKGKAYTNYFGRCNVAEHEKLILLAQLKPEKDSDEAVTYSLGKFGQRALDFYSIHVTKESTHPVKPLAQIAGNRYASGPVGKALSDACMGTIASFLSKYQDIIIEHQKVVKGNQKRLESLRELAGKENLEYPSVTLPPQPHTKEGVDAYNEVIARVRMWVNLNLWQKLKLSRDDAKPLLRLKGFPSFPLVERQANEVDWWDMVCNVKKLINEKKEDGKVFWQNLAGYKRQEALRPYLSSEEDRKKGKKFARYQLGDLLLHLEKKHGEDWGKVYDEAWERIDKKVEGLSKHIKLEEERRSEDAQSKAALTDWLRAKASFVIEGLKEADKDEFCRCELKLQKWYGDLRGKPFAIEAENSILDISGFSKQYNCAFIWQKDGVKKLNLYLIINYFKGGKLRFKKIKPEAFEANRFYTVINKKSGEIVPMEVNFNFDDPNLIILPLAFGKRQGREFIWNDLLSLETGSLKLANGRVIEKTLYNRRTRQDEPALFVALTFERREVLDSSNIKPMNLIGVDRGENIPAVIALTDPEGCPLSRFKDSLGNPTHILRIGESYKEKQRTIQAKKEVEQRRAGGYSRKYASKAKNLADDMVRNTARDLLYYAVTQDAMLIFENLSRGFGRQGKRTFMAERQYTRMEDWLTAKLAYEGLPSKTYLSKTLAQYTSKTCSNCGFTITSADYDRVLEKLKKTATGWMTTINGKELKVEGQITYYNRYKRQNVVKDLSVELDRLSEESVNNDISSWTKGRSGEALSLLKKRFSHRPVQEKFVCLNCGFETHADEQAALNIARSWLFLRSQEYKKYQTNKTTGNTDKRAFVETWQSFYRKKLKEVWKPAV

SEQ ID NO: 2337 - protein, 978 aa, synthetic construct
QEGKRINGIRRRLVKDSNTKKAGKTGPMKTLLVRVMTPDLRERLENLRKKPENIPQPISNTSRANLNKLLTDYTEMKKAILHVYWEEFQKDPVGLMSRVAQPASKKIDQNKLKPEMDEKGNLTTAGFACSQCGQPLFVYKLEQVSEKGKAYTNYFGRCNVAEHEKLILLAQLKPEKDSDEAVTYSLGKFGQRALDFYSIHVTKESTHPVKPLAQIAGNRYASGPVGKALSDACMGTIASFLSKYQDIIIEHQKVVKGNQKRLESLRELAGKENLEYPSVTLPPQPHTKEGVDAYNEVIARVRMWVNLNLWQKLKLSRDDAKPLLRLKGFPSFPLVERQANEVDWWDMVCNVKKLINEKKEDGKVFWQNLAGYKRQEALRPYLSSEEDRKKGKKFARYQLGDLLLHLEKKHGEDWGKVYDEAWERIDKKVEGLSKHIKLEEERRSEDAQSKAALTDWLRAKASFVIEGLKEADKDEFCRCELKLQKWYGDLRGKPFAIEAENSILDISGFSKQYNCAFIWQKDGVKKLNLYLIINYFKGGKLRFKKIKPEAFEANRFYTVINKKSGEIVPMEVNFNFDDPNLIILPLAFGKRQGREFIWNDLLSLETGSLKLANGRVIEKTLYNRRTRQDEPALFVALTFERREVLDSSNIKPMNLIGVDRGENIPAVIALTDPEGCPLSRFKDSLGNPTHILRIGESYKEKQRTIQAKKEVEQRRAGGYSRKYASKAKNLADDMVRNTARDLLYYAVTQDAMLIFENLSRGFGRQGKRTFMAERQYTRMEDWLTAKLAYEGLPSKTYLSKTLAQYTSKTCSNCGFTITSADYDRVLEKLKKTATGWMTTINGKELKVEGQITYYNRYKRQNVVKDLSVELDRLSEESVNNDISSWTKGRSGEALSLLKKRFSHRPVQEKFVCLNCGFETHADEQAALNIARSWLFLRSQEYKKYQTNKTTGNTDKRAFVETWQSFYRKKLKEVWKPAV

SEQ ID NO: 2338 - protein, 978 aa, synthetic construct
QEIKRINKIRRRLVKDSNTKKAGKTGPMKTLLVRVMTPDLRERLENLRKKPENIPQPISNTSRANLNKLLTDYTEMKKAILHVYWEEFQKDPVGLMSRVAQPASKKIDQNKLKPEMDEKGNLTTAGFACSQCGQPLFVYKLEQVSEKGKAYTNYFGRCNVAEHEKLILLAQLKPEKDSDEAVTYSLGKFGQRALDFYSIHVTKESTHPVKPLAQIAGNRYASGPVGKALSDACMGTIASFLSKYQDIIIEHQKVVKGNQKRLESLRELAGKENLEYPSVTLPPQPHTKEGVDAYNEVIARVRMWVNLNLWQKLKLSRDDAKPLLRLKGFPSFPLVERQANEVDWWDMVCNVKKLINEKKEDGKVFWQNLAGYKRQEALRPYLSSEEDRKKGKKFARTQLGDLLLHLEKKHGEDWGKVYDEAWERIDKKVEGLSKHIKLEEERRSEDAQSKAALTDWLRAKASFVIEGLKEADKDEFCRCELKLQKWYGDLRGKPFAIEAENSILDISGFSKQYNCAFIWQKDGVKKLNLYLIINYFKGGKLRFKKIKPEAFEANRFYTVINKKSGEIVPMEVNFNFDDPNLIILPLAFGKRQGREFIWNDLLSLETGSLKLANGRVIEKTLYNRRTRQDEPALFVALTFERREVLDSSNIKPMNLIGVDRGENIPAVIALTDPEGCPLSRFKDSLGNPTHILRIGESYKEKQRTIQAKKEVEQRRAGGYSRKYASKAKNLADDMVRNTARDLLYYAVTQDAMLIFENLSRGFGRQGKRTFMAERQYTRMEDWLTAKLAYEGLPSKTYLSKTLAQYTSKTCSNCGFTITSADYDRMLEKLKKTATGWMTTINGKELKVEGQITYYNRYKRQNVVKDLSVELDRLSEESVNNDISSWTKGRSGEALSLLKKRFSHRPVQEKFVCLNCGFETHADEQAALNIARSWLFLRSQEYKKYQTNKTTGNTDKRAFVETWQSFYRKKLKEVWKPAV

SEQ ID NO: 2339 - protein, 978 aa, synthetic construct
QEIKRINKIRRRLVKDSNTKKAGKTGPMKTLLVRVMTPDLRERLENLRKKPENIPQPISNTSRANLNKLLTDYTEMKKAILHVYWEEFQKDPVGLMSRVAQPASKKIDQNKLKPEMDEKGNLTTAGFACSQCGQPLFVYKLEQVSEKGKAYTNYFGRCNVAEHEKLILLAQLKPEKDSDEAVTYSLGKFGQRALDFYSIHVTKESTHPVKPLAQIAGNRYASGPVGKALSDACMGTIASFLSKYQDIIIEHQKVVKGNQKRLESLRELAGKENLEYPSVTLPPQPHTKEGVDAYNEVIARVRMWVNLNLWQKLKLSRDDAKPLLRLKGFPSFPLVERQANEVDWWDMVCNVKKLINEKKEDGKVFWQNLAGYKRQEALRPYLSSEEDRKKGKKFARTQLGDLLLHLEKKHGEDWGKVYDEAWERIDKKVEGLSKHIKLEEERRSEDAQSKAALTDWLRAKASFVIEGLKEADKDEFCRCELKLQKWYGDLRGKPFAIEAENSILDISGFSKQYNCAFIWQKDGVKKLNLYLIINYFKGGKLRFKKIKPEAFEANRFYTVINKKSGEIVPMEVNFNFDDPNLIILPLAFGKRQGREFIWNDLLSLETGSLKLANGRVIEKTLYNRRTRQDEPALFVALTFERREVLDSSNIKPMNLIGVDRGENIPAVIALTDPEGCPLSRFKDSLGNPTHILRIGESYKEKQRTIQAKKEVEQRRAGGYSRKYASKAKNLADDMVRNTARDLLYYAVTQDAMLIFENLSRGFGRQGKRTFMAERQYTRMEDWLTAKLAYEGLPSKTYLSKTLAQYTSKTCSNCGFTITSADYDRVLEKLKKTATGWMTTINGKELKVEGQITYYNRYKRQNVVKDLSVELDRLSEESVNNDISSWDKGRSGEALSLLKKRFSHRPVQEKFVCLNCGFETHADEQAALNIARSWLFLRSQEYKKYQTNKTTGNTDKRAFVETWQSFYRKKLKEVWKPAV

SEQ ID NO: 2340 - protein, 978 aa, synthetic construct
QEIKRINKIRRRLVKDSNTKKAGKTGPMKTLLVRVMTPDLRERLENLRKKPENIPQPISNTSRANLNKLLTDYTEMKKAILHVYWEEFQKDPVGLMSRVAQPASKKIDQNKLKPEMDEKGNLTTAGFACSQCGQPLFVYKLEQVSEKGKAYTNYFGRCNVAEHEKLILLAQLKPEKDSDEAVTYSLGKFGQRALDFYSIHVTKESTHPVKPLAQIAGNRYASGPVGKALSDACMGTIASFLSKYQDIIIEHQKVVKGNQKRLESLRELAGKENLEYPSVTLPPQPHTKEGVDAYNEVIARVRMWVNLNLWQKLKLSRDDAKPLLRLKGFPSFPLVERQANEVDWWDMVCNVKKLINEKKEDGKVFWQNLAGYKRQEALRPYLSSEEDRKKGKKFARTQLGDLLLHLEKKHGEDWGKVYDEAWERIDKKVEGLSKHIKLEEERRSEDAQSKAALTDWLRAKASFVIEGLKEADKDEFCRCELKLQKWYGDLRGKPFAIEAENSILDISGFSKQYNCAFIWQKDGVKKLNLYLIINYFKGGKLRFKKIKPEAFEANRFYTVINKKSGEIVPMEVNFNFDDPNLIILPLAFGKRQGREFIWNDLLSLETGSLKLANGRVIEKTLYNRRTRQDEPALFVALTFERREVLDSSNIKPMNLIGVDRGENIPAVIALTDPEGCPLSRFKDSLGNPTHILRIGESYKEKQRTIQAKKEVEQRRAGGYSRKYASKAKNLADDMVRNTARDLLYYAVTQDAMLIFENLSRGFGRQGKRTFMAERQYTRMEDWLTAKLAYEGLPSKTYLSKTLAQYTSKTCSNCGFTITSADYDRVLEKLKKTATGWMTTINGKELKVEGQITYYNRYKRQNVVKDLSVELDRLSEESVNNDISSWTKGRQGEALSLLKKRFSHRPVQEKFVCLNCGFETHADEQAALNIARSWLFLRSQEYKKYQTNKTTGNTDKRAFVETWQSFYRKKLKEVWKPAV

SEQ ID NO: 2341 - protein, 979 aa, synthetic construct
QEIKRINKIRRRLVKDSNTKKAGKTRGPMKTLLVPVMTPDLRERLENLRKKPENIPQPISNTSRANLNKLLTDYTEMKKAILHVYWEEFQKDPVGLMSRVAQPASKKIDQNKLKPEMDEKGNLTTAGFACSQCGQPLFVYKLEQVSEKGKAYTNYFGRCNVAEHEKLILLAQLKPEKDSDEAVTYSLGKFGQRALDFYSIHVTKESTHPVKPLAQIAGNRYASGPVGKALSDACMGTIASFLSKYQDIIIEHQKVVKGNQKRLESLRELAGKENLEYPSVTLPPQPHTKEGVDAYNEVIARVRMWVNLNLWQKLKLSRDDAKPLLRLKGFPSFPLVERQANEVDWWDMVCNVKKLINEKKEDGKVFWQNLAGYKRQEALRPYLSSEEDRKKGKKFARYQLGDLLLHLEKKHGEDWGKVYDEAWERIDKKVEGLSKHIKLEEERRSEDAQSKAALTDWLRAKASFVIEGLKEADKDEFCRCELKLQKWYGDLRGKPFAIEAENSILDISGFSKQYNCAFIWQKDGVKKLNLYLIINYFKGGKLRFKKIKPEAFEANRFYTVINKKSGEIVPMEVNFNFDDPNLIILPLAFGKRQGREFIWNDLLSLETGSLKLANGRVIEKTLYNRRTRQDEPALFVALTFERREVLDSSNIKPMNLIGVDRGENIPAVIALTDPEGCPLSRFKDSLGNPTHILRIGESYKEKQRTIQAKKEVEQRRAGGYSRKYASKAKNLADDMVRNTARDLLYYAVTQDAMLIFENLSRGFGRQGKRTFMAERQYTRMEDWLTAKLAYEGLPSKTYLSKTLAQYTSKTCSNCGFTITSADYDRVLEKLKKTATGWMTTINGKELKVEGQITYYNRYKRQNVVKDLSVELDRLSEESVNNDISSWTKGRSGEALSLLKKRFSHRPVQEKFVCLNCGFETHADEQAALNIARSWLFLRSQEYKKYQTNKTTGNTDKRAFVETWQSFYRKKLKEVWKPAV

SEQ ID NO: 2342 - protein, 979 aa, synthetic construct
QEIKRINGIRRRLVKDSNTKKAGKTRGPMKTLLVRVMTPDLRERLENLRKKPENIPQPISNTSRANLNKLLTDYTEMKKAILHVYWEEFQKDPVGLMSRVAQPASKKIDQNKLKPEMDEKGNLTTAGFACSQCGQPLFVYKLEQVSEKGKAYTNYFGRCNVAEHEKLILLAQLKPEKDSDEAVTYSLGKFGQRALDFYSIHVTKESTHPVKPLAQIAGNRYASGPVGKALSDACMGTIASFLSKYQDIIIEHQKVVKGNQKRLESLRELAGKENLEYPSVTLPPQPHTKEGVDAYNEVIARVRMWVNLNLWQKLKLSRDDAKPLLRLKGFPSFPLVERQANEVDWWDMVCNVKKLINEKKEDGKVFWQNLAGYKRQEALRPYLSSEEDRKKGKKFARYQLGDLLLHLEKKHGEDWGKVYDEAWERIDKKVEGLSKHIKLEEERRSEDAQSKAALTDWLRAKASFVIEGLKEADKDEFCRCELKLQKWYGDLRGKPFAIEAENSILDISGFSKQYNCAFIWQKDGVKKLNLYLIINYFKGGKLRFKKIKPEAFEANRFYTVINKKSGEIVPMEVNFNFDDPNLIILPLAFGKRQGREFIWNDLLSLETGSLKLANGRVIEKTLYNRRTRQDEPALFVALTFERREVLDSSNIKPMNLIGVDRGENIPAVIALTDPEGCPLSRFKDSLGNPTHILRIGESYKEKQRTIQAKKEVEQRRAGGYSRKYASKAKNLADDMVRNTARDLLYYAVTQDAMLIFENLSRGFGRQGKRTFMAERQYTRMEDWLTAKLAYEGLPSKTYLSKTLAQYTSKTCSNCGFTITSADYDRVLEKLKKTATGWMTTINGKELKVEGQITYYNRYKRQNVVKDLSVELDRLSEESVNNDISSWTKGRSGEALSLLKKRFSHRPVQEKFVCLNCGFETHADEQAALNIARSWLFLRSQEYKKYQTNKTTGNTDKRAFVETWQSFYRKKLKEVWKPAV

SEQ ID NO: 2343 - protein, 979 aa, synthetic construct
QEIGKRINGIRRRLVKDSNTKKAGKTGPMKTLLVRVMTPDLRERLENLRKKPENIPQPISNTSRANLNKLLTDYTEMKKAILHVYWEEFQKDPVGLMSRVAQPASKKIDQNKLKPEMDEKGNLTTAGFACSQCGQPLFVYKLEQVSEKGKAYTNYFGRCNVAEHEKLILLAQLKPEKDSDEAVTYSLGKFGQRALDFYSIHVTKESTHPVKPLAQIAGNRYASGPVGKALSDACMGTIASFLSKYQDIIIEHQKVVKGNQKRLESLRELAGKENLEYPSVTLPPQPHTKEGVDAYNEVIARVRMWVNLNLWQKLKLSRDDAKPLLRLKGFPSFPLVERQANEVDWWDMVCNVKKLINEKKEDGKVFWQNLAGYKRQEALRPYLSSEEDRKKGKKFARYQLGDLLLHLEKKHGEDWGKVYDEAWERIDKKVEGLSKHIKLEEERRSEDAQSKAALTDWLRAKASFVIEGLKEADKDEFCRCELKLQKWYGDLRGKPFAIEAENSILDISGFSKQYNCAFIWQKDGVKKLNLYLIINYFKGGKLRFKKIKPEAFEANRFYTVINKKSGEIVPMEVNFNFDDPNLIILPLAFGKRQGREFIWNDLLSLETGSLKLANGRVIEKTLYNRRTRQDEPALFVALTFERREVLDSSNIKPMNLIGVDRGENIPAVIALTDPEGCPLSRFKDSLGNPTHILRIGESYKEKQRTIQAKKEVEQRRAGGYSRKYASKAKNLADDMVRNTARDLLYYAVTQDAMLIFENLSRGFGRQGKRTFMAERQYTRMEDWLTAKLAYEGLPSKTYLSKTLAQYTSKTCSNCGFTITSADYDRVLEKLKKTATGWMTTINGKELKVEGQITYYNRYKRQNVVKDLSVELDRLSEESVNNDISSWTKGRSGEALSLLKKRFSHRPVQEKFVCLNCGFETHADEQAALNIARSWLFLRSQEYKKYQTNKTTGNTDKRAFVETWQSFYRKKLKEVWKPAV

SEQ ID NO: 2344 - protein, 979 aa, synthetic construct
QEGGKRINKIRRRLVKDSNTKKAGKTGPMKTLLVRVMTPDLRERLENLRKKPENIPQPISNTSRANLNKLLTDYTEMKKAILHVYWEEFQKDPVGLMSRVAQPASKKIDQNKLKPEMDEKGNLTTAGFACSQCGQPLFVYKLEQVSEKGKAYTNYFGRCNVAEHEKLILLAQLKPEKDSDEAVTYSLGKFGQRALDFYSIHVTKESTHPVKPLAQIAGNRYASGPVGKALSDACMGTIASFLSKYQDIIIEHQKVVKGNQKRLESLRELAGKENLEYPSVTLPPQPHTKEGVDAYNEVIARVRMWVNLNLWQKLKLSRDDAKPLLRLKGFPSFPLVERQANEVDWWDMVCNVKKLINEKKEDGKVFWQNLAGYKRQEALRPYLSSEEDRKKGKKFARYQLGDLLLHLEKKHGEDWGKVYDEAWERIDKKVEGLSKHIKLEEERRSEDAQSKAALTDWLRAKASFVIEGLKEADKDEFCRCELKLQKWYGDLRGKPFAIEAENSILDISGFSKQYNCAFIWQKDGVKKLNLYLIINYFKGGKLRFKKIKPEAFEANRFYTVINKKSGEIVPMEVNFNFDDPNLIILPLAFGKRQGREFIWNDLLSLETGSLKLANGRVIEKTLYNRRTRQDEPALFVALTFERREVLDSSNIKPMNLIGVDRGENIPAVIALTDPEGCPLSRFKDSLGNPTHILRIGESYKEKQRTIQAKKEVEQRRAGGYSRKYASKAKNLADDMVRNTARDLLYYAVTQDAMLIFENLSRGFGRQGKRTFMAERQYTRMEDWLTAKLAYEGLPSKTYLSKTLAQYTSKTCSNCGFTITSADYDRVLEKLKKTATGWMTTINGKELKVEGQITYYNRYKRQNVVKDLSVELDRLSEESVNNDISSWTKGRSGEALSLLKKRFSHRPVQEKFVCLNCGFETHADEQAALNIARSWLFLRSQEYKKYQTNKTTGNTDKRAFVETWQSFYRKKLKEVWKPAV

SEQ ID NO: 2345 - protein, 978 aa, synthetic construct
QEIKRINKIRRRLVKDSNTKKAGKTGPMKTLLVRVMTPDLRERLENLRKKPENIPQPISNTSRANLNKLLTDYTEMKKAILHVYWEEFQKDPVGLMSRVAQPASKKIDQNKLKPEMDEKGNLTTAGFACSQCGQPLFVYKLEQVSEKGKAYTNYFGRCNVAEHEKLILLAQLKPEKDSDEAVTYSLGKFGQRALDFYSIHVTKESTHPVKPLAQIAGNRYASGPVGKALSDACMGTIASFLSKYQDIIIEHQKVVKGNQKRLESLRELAGKENLEYPSVTLPPQPHTKEGVDAYNEVIARVRMWVNLNLWQKLKLSRDDAKPLLRLKGFPSFPLVERQANEVDWWDMVCNVKKLINEKKEDGKVFWQNLAGYKRQEALRPYLSSEEDRKKGKKFARYQLGDLLLHLEKKHGEDWGKVYDEAWERIDKKVEGLSKHIKLEEERRSEDAQSKAALTDWLRAKASFVIEGLKEADKDEFCRCELKLQKWYGDLRGKPFAIEAENSILDISGFSKQYNCAFIWQKDGVKKLNLYLIINYFKGGKLRFKKIKPEAFEANRFYTVINKKSGEIVPMEVNFNFDDPNLIILPLAFGKRQGREFIWNDLLSLETGSLKLANGRVIEKTLYNRRTRQDEPALFVALTFERREVLDSSNIKPMNLIGVDRGENIPAVIALTDPEGCPLSRFKDSLGNPTHILRIGESYKEKQRTIQAKKEVEQRRAGGYSRKYASKAKNLADDMVRNTARDLLYYAVTQDAMLIFENLSRGFGRQGKRTFMAERQYTRMEDWLTAKLAYEGLPSKTYLSKTLAQYTSKTCSNCGFTITSADYDRMLEKLKKTATGWMTTINGKELKVEGQITYYNRYKRQNVVKDLSVELDRLSEESVNNDISSWDKGRSGEALSLLKKRFSHRPVQEKFVCLNCGFETHADEQAALNIARSWLFLRSQEYKKYQTNKTTGNTDKRAFVETWQSFYRKKLKEVWKPAV

SEQ ID NO: 2346 - protein, 978 aa, synthetic construct
QEIKRINKIRRRLVKDSNTKKAGKTGPMKTLLVRVMTPDLRERLENLRKKPENIPQPISNTSRANLNKLLTDYTEMKKAILHVYWEEFQKDPVGLMSRVAQPASKKIDQNKLKPEMDEKGNLTTAGFACSQCGQPLFVYKLEQVSEKGKAYTNYFGRCNVAEHEKLILLAQLKPEKDSDEAVTYSLGKFGQRALDFYSIHVTKESTHPVKPLAQIAGNRYASGPVGKALSDACMGTIASFLSKYQDIIIEHQKVVKGNQKRLESLRELAGKENLEYPSVTLPPQPHTKEGVDAYNEVIARVRMWVNLNLWQKLKLSRDDAKPLLRLKGFPSFPLVERQANEVDWWDMVCNVKKLINEKKEDGKVFWQNLAGYKRQEALRPYLSSEEDRKKGKKFARYQLGDLLLHLEKKHGEDWGKVYDEAWERIDKKVEGLSKHIKLEEERRSEDAQSKAALTDWLRAKASFVIEGLKEADKDEFCRCELKLQKWYGDLRGKPFAIEAENSILDISGFSKQYNCAFIWQKDGVKKLNLYLIINYFKGGKLRFKKIKPEAFEANRFYTVINKKSGEIVPMEVNFNFDDPNLIILPLAFGKRQGREFIWNDLLSLETGSLKLANGRVIEKTLYNRRTRQDEPALFVALTFERREVLDSSNIKPMNLIGVDRGENIPAVIALTDPEGCPLSRFKDSLGNPTHILRIGESYKEKQRTIQAKKEVEQRRAGGYSRKYASKAKNLADDMVRNTARDLLYYAVTQDAMLIFENLSRGFGRQGKRTFMAERQYTRMEDWLTAKLAYEGLPSKTYLSKTLAQYTSKTCSNCGFTITSADYDRMLEKLKKTATGWMTTINGKELKVEGQITYYNRYKRQNVVKDLSVELDRLSEESVNNDISSWTKGRQGEALSLLKKRFSHRPVQEKFVCLNCGFETHADEQAALNIARSWLFLRSQEYKKYQTNKTTGNTDKRAFVETWQSFYRKKLKEVWKPAV

SEQ ID NO: 2347 - protein, 979 aa, synthetic construct
QEIGRINKIRRRLVKDSNTKKAGKTRGPMKTLLVRVMTPDLRERLENLRKKPENIPQPISNTSRANLNKLLTDYTEMKKAILHVYWEEFQKDPVGLMSRVAQPASKKIDQNKLKPEMDEKGNLTTAGFACSQCGQPLFVYKLEQVSEKGKAYTNYFGRCNVAEHEKLILLAQLKPEKDSDEAVTYSLGKFGQRALDFYSIHVTKESTHPVKPLAQIAGNRYASGPVGKALSDACMGTIASFLSKYQDIIIEHQKVVKGNQKRLESLRELAGKENLEYPSVTLPPQPHTKEGVDAYNEVIARVRMWVNLNLWQKLKLSRDDAKPLLRLKGFPSFPLVERQANEVDWWDMVCNVKKLINEKKEDGKVFWQNLAGYKRQEALRPYLSSEEDRKKGKKFARYQLGDLLLHLEKKHGEDWGKVYDEAWERIDKKVEGLSKHIKLEEERRSEDAQSKAALTDWLRAKASFVIEGLKEADKDEFCRCELKLQKWYGDLRGKPFAIEAENSILDISGFSKQYNCAFIWQKDGVKKLNLYLIINYFKGGKLRFKKIKPEAFEANRFYTVINKKSGEIVPMEVNFNFDDPNLIILPLAFGKRQGREFIWNDLLSLETGSLKLANGRVIEKTLYNRRTRQDEPALFVALTFERREVLDSSNIKPMNLIGVDRGENIPAVIALTDPEGCPLSRFKDSLGNPTHILRIGESYKEKQRTIQAKKEVEQRRAGGYSRKYASKAKNLADDMVRNTARDLLYYAVTQDAMLIFENLSRGFGRQGKRTFMAERQYTRMEDWLTAKLAYEGLPSKTYLSKTLAQYTSKTCSNCGFTITSADYDRVLEKLKKTATGWMTTINGKELKVEGQITYYNRYKRQNVVKDLSVELDRLSEESVNNDISSWTKGRSGEALSLLKKRFSHRPVQEKFVCLNCGFETHADEQAALNIARSWLFLRSQEYKKYQTNKTTGNTDKRAFVETWQSFYRKKLKEVWKPAV

SEQ ID NO: 2348 - protein, 978 aa, synthetic construct
QEIGRINKIRRRLVKDSNTKKAGKTGPMKTLLVRVMTPDLRERLENLRKKPENIPQPISNTSRANLNKLLTDYTEMKKAILHVYWEEFQKDPVGLMSRVAQPASKKIDQNKLKPEMDEKGNLTTAGFACSQCGQPLFVYKLEQVSEKGKAYTNYFGRCNVAEHEKLIKLAQLKPEKDSDEAVTYSLGKFGQRALDFYSIHVTKESTHPVKPLAQIAGNRYASGPVGKALSDACMGTIASFLSKYQDIIIEHQKVVKGNQKRLESLRELAGKENLEYPSVTLPPQPHTKEGVDAYNEVIARVRMWVNLNLWQKLKLSRDDAKPLLRLKGFPSFPLVERQANEVDWWDMVCNVKKLINEKKEDGKVFWQNLAGYKRQEALRPYLSSEEDRKKGKKFARYQLGDLLLHLEKKHGEDWGKVYDEAWERIDKKVEGLSKHIKLEEERRSEDAQSKAALTDWLRAKASFVIEGLKEADKDEFCRCELKLQKWYGDLRGKPFAIEAENSILDISGFSKQYNCAFIWQKDGVKKLNLYLIINYFKGGKLRFKKIKPEAFEANRFYTVINKKSGEIVPMEVNFNFDDPNLIILPLAFGKRQGREFIWNDLLSLETGSLKLANGRVIEKTLYNRRTRQDEPALFVALTFERREVLDSSNIKPMNLIGVDRGENIPAVIALTDPEGCPLSRFKDSLGNPTHILRIGESYKEKQRTIQAKKEVEQRRAGGYSRKYASKAKNLADDMVRNTARDLLYYAVTQDAMLIFENLSRGFGRQGKRTFMAERQYTRMEDWLTAKLAYEGLPSKTYLSKTLAQYTSKTCSNCGFTITSADYDRVLEKLKKTATGWMTTINGKELKVEGQITYYNRYKRQNVVKDLSVELDRLSEESVNNDISSWTKGRSGEALSLLKKRFSHRPVQEKFVCLNCGFETHADEQAALNIARSWLFLRSQEYKKYQTNKTTGNTDKRAFVETWQSFYRKKLKEVWKPAV

SEQ ID NO: 2349 - protein, 978 aa, synthetic construct
QEIGRINKIRRRLVKDSNTKKAGKTGPMKTLLVRVMTPDLRERLENLRKKPENIPQPISNTSRANLNKLLTDYTEMKKAILHVYWEEFQKDPVGLMSRVAQPASKKIDQNKLKPEMDEKGNLTTAGFACSQCGQPLFVYKLEQVSEKGKAYTNYFGRCNVAEHEKLILLDQLKPEKDSDEAVTYSLGKFGQRALDFYSIHVTKESTHPVKPLAQIAGNRYASGPVGKALSDACMGTIASFLSKYQDIIIEHQKVVKGNQKRLESLRELAGKENLEYPSVTLPPQPHTKEGVDAYNEVIARVRMWVNLNLWQKLKLSRDDAKPLLRLKGFPSFPLVERQANEVDWWDMVCNVKKLINEKKEDGKVFWQNLAGYKRQEALRPYLSSEEDRKKGKKFARYQLGDLLLHLEKKHGEDWGKVYDEAWERIDKKVEGLSKHIKLEEERRSEDAQSKAALTDWLRAKASFVIEGLKEADKDEFCRCELKLQKWYGDLRGKPFAIEAENSILDISGFSKQYNCAFIWQKDGVKKLNLYLIINYFKGGKLRFKKIKPEAFEANRFYTVINKKSGEIVPMEVNFNFDDPNLIILPLAFGKRQGREFIWNDLLSLETGSLKLANGRVIEKTLYNRRTRQDEPALFVALTFERREVLDSSNIKPMNLIGVDRGENIPAVIALTDPEGCPLSRFKDSLGNPTHILRIGESYKEKQRTIQAKKEVEQRRAGGYSRKYASKAKNLADDMVRNTARDLLYYAVTQDAMLIFENLSRGFGRQGKRTFMAERQYTRMEDWLTAKLAYEGLPSKTYLSKTLAQYTSKTCSNCGFTITSADYDRVLEKLKKTATGWMTTINGKELKVEGQITYYNRYKRQNVVKDLSVELDRLSEESVNNDISSWTKGRSGEALSLLKKRFSHRPVQEKFVCLNCGFETHADEQAALNIARSWLFLRSQEYKKYQTNKTTGNTDKRAFVETWQSFYRKKLKEVWKPAV

SEQ ID NO: 2350 - protein, 978 aa, synthetic construct
QEIGRINKIRRRLVKDSNTKKAGKTGPMKTLLVRVMTPDLRERLENLRKKPENIPQPISNTSRANLNKLLTDYTEMKKAILHVYWEEFQKDPVGLMSRVAQPASKKIDQNKLKPEMDEKGNLTTAGFACSQCGQPLFVYKLEQVSEKGKAYTNYFGRCNVAEHEKLILLAQLKPEKDSDEAVTYSLGKFGQRALDFYSIHVTKESTHPVKPLAQIAGNRYASGPVGKALSDACMGTIASFLSKYQDIIIEHQKVVKGNQKRLESLRELAGKENLEYPSVTLPPQPHTKEGVDAYNEVIARVRTWVNLNLWQKLKLSRDDAKPLLRLKGFPSFPLVERQANEVDWWDMVCNVKKLINEKKEDGKVFWQNLAGYKRQEALRPYLSSEEDRKKGKKFARYQLGDLLLHLEKKHGEDWGKVYDEAWERIDKKVEGLSKHIKLEEERRSEDAQSKAALTDWLRAKASFVIEGLKEADKDEFCRCELKLQKWYGDLRGKPFAIEAENSILDISGFSKQYNCAFIWQKDGVKKLNLYLIINYFKGGKLRFKKIKPEAFEANRFYTVINKKSGEIVPMEVNFNFDDPNLIILPLAFGKRQGREFIWNDLLSLETGSLKLANGRVIEKTLYNRRTRQDEPALFVALTFERREVLDSSNIKPMNLIGVDRGENIPAVIALTDPEGCPLSRFKDSLGNPTHILRIGESYKEKQRTIQAKKEVEQRRAGGYSRKYASKAKNLADDMVRNTARDLLYYAVTQDAMLIFENLSRGFGRQGKRTFMAERQYTRMEDWLTAKLAYEGLPSKTYLSKTLAQYTSKTCSNCGFTITSADYDRVLEKLKKTATGWMTTINGKELKVEGQITYYNRYKRQNVVKDLSVELDRLSEESVNNDISSWTKGRSGEALSLLKKRFSHRPVQEKFVCLNCGFETHADEQAALNIARSWLFLRSQEYKKYQTNKTTGNTDKRAFVETWQSFYRKKLKEVWKPAV

SEQ ID NO: 2351 - protein, 978 aa, synthetic construct
QEIGRINKIRRRLVKDSNTKKAGKTGPMKTLLVRVMTPDLRERLENLRKKPENIPQPISNTSRANLNKLLTDYTEMKKAILHVYWEEFQKDPVGLMSRVAQPASKKIDQNKLKPEMDEKGNLTTAGFACSQCGQPLFVYKLEQVSEKGKAYTNYFGRCNVAEHEKLILLAQLKPEKDSDEAVTYSLGKFGQRALDFYSIHVTKESTHPVKPLAQIAGNRYASGPVGKALSDACMGTIASFLSKYQDIIIEHQKVVKGNQKRLESLRELAGKENLEYPSVTLPPQPHTKEGVDAYNEVIARVRMWVNLNLWQKLKLSRDDAKPLLRLKGFPSFPLVERQANEVDWWDMVCNVKKLINEKKEDGKVFWQNLAGYKRQEALRPYLSSEEDRKKGKKFARTQLGDLLLHLEKKHGEDWGKVYDEAWERIDKKVEGLSKHIKLEEERRSEDAQSKAALTDWLRAKASFVIEGLKEADKDEFCRCELKLQKWYGDLRGKPFAIEAENSILDISGFSKQYNCAFIWQKDGVKKLNLYLIINYFKGGKLRFKKIKPEAFEANRFYTVINKKSGEIVPMEVNFNFDDPNLIILPLAFGKRQGREFIWNDLLSLETGSLKLANGRVIEKTLYNRRTRQDEPALFVALTFERREVLDSSNIKPMNLIGVDRGENIPAVIALTDPEGCPLSRFKDSLGNPTHILRIGESYKEKQRTIQAKKEVEQRRAGGYSRKYASKAKNLADDMVRNTARDLLYYAVTQDAMLIFENLSRGFGRQGKRTFMAERQYTRMEDWLTAKLAYEGLPSKTYLSKTLAQYTSKTCSNCGFTITSADYDRVLEKLKKTATGWMTTINGKELKVEGQITYYNRYKRQNVVKDLSVELDRLSEESVNNDISSWTKGRSGEALSLLKKRFSHRPVQEKFVCLNCGFETHADEQAALNIARSWLFLRSQEYKKYQTNKTTGNTDKRAFVETWQSFYRKKLKEVWKPAV

SEQ ID NO: 2352 - protein, 978 aa, synthetic construct
QEIGRINKIRRRLVKDSNTKKAGKTGPMKTLLVRVMTPDLRERLENLRKKPENIPQPISNTSRANLNKLLTDYTEMKKAILHVYWEEFQKDPVGLMSRVAQPASKKIDQNKLKPEMDEKGNLTTAGFACSQCGQPLFVYKLEQVSEKGKAYTNYFGRCNVAEHEKLILLAQLKPEKDSDEAVTYSLGKFGQRALDFYSIHVTKESTHPVKPLAQIAGNRYASGPVGKALSDACMGTIASFLSKYQDIIIEHQKVVKGNQKRLESLRELAGKENLEYPSVTLPPQPHTKEGVDAYNEVIARVRMWVNLNLWQKLKLSRDDAKPLLRLKGFPSFPLVERQANEVDWWDMVCNVKKLINEKKEDGKVFWQNLAGYKRQEALRPYLSSEEDRKKGKKFARYQLGDLLLHLEKKHGEDWGKVYDEAWERIDKKVEGLSKHIKLEEERRSEDAQSKAALTDWLRAKASFVIEGLKEADKDEFCRCELKLQKWYGDLRGKPFAIEAENSILDISGFSKQYNCAFIWQKDGVKKLNLYLIINYFKGGKLRFKKIKPEAFEANRFYTVINKKSGEIVPMEVNFNFDDPNLIILPLAFGKRQGREFIWNDLLSLETGSLKLANGRVIEKTLYNRRTRQDEPALFVALTFERREVLDSSNIKPMNLIGVDRGENIPAVIALTDPEGCPLSRFKDSLGNPTHILRIGESYKEKQRTIQAKKEVEQRRAGGYSRKYASKAKNLADDMVRNTARDLLYYAVTQDAMLIFENLSRGFGRQGKRTFMAERQYTRMEDWLTAKLAYEGLPSKTYLSKTLAQYTSKTCSNCGFTITSADYDRVLEKLKKTATGWMTTINGKELKVEGQITYYNRYKRQNVVKDLSVELDRLSEESVNNDISSWTKGRQGEALSLLKKRFSHRPVQEKFVCLNCGFETHADEQAALNIARSWLFLRSQEYKKYQTNKTTGNTDKRAFVETWQSFYRKKLKEVWKPAV

SEQ ID NO: 2353 - protein, 982 aa, synthetic construct
QEIKGRINKIRRRLVKDSNTKKAGKTRKTGPMKTLLVRVMTPDLRERLENLRKKPENIPQPISNTSRANLNKLLTDYTEMKKAILHVYWEEFQKDPVGLMSRVAQPASKKIDQNKLKPEMDEKGNLTTAGFACSQCGQPLFVYKLEQVSEKGKAYTNYFGRCNVAEHEKLILLAQLKPEKDSDEAVTYSLGKFGQRALDFYSIHVTKESTHPVKPLAQIAGNRYASGPVGKALSDACMGTIASFLSKYQDIIIEHQKVVKGNQKRLESLRELAGKENLEYPSVTLPPQPHTKEGVDAYNEVIARVRMWVNLNLWQKLKLSRDDAKPLLRLKGFPSFPLVERQANEVDWWDMVCNVKKLINEKKEDGKVFWQNLAGYKRQEALRPYLSSEEDRKKGKKFARYQLGDLLLHLEKKHGEDWGKVYDEAWERIDKKVEGLSKHIKLEEERRSEDAQSKAALTDWLRAKASFVIEGLKEADKDEFCRCELKLQKWYGDLRGKPFAIEAENSILDISGFSKQYNCAFIWQKDGVKKLNLYLIINYFKGGKLRFKKIKPEAFEANRFYTVINKKSGEIVPMEVNFNFDDPNLIILPLAFGKRQGREFIWNDLLSLETGSLKLANGRVIEKTLYNRRTRQDEPALFVALTFERREVLDSSNIKPMNLIGVDRGENIPAVIALTDPEGCPLSRFKDSLGNPTHILRIGESYKEKQRTIQAKKEVEQRRAGGYSRKYASKAKNLADDMVRNTARDLLYYAVTQDAMLIFENLSRGFGRQGKRTFMAERQYTRMEDWLTAKLAYEGLPSKTYLSKTLAQYTSKTCSNCGFTITSADYDRVLEKLKKTATGWMTTINGKELKVEGQITYYNRYKRQNVVKDLSVELDRLSEESVNNDISSWTKGRSGEALSLLKKRFSHRPVQEKFVCLNCGFETHADEQAALNIARSWLFLRSQEYKKYQTNKTTGNTDKRAFVETWQSFYRKKLKEVWKPAV

SEQ ID NO: 2354 - protein, 979 aa, synthetic construct
QEIKGRINKIRRRLVKDSNTKKAGKTGPMKTLLVRVMTPDLRERLENLRKKPENIPQPISNTSRANLNKLLTDYTEMKKAILHVYWEEFQKDPVGLMSRVAQPASKKIDQNKLKPEMDEKGNLTTAGFACSQCGQPLFVYKLEQVSEKGKAYTNYFGRCNVAEHEKLIKLAQLKPEKDSDEAVTYSLGKFGQRALDFYSIHVTKESTHPVKPLAQIAGNRYASGPVGKALSDACMGTIASFLSKYQDIIIEHQKVVKGNQKRLESLRELAGKENLEYPSVTLPPQPHTKEGVDAYNEVIARVRMWVNLNLWQKLKLSRDDAKPLLRLKGFPSFPLVERQANEVDWWDMVCNVKKLINEKKEDGKVFWQNLAGYKRQEALRPYLSSEEDRKKGKKFARYQLGDLLLHLEKKHGEDWGKVYDEAWERIDKKVEGLSKHIKLEEERRSEDAQSKAALTDWLRAKASFVIEGLKEADKDEFCRCELKLQKWYGDLRGKPFAIEAENSILDISGFSKQYNCAFIWQKDGVKKLNLYLIINYFKGGKLRFKKIKPEAFEANRFYTVINKKSGEIVPMEVNFNFDDPNLIILPLAFGKRQGREFIWNDLLSLETGSLKLANGRVIEKTLYNRRTRQDEPALFVALTFERREVLDSSNIKPMNLIGVDRGENIPAVIALTDPEGCPLSRFKDSLGNPTHILRIGESYKEKQRTIQAKKEVEQRRAGGYSRKYASKAKNLADDMVRNTARDLLYYAVTQDAMLIFENLSRGFGRQGKRTFMAERQYTRMEDWLTAKLAYEGLPSKTYLSKTLAQYTSKTCSNCGFTITSADYDRVLEKLKKTATGWMTTINGKELKVEGQITYYNRYKRQNVVKDLSVELDRLSEESVNNDISSWTKGRSGEALSLLKKRFSHRPVQEKFVCLNCGFETHADEQAALNIARSWLFLRSQEYKKYQTNKTTGNTDKRAFVETWQSFYRKKLKEVWKPAV

SEQ ID NO: 2355 - protein, 979 aa, synthetic construct
QEIKGRINKIRRRLVKDSNTKKAGKTGPMKTLLVRVMTPDLRERLENLRKKPENIPQPISNTSRANLNKLLTDYTEMKKAILHVYWEEFQKDPVGLMSRVAQPASKKIDQNKLKPEMDEKGNLTTAGFACSQCGQPLFVYKLEQVSEKGKAYTNYFGRCNVAEHEKLILLDQLKPEKDSDEAVTYSLGKFGQRALDFYSIHVTKESTHPVKPLAQIAGNRYASGPVGKALSDACMGTIASFLSKYQDIIIEHQKVVKGNQKRLESLRELAGKENLEYPSVTLPPQPHTKEGVDAYNEVIARVRMWVNLNLWQKLKLSRDDAKPLLRLKGFPSFPLVERQANEVDWWDMVCNVKKLINEKKEDGKVFWQNLAGYKRQEALRPYLSSEEDRKKGKKFARYQLGDLLLHLEKKHGEDWGKVYDEAWERIDKKVEGLSKHIKLEEERRSEDAQSKAALTDWLRAKASFVIEGLKEADKDEFCRCELKLQKWYGDLRGKPFAIEAENSILDISGFSKQYNCAFIWQKDGVKKLNLYLIINYFKGGKLRFKKIKPEAFEANRFYTVINKKSGEIVPMEVNFNFDDPNLIILPLAFGKRQGREFIWNDLLSLETGSLKLANGRVIEKTLYNRRTRQDEPALFVALTFERREVLDSSNIKPMNLIGVDRGENIPAVIALTDPEGCPLSRFKDSLGNPTHILRIGESYKEKQRTIQAKKEVEQRRAGGYSRKYASKAKNLADDMVRNTARDLLYYAVTQDAMLIFENLSRGFGRQGKRTFMAERQYTRMEDWLTAKLAYEGLPSKTYLSKTLAQYTSKTCSNCGFTITSADYDRVLEKLKKTATGWMTTINGKELKVEGQITYYNRYKRQNVVKDLSVELDRLSEESVNNDISSWTKGRSGEALSLLKKRFSHRPVQEKFVCLNCGFETHADEQAALNIARSWLFLRSQEYKKYQTNKTTGNTDKRAFVETWQSFYRKKLKEVWKPAV

SEQ ID NO: 2356 - protein, 979 aa, synthetic construct
QEIKGRINKIRRRLVKDSNTKKAGKTGPMKTLLVRVMTPDLRERLENLRKKPENIPQPISNTSRANLNKLLTDYTEMKKAILHVYWEEFQKDPVGLMSRVAQPASKKIDQNKLKPEMDEKGNLTTAGFACSQCGQPLFVYKLEQVSEKGKAYTNYFGRCNVAEHEKLILLAQLKPEKDSDEAVTYSLGKFGQRALDFYSIHVTKESTHPVKPLAQIAGNRYASGPVGKALSDACMGTIASFLSKYQDIIIEHQKVVKGNQKRLESLRELAGKENLEYPSVTLPPQPHTKEGVDAYNEVIARVRTWVNLNLWQKLKLSRDDAKPLLRLKGFPSFPLVERQANEVDWWDMVCNVKKLINEKKEDGKVFWQNLAGYKRQEALRPYLSSEEDRKKGKKFARYQLGDLLLHLEKKHGEDWGKVYDEAWERIDKKVEGLSKHIKLEEERRSEDAQSKAALTDWLRAKASFVIEGLKEADKDEFCRCELKLQKWYGDLRGKPFAIEAENSILDISGFSKQYNCAFIWQKDGVKKLNLYLIINYFKGGKLRFKKIKPEAFEANRFYTVINKKSGEIVPMEVNFNFDDPNLIILPLAFGKRQGREFIWNDLLSLETGSLKLANGRVIEKTLYNRRTRQDEPALFVALTFERREVLDSSNIKPMNLIGVDRGENIPAVIALTDPEGCPLSRFKDSLGNPTHILRIGESYKEKQRTIQAKKEVEQRRAGGYSRKYASKAKNLADDMVRNTARDLLYYAVTQDAMLIFENLSRGFGRQGKRTFMAERQYTRMEDWLTAKLAYEGLPSKTYLSKTLAQYTSKTCSNCGFTITSADYDRVLEKLKKTATGWMTTINGKELKVEGQITYYNRYKRQNVVKDLSVELDRLSEESVNNDISSWTKGRSGEALSLLKKRFSHRPVQEKFVCLNCGFETHADEQAALNIARSWLFLRSQEYKKYQTNKTTGNTDKRAFVETWQSFYRKKLKEVWKPAV

SEQ ID NO: 2357 - protein, 979 aa, synthetic construct
QEIKGRINKIRRRLVKDSNTKKAGKTGPMKTLLVRVMTPDLRERLENLRKKPENIPQPISNTSRANLNKLLTDYTEMKKAILHVYWEEFQKDPVGLMSRVAQPASKKIDQNKLKPEMDEKGNLTTAGFACSQCGQPLFVYKLEQVSEKGKAYTNYFGRCNVAEHEKLILLAQLKPEKDSDEAVTYSLGKFGQRALDFYSIHVTKESTHPVKPLAQIAGNRYASGPVGKALSDACMGTIASFLSKYQDIIIEHQKVVKGNQKRLESLRELAGKENLEYPSVTLPPQPHTKEGVDAYNEVIARVRMWVNLNLWQKLKLSRDDAKPLLRLKGFPSFPLVERQANEVDWWDMVCNVKKLINEKKEDGKVFWQNLAGYKRQEALRPYLSSEEDRKKGKKFARTQLGDLLLHLEKKHGEDWGKVYDEAWERIDKKVEGLSKHIKLEEERRSEDAQSKAALTDWLRAKASFVIEGLKEADKDEFCRCELKLQKWYGDLRGKPFAIEAENSILDISGFSKQYNCAFIWQKDGVKKLNLYLIINYFKGGKLRFKKIKPEAFEANRFYTVINKKSGEIVPMEVNFNFDDPNLIILPLAFGKRQGREFIWNDLLSLETGSLKLANGRVIEKTLYNRRTRQDEPALFVALTFERREVLDSSNIKPMNLIGVDRGENIPAVIALTDPEGCPLSRFKDSLGNPTHILRIGESYKEKQRTIQAKKEVEQRRAGGYSRKYASKAKNLADDMVRNTARDLLYYAVTQDAMLIFENLSRGFGRQGKRTFMAERQYTRMEDWLTAKLAYEGLPSKTYLSKTLAQYTSKTCSNCGFTITSADYDRVLEKLKKTATGWMTTINGKELKVEGQITYYNRYKRQNVVKDLSVELDRLSEESVNNDISSWTKGRSGEALSLLKKRFSHRPVQEKFVCLNCGFETHADEQAALNIARSWLFLRSQEYKKYQTNKTTGNTDKRAFVETWQSFYRKKLKEVWKPAV

SEQ ID NO: 2358 - protein, 979 aa, synthetic construct
QEIKGRINKIRRRLVKDSNTKKAGKTGPMKTLLVRVMTPDLRERLENLRKKPENIPQPISNTSRANLNKLLTDYTEMKKAILHVYWEEFQKDPVGLMSRVAQPASKKIDQNKLKPEMDEKGNLTTAGFACSQCGQPLFVYKLEQVSEKGKAYTNYFGRCNVAEHEKLILLAQLKPEKDSDEAVTYSLGKFGQRALDFYSIHVTKESTHPVKPLAQIAGNRYASGPVGKALSDACMGTIASFLSKYQDIIIEHQKVVKGNQKRLESLRELAGKENLEYPSVTLPPQPHTKEGVDAYNEVIARVRMWVNLNLWQKLKLSRDDAKPLLRLKGFPSFPLVERQANEVDWWDMVCNVKKLINEKKEDGKVFWQNLAGYKRQEALRPYLSSEEDRKKGKKFARYQLGDLLLHLEKKHGEDWGKVYDEAWERIDKKVEGLSKHIKLEEERRSEDAQSKAALTDWLRAKASFVIEGLKEADKDEFCRCELKLQKWYGDLRGKPFAIEAENSILDISGFSKQYNCAFIWQKDGVKKLNLYLIINYFKGGKLRFKKIKPEAFEANRFYTVINKKSGEIVPMEVNFNFDDPNLIILPLAFGKRQGREFIWNDLLSLETGSLKLANGRVIEKTLYNRRTRQDEPALFVALTFERREVLDSSNIKPMNLIGVDRGENIPAVIALTDPEGCPLSRFKDSLGNPTHILRIGESYKEKQRTIQAKKEVEQRRAGGYSRKYASKAKNLADDMVRNTARDLLYYAVTQDAMLIFENLSRGFGRQGKRTFMAERQYTRMEDWLTAKLAYEGLPSKTYLSKTLAQYTSKTCSNCGFTITSADYDRVLEKLKKTATGWMTTINGKELKVEGQITYYNRYKRQNVVKDLSVELDRLSEESVNNDISSWTKGRQGEALSLLKKRFSHRPVQEKFVCLNCGFETHADEQAALNIARSWLFLRSQEYKKYQTNKTTGNTDKRAFVETWQSFYRKKLKEVWKPAV

SEQ ID NO: 2359 - protein, 979 aa, synthetic construct
QEIKRINKIRRRLVKDSNTKKAGKTRGPMKTLLVRVMTPDLRERLENLRKKPENIPQPISNTSRANLNKLLTDYTEMKKAILHVYWEEFQKDPVGLMSRVAQPASKKIDQNKLKPEMDEKGNLTTAGFACSQCGQPLFVYKLEQVSEKGKAYTNYFGRCNVAEHEKLILLAQLKPEKDSDEAVTYSLGKFGQRALDFYSIHVTKESTHPVKPLAQIAGNRYASGPVGKALSDACMGTIASFLSKYQDIIIEHQKVVKGNQKRLESLRELAGKENLEYPSVTLPPQPHTKEGVDAYNEVIARVRWWVNLNLWQKLKLSRDDAKPLLRLKGFPSFPLVERQANEVDWWDMVCNVKKLINEKKEDGKVFWQNLAGYKRQEALRPYLSSEEDRKKGKKFARYQLGDLLLHLEKKHGEDWGKVYDEAWERIDKKVEGLSKHIKLEEERRSEDAQSKAALTDWLRAKASFVIEGLKEADKDEFCRCELKLQKWYGDLRGKPFAIEAENSILDISGFSKQYNCAFIWQKDGVKKLNLYLIINYFKGGKLRFKKIKPEAFEANRFYTVINKKSGEIVPMEVNFNFDDPNLIILPLAFGKRQGREFIWNDLLSLETGSLKLANGRVIEKTLYNRRTRQDEPALFVALTFERREVLDSSNIKPMNLIGVDRGENIPAVIALTDPEGCPLSRFKDSLGNPTHILRIGESYKEKQRTIQAKKEVEQRRAGGYSRKYASKAKNLADDMVRNTARDLLYYAVTQDAMLIFENLSRGFGRQGKRTFMAERQYTRMEDWLTAKLAYEGLPSKTYLSKTLAQYTSKTCSNCGFTITSADYDRVLEKLKKTATGWMTTINGKELKVEGQITYYNRYKRQNVVKDLSVELDRLSEESVNNDISSWTKGRSGEALSLLKKRFSHRPVQEKFVCLNCGFETHADEQAALNIARSWLFLRSQEYKKYQTNKTTGNTDKRAFVETWQSFYRKKLKEVWKPAV

SEQ ID NO: 2360 - protein, 978 aa, synthetic construct
QEIKRINKIRRRLVKDSNTKKAGKTGPMKTLLVRVMTPDLRERLENLRKKPENIPQPISNTSRANLNKLLTDYTEMKKAILHVYWEEFQKDPVGLMSRVAQPASKKIDQNKLKPEMDEKGNLTTAGFACSQCGQPLFVYKLEQVSEKGKAYTNYFGRCNVAEHEKLIKLAQLKPEKDSDEAVTYSLGKFGQRALDFYSIHVTKESTHPVKPLAQIAGNRYASGPVGKALSDACMGTIASFLSKYQDIIIEHQKVVKGNQKRLESLRELAGKENLEYPSVTLPPQPHTKEGVDAYNEVIARVRWWVNLNLWQKLKLSRDDAKPLLRLKGFPSFPLVERQANEVDWWDMVCNVKKLINEKKEDGKVFWQNLAGYKRQEALRPYLSSEEDRKKGKKFARYQLGDLLLHLEKKHGEDWGKVYDEAWERIDKKVEGLSKHIKLEEERRSEDAQSKAALTDWLRAKASFVIEGLKEADKDEFCRCELKLQKWYGDLRGKPFAIEAENSILDISGFSKQYNCAFIWQKDGVKKLNLYLIINYFKGGKLRFKKIKPEAFEANRFYTVINKKSGEIVPMEVNFNFDDPNLIILPLAFGKRQGREFIWNDLLSLETGSLKLANGRVIEKTLYNRRTRQDEPALFVALTFERREVLDSSNIKPMNLIGVDRGENIPAVIALTDPEGCPLSRFKDSLGNPTHILRIGESYKEKQRTIQAKKEVEQRRAGGYSRKYASKAKNLADDMVRNTARDLLYYAVTQDAMLIFENLSRGFGRQGKRTFMAERQYTRMEDWLTAKLAYEGLPSKTYLSKTLAQYTSKTCSNCGFTITSADYDRVLEKLKKTATGWMTTINGKELKVEGQITYYNRYKRQNVVKDLSVELDRLSEESVNNDISSWTKGRSGEALSLLKKRFSHRPVQEKFVCLNCGFETHADEQAALNIARSWLFLRSQEYKKYQTNKTTGNTDKRAFVETWQSFYRKKLKEVWKPAV

SEQ ID NO: 2361 - protein, 978 aa, synthetic construct
QEIKRINKIRRRLVKDSNTKKAGKTGPMKTLLVRVMTPDLRERLENLRKKPENIPQPISNTSRANLNKLLTDYTEMKKAILHVYWEEFQKDPVGLMSRVAQPASKKIDQNKLKPEMDEKGNLTTAGFACSQCGQPLFVYKLEQVSEKGKAYTNYFGRCNVAEHEKLILLDQLKPEKDSDEAVTYSLGKFGQRALDFYSIHVTKESTHPVKPLAQIAGNRYASGPVGKALSDACMGTIASFLSKYQDIIIEHQKVVKGNQKRLESLRELAGKENLEYPSVTLPPQPHTKEGVDAYNEVIARVRWWVNLNLWQKLKLSRDDAKPLLRLKGFPSFPLVERQANEVDWWDMVCNVKKLINEKKEDGKVFWQNLAGYKRQEALRPYLSSEEDRKKGKKFARYQLGDLLLHLEKKHGEDWGKVYDEAWERIDKKVEGLSKHIKLEEERRSEDAQSKAALTDWLRAKASFVIEGLKEADKDEFCRCELKLQKWYGDLRGKPFAIEAENSILDISGFSKQYNCAFIWQKDGVKKLNLYLIINYFKGGKLRFKKIKPEAFEANRFYTVINKKSGEIVPMEVNFNFDDPNLIILPLAFGKRQGREFIWNDLLSLETGSLKLANGRVIEKTLYNRRTRQDEPALFVALTFERREVLDSSNIKPMNLIGVDRGENIPAVIALTDPEGCPLSRFKDSLGNPTHILRIGESYKEKQRTIQAKKEVEQRRAGGYSRKYASKAKNLADDMVRNTARDLLYYAVTQDAMLIFENLSRGFGRQGKRTFMAERQYTRMEDWLTAKLAYEGLPSKTYLSKTLAQYTSKTCSNCGFTITSADYDRVLEKLKKTATGWMTTINGKELKVEGQITYYNRYKRQNVVKDLSVELDRLSEESVNNDISSWTKGRSGEALSLLKKRFSHRPVQEKFVCLNCGFETHADEQAALNIARSWLFLRSQEYKKYQTNKTTGNTDKRAFVETWQSFYRKKLKEVWKPAV

SEQ ID NO: 2362 - protein, 978 aa, synthetic construct
QEIKRINKIRRRLVKDSNTKKAGKTGPMKTLLVRVMTPDLRERLENLRKKPENIPQPISNTSRANLNKLLTDYTEMKKAILHVYWEEFQKDPVGLMSRVAQPASKKIDQNKLKPEMDEKGNLTTAGFACSQCGQPLFVYKLEQVSEKGKAYTNYFGRCNVAEHEKLILLAQLKPEKDSDEAVTYSLGKFGQRALDFYSIHVTKESTHPVKPLAQIAGNRYASGPVGKALSDACMGTIASFLSKYQDIIIEHQKVVKGNQKRLESLRELAGKENLEYPSVTLPPQPHTKEGVDAYNEVIARVRWWVNLNLWQKLKLSRDDAKPLLRLKGFPSFPLVERQANEVDWWDMVCNVKKLINEKKEDGKVFWQNLAGYKRQEALRPYLSSEEDRKKGKKFARTQLGDLLLHLEKKHGEDWGKVYDEAWERIDKKVEGLSKHIKLEEERRSEDAQSKAALTDWLRAKASFVIEGLKEADKDEFCRCELKLQKWYGDLRGKPFAIEAENSILDISGFSKQYNCAFIWQKDGVKKLNLYLIINYFKGGKLRFKKIKPEAFEANRFYTVINKKSGEIVPMEVNFNFDDPNLIILPLAFGKRQGREFIWNDLLSLETGSLKLANGRVIEKTLYNRRTRQDEPALFVALTFERREVLDSSNIKPMNLIGVDRGENIPAVIALTDPEGCPLSRFKDSLGNPTHILRIGESYKEKQRTIQAKKEVEQRRAGGYSRKYASKAKNLADDMVRNTARDLLYYAVTQDAMLIFENLSRGFGRQGKRTFMAERQYTRMEDWLTAKLAYEGLPSKTYLSKTLAQYTSKTCSNCGFTITSADYDRVLEKLKKTATGWMTTINGKELKVEGQITYYNRYKRQNVVKDLSVELDRLSEESVNNDISSWTKGRSGEALSLLKKRFSHRPVQEKFVCLNCGFETHADEQAALNIARSWLFLRSQEYKKYQTNKTTGNTDKRAFVETWQSFYRKKLKEVWKPAV

SEQ ID NO: 2363 - protein, 978 aa, synthetic construct
QEIKRINKIRRRLVKDSNTKKAGKTGPMKTLLVRVMTPDLRERLENLRKKPENIPQPISNTSRANLNKLLTDYTEMKKAILHVYWEEFQKDPVGLMSRVAQPASKKIDQNKLKPEMDEKGNLTTAGFACSQCGQPLFVYKLEQVSEKGKAYTNYFGRCNVAEHEKLILLAQLKPEKDSDEAVTYSLGKFGQRALDFYSIHVTKESTHPVKPLAQIAGNRYASGPVGKALSDACMGTIASFLSKYQDIIIEHQKVVKGNQKRLESLRELAGKENLEYPSVTLPPQPHTKEGVDAYNEVIARVRWWVNLNLWQKLKLSRDDAKPLLRLKGFPSFPLVERQANEVDWWDMVCNVKKLINEKKEDGKVFWQNLAGYKRQEALRPYLSSEEDRKKGKKFARYQLGDLLLHLEKKHGEDWGKVYDEAWERIDKKVEGLSKHIKLEEERRSEDAQSKAALTDWLRAKASFVIEGLKEADKDEFCRCELKLQKWYGDLRGKPFAIEAENSILDISGFSKQYNCAFIWQKDGVKKLNLYLIINYFKGGKLRFKKIKPEAFEANRFYTVINKKSGEIVPMEVNFNFDDPNLIILPLAFGKRQGREFIWNDLLSLETGSLKLANGRVIEKTLYNRRTRQDEPALFVALTFERREVLDSSNIKPMNLIGVDRGENIPAVIALTDPEGCPLSRFKDSLGNPTHILRIGESYKEKQRTIQAKKEVEQRRAGGYSRKYASKAKNLADDMVRNTARDLLYYAVTQDAMLIFENLSRGFGRQGKRTFMAERQYTRMEDWLTAKLAYEGLPSKTYLSKTLAQYTSKTCSNCGFTITSADYDRVLEKLKKTATGWMTTINGKELKVEGQITYYNRYKRQNVVKDLSVELDRLSEESVNNDISSWTKGRQGEALSLLKKRFSHRPVQEKFVCLNCGFETHADEQAALNIARSWLFLRSQEYKKYQTNKTTGNTDKRAFVETWQSFYRKKLKEVWKPAV

SEQ ID NO: 2364 - protein, 979 aa, synthetic construct
QEIKRINKIRRRLVKDSNTKKAGKTRGPMKTLLVRVMTPDLRERLENLRKKPENIPQPISNTSRANLNKLLTDYTEMKKAILHVYWEEFQKDPVGLMSRVAQPASKKIDQNKLKPEMDEKGNLTTAGFACSQCGQPLFVYKLEQVSEKGKAYTNYFGRCNVAEHEKLILLAQLKPEKDSDEAVTYSLGKFGQRALDFYSIHVTKESTHPVKPLAQIAGNRYASGPVGKALSDACMGTIASFLSKYQDIIIEHQKVVKGNQKRLESLRELAGKENLEYPSVTLPPQPHTKEGVDAYNEVIARVRMWVNLNLWQKLKLSRDDAKPLLRLKGFPSFPLVERQANEVDWWDMVCNVKKLINEKKEDGKVFWQNLAGYKRQEALRPYLSSEEDRKKGKKFARYQLGDLLLHLEKKHGEDWGKVYDEAWERIDKKVEGLSKHIKLEEERRSEDAQSKAALTDWLRAKASFVIEGLKEADKDEFCRCDLKLQKWYGDLRGKPFAIEAENSILDISGFSKQYNCAFIWQKDGVKKLNLYLIINYFKGGKLRFKKIKPEAFEANRFYTVINKKSGEIVPMEVNFNFDDPNLIILPLAFGKRQGREFIWNDLLSLETGSLKLANGRVIEKTLYNRRTRQDEPALFVALTFERREVLDSSNIKPMNLIGVDRGENIPAVIALTDPEGCPLSRFKDSLGNPTHILRIGESYKEKQRTIQAKKEVEQRRAGGYSRKYASKAKNLADDMVRNTARDLLYYAVTQDAMLIFENLSRGFGRQGKRTFMAERQYTRMEDWLTAKLAYEGLPSKTYLSKTLAQYTSKTCSNCGFTITSADYDRVLEKLKKTATGWMTTINGKELKVEGQITYYNRYKRQNVVKDLSVELDRLSEESVNNDISSWTKGRSGEALSLLKKRFSHRPVQEKFVCLNCGFETHADEQAALNIARSWLFLRSQEYKKYQTNKTTGNTDKRAFVETWQSFYRKKLKEVWKPAV

SEQ ID NO: 2365 - protein, 978 aa, synthetic construct
QEIKRINKIRRRLVKDSNTKKAGKTGPMKTLLVRVMTPDLRERLENLRKKPENIPQPISNTSRANLNKLLTDYTEMKKAILHVYWEEFQKDPVGLMSRVAQPASKKIDQNKLKPEMDEKGNLTTAGFACSQCGQPLFVYKLEQVSEKGKAYTNYFGRCNVAEHEKLIKLAQLKPEKDSDEAVTYSLGKFGQRALDFYSIHVTKESTHPVKPLAQIAGNRYASGPVGKALSDACMGTIASFLSKYQDIIIEHQKVVKGNQKRLESLRELAGKENLEYPSVTLPPQPHTKEGVDAYNEVIARVRMWVNLNLWQKLKLSRDDAKPLLRLKGFPSFPLVERQANEVDWWDMVCNVKKLINEKKEDGKVFWQNLAGYKRQEALRPYLSSEEDRKKGKKFARYQLGDLLLHLEKKHGEDWGKVYDEAWERIDKKVEGLSKHIKLEEERRSEDAQSKAALTDWLRAKASFVIEGLKEADKDEFCRCDLKLQKWYGDLRGKPFAIEAENSILDISGFSKQYNCAFIWQKDGVKKLNLYLIINYFKGGKLRFKKIKPEAFEANRFYTVINKKSGEIVPMEVNFNFDDPNLIILPLAFGKRQGREFIWNDLLSLETGSLKLANGRVIEKTLYNRRTRQDEPALFVALTFERREVLDSSNIKPMNLIGVDRGENIPAVIALTDPEGCPLSRFKDSLGNPTHILRIGESYKEKQRTIQAKKEVEQRRAGGYSRKYASKAKNLADDMVRNTARDLLYYAVTQDAMLIFENLSRGFGRQGKRTFMAERQYTRMEDWLTAKLAYEGLPSKTYLSKTLAQYTSKTCSNCGFTITSADYDRVLEKLKKTATGWMTTINGKELKVEGQITYYNRYKRQNVVKDLSVELDRLSEESVNNDISSWTKGRSGEALSLLKKRFSHRPVQEKFVCLNCGFETHADEQAALNIARSWLFLRSQEYKKYQTNKTTGNTDKRAFVETWQSFYRKKLKEVWKPAV

SEQ ID NO: 2366 - protein, 978 aa, synthetic construct
QEIKRINKIRRRLVKDSNTKKAGKTGPMKTLLVRVMTPDLRERLENLRKKPENIPQPISNTSRANLNKLLTDYTEMKKAILHVYWEEFQKDPVGLMSRVAQPASKKIDQNKLKPEMDEKGNLTTAGFACSQCGQPLFVYKLEQVSEKGKAYTNYFGRCNVAEHEKLILLDQLKPEKDSDEAVTYSLGKFGQRALDFYSIHVTKESTHPVKPLAQIAGNRYASGPVGKALSDACMGTIASFLSKYQDIIIEHQKVVKGNQKRLESLRELAGKENLEYPSVTLPPQPHTKEGVDAYNEVIARVRMWVNLNLWQKLKLSRDDAKPLLRLKGFPSFPLVERQANEVDWWDMVCNVKKLINEKKEDGKVFWQNLAGYKRQEALRPYLSSEEDRKKGKKFARYQLGDLLLHLEKKHGEDWGKVYDEAWERIDKKVEGLSKHIKLEEERRSEDAQSKAALTDWLRAKASFVIEGLKEADKDEFCRCDLKLQKWYGDLRGKPFAIEAENSILDISGFSKQYNCAFIWQKDGVKKLNLYLIINYFKGGKLRFKKIKPEAFEANRFYTVINKKSGEIVPMEVNFNFDDPNLIILPLAFGKRQGREFIWNDLLSLETGSLKLANGRVIEKTLYNRRTRQDEPALFVALTFERREVLDSSNIKPMNLIGVDRGENIPAVIALTDPEGCPLSRFKDSLGNPTHILRIGESYKEKQRTIQAKKEVEQRRAGGYSRKYASKAKNLADDMVRNTARDLLYYAVTQDAMLIFENLSRGFGRQGKRTFMAERQYTRMEDWLTAKLAYEGLPSKTYLSKTLAQYTSKTCSNCGFTITSADYDRVLEKLKKTATGWMTTINGKELKVEGQITYYNRYKRQNVVKDLSVELDRLSEESVNNDISSWTKGRSGEALSLLKKRFSHRPVQEKFVCLNCGFETHADEQAALNIARSWLFLRSQEYKKYQTNKTTGNTDKRAFVETWQSFYRKKLKEVWKPAV

SEQ ID NO: 2367 - protein, 978 aa, synthetic construct
QEIKRINKIRRRLVKDSNTKKAGKTGPMKTLLVRVMTPDLRERLENLRKKPENIPQPISNTSRANLNKLLTDYTEMKKAILHVYWEEFQKDPVGLMSRVAQPASKKIDQNKLKPEMDEKGNLTTAGFACSQCGQPLFVYKLEQVSEKGKAYTNYFGRCNVAEHEKLILLAQLKPEKDSDEAVTYSLGKFGQRALDFYSIHVTKESTHPVKPLAQIAGNRYASGPVGKALSDACMGTIASFLSKYQDIIIEHQKVVKGNQKRLESLRELAGKENLEYPSVTLPPQPHTKEGVDAYNEVIARVRTWVNLNLWQKLKLSRDDAKPLLRLKGFPSFPLVERQANEVDWWDMVCNVKKLINEKKEDGKVFWQNLAGYKRQEALRPYLSSEEDRKKGKKFARYQLGDLLLHLEKKHGEDWGKVYDEAWERIDKKVEGLSKHIKLEEERRSEDAQSKAALTDWLRAKASFVIEGLKEADKDEFCRCDLKLQKWYGDLRGKPFAIEAENSILDISGFSKQYNCAFIWQKDGVKKLNLYLIINYFKGGKLRFKKIKPEAFEANRFYTVINKKSGEIVPMEVNFNFDDPNLIILPLAFGKRQGREFIWNDLLSLETGSLKLANGRVIEKTLYNRRTRQDEPALFVALTFERREVLDSSNIKPMNLIGVDRGENIPAVIALTDPEGCPLSRFKDSLGNPTHILRIGESYKEKQRTIQAKKEVEQRRAGGYSRKYASKAKNLADDMVRNTARDLLYYAVTQDAMLIFENLSRGFGRQGKRTFMAERQYTRMEDWLTAKLAYEGLPSKTYLSKTLAQYTSKTCSNCGFTITSADYDRVLEKLKKTATGWMTTINGKELKVEGQITYYNRYKRQNVVKDLSVELDRLSEESVNNDISSWTKGRSGEALSLLKKRFSHRPVQEKFVCLNCGFETHADEQAALNIARSWLFLRSQEYKKYQTNKTTGNTDKRAFVETWQSFYRKKLKEVWKPAV

SEQ ID NO: 2368 - protein, 978 aa, synthetic construct
QEIKRINKIRRRLVKDSNTKKAGKTGPMKTLLVRVMTPDLRERLENLRKKPENIPQPISNTSRANLNKLLTDYTEMKKAILHVYWEEFQKDPVGLMSRVAQPASKKIDQNKLKPEMDEKGNLTTAGFACSQCGQPLFVYKLEQVSEKGKAYTNYFGRCNVAEHEKLILLAQLKPEKDSDEAVTYSLGKFGQRALDFYSIHVTKESTHPVKPLAQIAGNRYASGPVGKALSDACMGTIASFLSKYQDIIIEHQKVVKGNQKRLESLRELAGKENLEYPSVTLPPQPHTKEGVDAYNEVIARVRMWVNLNLWQKLKLSRDDAKPLLRLKGFPSFPLVERQANEVDWWDMVCNVKKLINEKKEDGKVFWQNLAGYKRQEALRPYLSSEEDRKKGKKFARTQLGDLLLHLEKKHGEDWGKVYDEAWERIDKKVEGLSKHIKLEEERRSEDAQSKAALTDWLRAKASFVIEGLKEADKDEFCRCDLKLQKWYGDLRGKPFAIEAENSILDISGFSKQYNCAFIWQKDGVKKLNLYLIINYFKGGKLRFKKIKPEAFEANRFYTVINKKSGEIVPMEVNFNFDDPNLIILPLAFGKRQGREFIWNDLLSLETGSLKLANGRVIEKTLYNRRTRQDEPALFVALTFERREVLDSSNIKPMNLIGVDRGENIPAVIALTDPEGCPLSRFKDSLGNPTHILRIGESYKEKQRTIQAKKEVEQRRAGGYSRKYASKAKNLADDMVRNTARDLLYYAVTQDAMLIFENLSRGFGRQGKRTFMAERQYTRMEDWLTAKLAYEGLPSKTYLSKTLAQYTSKTCSNCGFTITSADYDRVLEKLKKTATGWMTTINGKELKVEGQITYYNRYKRQNVVKDLSVELDRLSEESVNNDISSWTKGRSGEALSLLKKRFSHRPVQEKFVCLNCGFETHADEQAALNIARSWLFLRSQEYKKYQTNKTTGNTDKRAFVETWQSFYRKKLKEVWKPAV

SEQ ID NO: 2369 - protein, 978 aa, synthetic construct
QEIKRINKIRRRLVKDSNTKKAGKTGPMKTLLVRVMTPDLRERLENLRKKPENIPQPISNTSRANLNKLLTDYTEMKKAILHVYWEEFQKDPVGLMSRVAQPASKKIDQNKLKPEMDEKGNLTTAGFACSQCGQPLFVYKLEQVSEKGKAYTNYFGRCNVAEHEKLILLAQLKPEKDSDEAVTYSLGKFGQRALDFYSIHVTKESTHPVKPLAQIAGNRYASGPVGKALSDACMGTIASFLSKYQDIIIEHQKVVKGNQKRLESLRELAGKENLEYPSVTLPPQPHTKEGVDAYNEVIARVRMWVNLNLWQKLKLSRDDAKPLLRLKGFPSFPLVERQANEVDWWDMVCNVKKLINEKKEDGKVFWQNLAGYKRQEALRPYLSSEEDRKKGKKFARYQLGDLLLHLEKKHGEDWGKVYDEAWERIDKKVEGLSKHIKLEEERRSEDAQSKAALTDWLRAKASFVIEGLKEADKDEFCRCDLKLQKWYGDLRGKPFAIEAENSILDISGFSKQYNCAFIWQKDGVKKLNLYLIINYFKGGKLRFKKIKPEAFEANRFYTVINKKSGEIVPMEVNFNFDDPNLIILPLAFGKRQGREFIWNDLLSLETGSLKLANGRVIEKTLYNRRTRQDEPALFVALTFERREVLDSSNIKPMNLIGVDRGENIPAVIALTDPEGCPLSRFKDSLGNPTHILRIGESYKEKQRTIQAKKEVEQRRAGGYSRKYASKAKNLADDMVRNTARDLLYYAVTQDAMLIFENLSRGFGRQGKRTFMAERQYTRMEDWLTAKLAYEGLPSKTYLSKTLAQYTSKTCSNCGFTITSADYDRVLEKLKKTATGWMTTINGKELKVEGQITYYNRYKRQNVVKDLSVELDRLSEESVNNDISSWTKGRQGEALSLLKKRFSHRPVQEKFVCLNCGFETHADEQAALNIARSWLFLRSQEYKKYQTNKTTGNTDKRAFVETWQSFYRKKLKEVWKPAV

SEQ ID NO: 2370 - protein, 979 aa, synthetic construct
QEIKRINKIRRRLVKDSNTKKAGKTRGPMKTLLVRVMTPDLRERLENLRKKPENIPQPISNTSRANLNKLLTDYTEMKKAILHVYWEEFQKDPVGLMSRVAQPASKKIDQNKLKPEMDEKGNLTTAGFACSQCGQPLFVYKLEQVSEKGKAYTNYFGRCNVAEHEKLILLAQLKPEKDSDEAVTYSLGKFGQRALDFYSIHVTKESTHPVKPLAQIAGNRYASGPVGKALSDACMGTIASFLSKYQDIIIEHQKVVKGNQKRLESLRELAGKENLEYPSVTLPPQPHTKEGVDAYNEVIARVRMWVNLNLWQKLKLSRDDAKPLLRLKGFPSFPLVERQANEVDWWDMVCNVKKLINEKKEDGKVFWQNLAGYKRQEALRPYLSSEEDRKKGKKFARYQLGDLLLHLEKKHGEDWGKVYDEAWERIDKKVEGLSKHIKLEEERRSEDAQSKAALTDWLRAKASFVIEGLKEADKDEFCRCELKLQKWYGDLRGKPFAIEAENSILDISGFSKQYNCAFIWQKDGVKKLNLYLIINYFKGGKLRFKKIKPEAFEANRFYTVINKKSGEIVPMEVNFNFDDPNLIILPLAFGKRQGREFIWNDLLSLETGSLKLANGRVIEKTLYNRRTRQDEPALFVALTFERREVLDSSNIKPMNLIGVDRGENIPAVIALTDPEGCPLSRFKDSLGNPTHILRIGERYKEKQRTIQAKKEVEQRRAGGYSRKYASKAKNLADDMVRNTARDLLYYAVTQDAMLIFENLSRGFGRQGKRTFMAERQYTRMEDWLTAKLAYEGLPSKTYLSKTLAQYTSKTCSNCGFTITSADYDRVLEKLKKTATGWMTTINGKELKVEGQITYYNRYKRQNVVKDLSVELDRLSEESVNNDISSWTKGRSGEALSLLKKRFSHRPVQEKFVCLNCGFETHADEQAALNIARSWLFLRSQEYKKYQTNKTTGNTDKRAFVETWQSFYRKKLKEVWKPAV

SEQ ID NO: 2371 - protein, 978 aa, synthetic construct
QEIKRINKIRRRLVKDSNTKKAGKTGPMKTLLVRVMTPDLRERLENLRKKPENIPQPISNTSRANLNKLLTDYTEMKKAILHVYWEEFQKDPVGLMSRVAQPASKKIDQNKLKPEMDEKGNLTTAGFACSQCGQPLFVYKLEQVSEKGKAYTNYFGRCNVAEHEKLIKLAQLKPEKDSDEAVTYSLGKFGQRALDFYSIHVTKESTHPVKPLAQIAGNRYASGPVGKALSDACMGTIASFLSKYQDIIIEHQKVVKGNQKRLESLRELAGKENLEYPSVTLPPQPHTKEGVDAYNEVIARVRMWVNLNLWQKLKLSRDDAKPLLRLKGFPSFPLVERQANEVDWWDMVCNVKKLINEKKEDGKVFWQNLAGYKRQEALRPYLSSEEDRKKGKKFARYQLGDLLLHLEKKHGEDWGKVYDEAWERIDKKVEGLSKHIKLEEERRSEDAQSKAALTDWLRAKASFVIEGLKEADKDEFCRCELKLQKWYGDLRGKPFAIEAENSILDISGFSKQYNCAFIWQKDGVKKLNLYLIINYFKGGKLRFKKIKPEAFEANRFYTVINKKSGEIVPMEVNFNFDDPNLIILPLAFGKRQGREFIWNDLLSLETGSLKLANGRVIEKTLYNRRTRQDEPALFVALTFERREVLDSSNIKPMNLIGVDRGENIPAVIALTDPEGCPLSRFKDSLGNPTHILRIGERYKEKQRTIQAKKEVEQRRAGGYSRKYASKAKNLADDMVRNTARDLLYYAVTQDAMLIFENLSRGFGRQGKRTFMAERQYTRMEDWLTAKLAYEGLPSKTYLSKTLAQYTSKTCSNCGFTITSADYDRVLEKLKKTATGWMTTINGKELKVEGQITYYNRYKRQNVVKDLSVELDRLSEESVNNDISSWTKGRSGEALSLLKKRFSHRPVQEKFVCLNCGFETHADEQAALNIARSWLFLRSQEYKKYQTNKTTGNTDKRAFVETWQSFYRKKLKEVWKPAV

SEQ ID NO: 2372 - protein, 978 aa, synthetic construct
QEIKRINKIRRRLVKDSNTKKAGKTGPMKTLLVRVMTPDLRERLENLRKKPENIPQPISNTSRANLNKLLTDYTEMKKAILHVYWEEFQKDPVGLMSRVAQPASKKIDQNKLKPEMDEKGNLTTAGFACSQCGQPLFVYKLEQVSEKGKAYTNYFGRCNVAEHEKLILLDQLKPEKDSDEAVTYSLGKFGQRALDFYSIHVTKESTHPVKPLAQIAGNRYASGPVGKALSDACMGTIASFLSKYQDIIIEHQKVVKGNQKRLESLRELAGKENLEYPSVTLPPQPHTKEGVDAYNEVIARVRMWVNLNLWQKLKLSRDDAKPLLRLKGFPSFPLVERQANEVDWWDMVCNVKKLINEKKEDGKVFWQNLAGYKRQEALRPYLSSEEDRKKGKKFARYQLGDLLLHLEKKHGEDWGKVYDEAWERIDKKVEGLSKHIKLEEERRSEDAQSKAALTDWLRAKASFVIEGLKEADKDEFCRCELKLQKWYGDLRGKPFAIEAENSILDISGFSKQYNCAFIWQKDGVKKLNLYLIINYFKGGKLRFKKIKPEAFEANRFYTVINKKSGEIVPMEVNFNFDDPNLIILPLAFGKRQGREFIWNDLLSLETGSLKLANGRVIEKTLYNRRTRQDEPALFVALTFERREVLDSSNIKPMNLIGVDRGENIPAVIALTDPEGCPLSRFKDSLGNPTHILRIGERYKEKQRTIQAKKEVEQRRAGGYSRKYASKAKNLADDMVRNTARDLLYYAVTQDAMLIFENLSRGFGRQGKRTFMAERQYTRMEDWLTAKLAYEGLPSKTYLSKTLAQYTSKTCSNCGFTITSADYDRVLEKLKKTATGWMTTINGKELKVEGQITYYNRYKRQNVVKDLSVELDRLSEESVNNDISSWTKGRSGEALSLLKKRFSHRPVQEKFVCLNCGFETHADEQAALNIARSWLFLRSQEYKKYQTNKTTGNTDKRAFVETWQSFYRKKLKEVWKPAV

SEQ ID NO: 2373 - protein, 978 aa, synthetic construct
QEIKRINKIRRRLVKDSNTKKAGKTGPMKTLLVRVMTPDLRERLENLRKKPENIPQPISNTSRANLNKLLTDYTEMKKAILHVYWEEFQKDPVGLMSRVAQPASKKIDQNKLKPEMDEKGNLTTAGFACSQCGQPLFVYKLEQVSEKGKAYTNYFGRCNVAEHEKLILLAQLKPEKDSDEAVTYSLGKFGQRALDFYSIHVTKESTHPVKPLAQIAGNRYASGPVGKALSDACMGTIASFLSKYQDIIIEHQKVVKGNQKRLESLRELAGKENLEYPSVTLPPQPHTKEGVDAYNEVIARVRTWVNLNLWQKLKLSRDDAKPLLRLKGFPSFPLVERQANEVDWWDMVCNVKKLINEKKEDGKVFWQNLAGYKRQEALRPYLSSEEDRKKGKKFARYQLGDLLLHLEKKHGEDWGKVYDEAWERIDKKVEGLSKHIKLEEERRSEDAQSKAALTDWLRAKASFVIEGLKEADKDEFCRCELKLQKWYGDLRGKPFAIEAENSILDISGFSKQYNCAFIWQKDGVKKLNLYLIINYFKGGKLRFKKIKPEAFEANRFYTVINKKSGEIVPMEVNFNFDDPNLIILPLAFGKRQGREFIWNDLLSLETGSLKLANGRVIEKTLYNRRTRQDEPALFVALTFERREVLDSSNIKPMNLIGVDRGENIPAVIALTDPEGCPLSRFKDSLGNPTHILRIGERYKEKQRTIQAKKEVEQRRAGGYSRKYASKAKNLADDMVRNTARDLLYYAVTQDAMLIFENLSRGFGRQGKRTFMAERQYTRMEDWLTAKLAYEGLPSKTYLSKTLAQYTSKTCSNCGFTITSADYDRVLEKLKKTATGWMTTINGKELKVEGQITYYNRYKRQNVVKDLSVELDRLSEESVNNDISSWTKGRSGEALSLLKKRFSHRPVQEKFVCLNCGFETHADEQAALNIARSWLFLRSQEYKKYQTNKTTGNTDKRAFVETWQSFYRKKLKEVWKPAV

SEQ ID NO: 2374 - protein, 978 aa, synthetic construct
QEIKRINKIRRRLVKDSNTKKAGKTGPMKTLLVRVMTPDLRERLENLRKKPENIPQPISNTSRANLNKLLTDYTEMKKAILHVYWEEFQKDPVGLMSRVAQPASKKIDQNKLKPEMDEKGNLTTAGFACSQCGQPLFVYKLEQVSEKGKAYTNYFGRCNVAEHEKLILLAQLKPEKDSDEAVTYSLGKFGQRALDFYSIHVTKESTHPVKPLAQIAGNRYASGPVGKALSDACMGTIASFLSKYQDIIIEHQKVVKGNQKRLESLRELAGKENLEYPSVTLPPQPHTKEGVDAYNEVIARVRMWVNLNLWQKLKLSRDDAKPLLRLKGFPSFPLVERQANEVDWWDMVCNVKKLINEKKEDGKVFWQNLAGYKRQEALRPYLSSEEDRKKGKKFARTQLGDLLLHLEKKHGEDWGKVYDEAWERIDKKVEGLSKHIKLEEERRSEDAQSKAALTDWLRAKASFVIEGLKEADKDEFCRCELKLQKWYGDLRGKPFAIEAENSILDISGFSKQYNCAFIWQKDGVKKLNLYLIINYFKGGKLRFKKIKPEAFEANRFYTVINKKSGEIVPMEVNFNFDDPNLIILPLAFGKRQGREFIWNDLLSLETGSLKLANGRVIEKTLYNRRTRQDEPALFVALTFERREVLDSSNIKPMNLIGVDRGENIPAVIALTDPEGCPLSRFKDSLGNPTHILRIGERYKEKQRTIQAKKEVEQRRAGGYSRKYASKAKNLADDMVRNTARDLLYYAVTQDAMLIFENLSRGFGRQGKRTFMAERQYTRMEDWLTAKLAYEGLPSKTYLSKTLAQYTSKTCSNCGFTITSADYDRVLEKLKKTATGWMTTINGKELKVEGQITYYNRYKRQNVVKDLSVELDRLSEESVNNDISSWTKGRSGEALSLLKKRFSHRPVQEKFVCLNCGFETHADEQAALNIARSWLFLRSQEYKKYQTNKTTGNTDKRAFVETWQSFYRKKLKEVWKPAV

SEQ ID NO: 2375 - protein, 978 aa, synthetic construct
QEIKRINKIRRRLVKDSNTKKAGKTGPMKTLLVRVMTPDLRERLENLRKKPENIPQPISNTSRANLNKLLTDYTEMKKAILHVYWEEFQKDPVGLMSRVAQPASKKIDQNKLKPEMDEKGNLTTAGFACSQCGQPLFVYKLEQVSEKGKAYTNYFGRCNVAEHEKLILLAQLKPEKDSDEAVTYSLGKFGQRALDFYSIHVTKESTHPVKPLAQIAGNRYASGPVGKALSDACMGTIASFLSKYQDIIIEHQKVVKGNQKRLESLRELAGKENLEYPSVTLPPQPHTKEGVDAYNEVIARVRMWVNLNLWQKLKLSRDDAKPLLRLKGFPSFPLVERQANEVDWWDMVCNVKKLINEKKEDGKVFWQNLAGYKRQEALRPYLSSEEDRKKGKKFARYQLGDLLLHLEKKHGEDWGKVYDEAWERIDKKVEGLSKHIKLEEERRSEDAQSKAALTDWLRAKASFVIEGLKEADKDEFCRCELKLQKWYGDLRGKPFAIEAENSILDISGFSKQYNCAFIWQKDGVKKLNLYLIINYFKGGKLRFKKIKPEAFEANRFYTVINKKSGEIVPMEVNFNFDDPNLIILPLAFGKRQGREFIWNDLLSLETGSLKLANGRVIEKTLYNRRTRQDEPALFVALTFERREVLDSSNIKPMNLIGVDRGENIPAVIALTDPEGCPLSRFKDSLGNPTHILRIGERYKEKQRTIQAKKEVEQRRAGGYSRKYASKAKNLADDMVRNTARDLLYYAVTQDAMLIFENLSRGFGRQGKRTFMAERQYTRMEDWLTAKLAYEGLPSKTYLSKTLAQYTSKTCSNCGFTITSADYDRVLEKLKKTATGWMTTINGKELKVEGQITYYNRYKRQNVVKDLSVELDRLSEESVNNDISSWTKGRQGEALSLLKKRFSHRPVQEKFVCLNCGFETHADEQAALNIARSWLFLRSQEYKKYQTNKTTGNTDKRAFVETWQSFYRKKLKEVWKPAV

SEQ ID NO: 2376 - protein, 979 aa, synthetic construct
QEIKRINKIRRRLVKDSNTKKAGKTRGPMKTLLVRVMTPDLRERLENLRKKPENIPQPISNTSRANLNKLLTDYTEMKKAILHVYWEEFQKDPVGLMSRVAQPASKKIDQNKLKPEMDEKGNLTTAGFACSQCGQPLFVYKLEQVSEKGKAYTNYFGRCNVAEHEKLILLDQLKPEKDSDEAVTYSLGKFGQRALDFYSIHVTKESTHPVKPLAQIAGNRYASTPVGKALSDACMGTIASFLSKYQDIIIEHQKVVKGNQKRLESLRELAGKENLEYPSVTLPPQPHTKEGVDAYNEVIARVRMWVNLNLWQKLKLSRDDAKPLLRLKGFPSFPLVERQANEVDWWDMVCNVKKLINEKKEDGKVFWQNLAGYKRQEALRPYLSSEEDRKKGKKFARYQLGDLLLHLEKKHGEDWGKVYDEAWERIDKKVEGLSKHIKLEEERRSEDAQSKAALTDWLRAKASFVIEGLKEADKDEFCRCELKLQKWYGDLRGKPFAIEAENSILDISGFSKQYNCAFIWQKDGVKKLNLYLIINYFKGGKLRFKKIKPEAFEANRFYTVINKKSGEIVPMEVNFNFDDPNLIILPLAFGKRQGREFIWNDLLSLETGSLKLANGRVIEKTLYNRRTRQDEPALFVALTFERREVLDSSNIKPMNLIGVDRGENIPAVIALTDPEGCPLSRFKDSLGNPTHILRIGESYKEKQRTIQAKKEVEQRRAGGYSRKYASKAKNLADDMVRNTARDLLYYAVTQDAMLIFENLSRGFGRQGKRTFMAERQYTRMEDWLTAKLAYEGLPSKTYLSKTLAQYTSKTCSNCGFTITSADYDRVLEKLKKTATGWMTTINGKELKVEGQITYYNRYKRQNVVKDLSVELDRLSEESVNNDISSWTKGRSGEALSLLKKRFSHRPVQEKFVCLNCGFETHADEQAALNIARSWLFLRSQEYKKYQTNKTTGNTDKRAFVETWQSFYRKKLKEVWKPAV

SEQ ID NO: 2377 - protein, 978 aa, synthetic construct
QEIKRINKIRRRLVKDSNTKKAGKTGPMKTLLVPVMTPDLRERLENLRKKPENIPQPISNTSRANLNKLLTDYTEMKKAILHVYWEEFQKDPVGLMSRVAQPASKKIDQNKLKPEMDEKGNLTTAGFACSQCGQPLFVYKLEQVSEKGKAYTNYFGRCNVAEHEKLILLYQLKPEKDSDEAVTYSLGKFGQRALDFYSIHVTKESTHPVKPLAQIAGNRYASGPVGKALSDACMGTIASFLSKYQDIIIEHQKVVKGNQKRLESLRELAGKENLEYPSVTLPPQPHTKEGVDAYNEVIARVRTWVNLNLWQKLKLSRDDAKPLLRLKGFPSFPLVERQANEVDWWDMVCNVKKLINEKKEDGKVFWQNLAGYKRQEALRPYLSSEEDRKKGKKFARYQLGDLLLHLEKKHGEDWGKVYDEAWERIDKKVEGLSKHIKLEEERRSEDAQSKAALTDWLRAKASFVIEGLKEADKDEFCRCELKLQKWYGDLRGKPFAIEAENSILDISGFSKQYNCAFIWQKDGVKKLNLYLIINYFKGGKLRFKKIKPEAFEANRFYTVINKKSGEIVPMEVNFNFDDPNLIILPLAFGKRQGREFIWNDLLSLETGSLKLANGRVIEKTLYNRRTRQDEPALFVALTFERREVLDSSNIKPMNLIGVDRGENIPAVIALTDPEGCPLSRFKDSLGNPTHILRIGESYKEKQRTIQAKKEVEQRRAGGYSRKYASKAKNLADDMVRNTARDLLYYAVTQDAMLIFENLSRGFGRQGKRTFMAERQYTRMEDWLTAKLAYEGLPSKTYLSKTLAQYTSKTCSNCGFTITSADYDRVLEKLKKTATGWMTTINGKELKVEGQITYYNRYKRQNVVKDLSVELDRLSEESVNNDISSWTKGRSGEALSLLKKRFSHRPVQEKFVCLNCGFETHADEQAALNIARSWLFLRSQEYKKYQTNKTTGNTDKRAFVETWQSFYRKKLKEVWKPAV

SEQ ID NO: 2378 - protein, 979 aa, synthetic construct
QEIKRINKIRRRLVKDSNTKKAGKTRGPMKTLLVRVMTPDLRERLENLRKKPENIPQPISNTSRANLNKLLTDYTEMKKAILHVYWEEFQKDPVGLMSRVAQPASKKIDQNKLKPEMDEKGNLTTAGFACSQCGQPLFVYKLEQVSEKGKAYTNYFGRCNVAEHEKLIKLAQLKPEKDSDEAVTYSLGKFGQRALDFYSIHVTKESTHPVKPLAQIAGNRYASGPVGKALSDACMGTIASFLSKYQDIIIEHQKVVKGNQKRLESLRELAGKENLEYPSVTLPPQPHTKEGVDAYNEVIARVRMWVNLNLWQKLKLSRDDAKPLLRLKKFPSFPLVERQANEVDWWDMVCNVKKLINEKKEDGKVFWQNLAGYKRQEALRPYLSSEEDRKKGKKFARYQLGDLLLHLEKKHGEDWGKVYDEAWERIDKKVEGLSKHIKLEEERRSEDAQSKAALTDWLRAKASFVIEGLKEADKDEFCRCELKLQKWYGDLRGKPFAIEAENSILDISGFSKQYNCAFIWQKDGVKKLNLYLIINYFKGGKLRFKKIKPEAFEANRFYTVINKKSGEIVPMEVNFNFDDPNLIILPLAFGKRQGREFIWNDLLSLETGSLKLANGRVIEKTLYNRRTRQDEPALFVALTFERREVLDSSNIKPMNLIGVDRGENIPAVIALTDPEGCPLSRFKDSLGNPTHILRIGESYKEKQRTIQAKKEVEQRRAGGYSRKYASKAKNLADDMVRNTARDLLYYAVTQDAMLIFENLSRGFGRQGKRTFMAERQYTRMEDWLTAKLAYEGLPSKTYLSKTLAQYTSKTCSNCGFTITSADYDRVLEKLKKTATGWMTTINGKELKVEGQITYYNRYKRQNVVKDLSVELDRLSEESVNNDISSWTKGRSGEALSLLKKRFSHRPVQEKFVCLNCGFETHADEQAALNIARSWLFLRSQEYKKYQTNKTTGNTDKRAFVETWQSFYRKKLKEVWKPAV

SEQ ID NO: 2379 - protein, 56 aa, synthetic construct
QEGKRINKIRRRLVKDSNTKKAGKTGPMKTLLVPVMTPDLRERLENLRKKPENIPQ

SEQ ID NO: 2380 - protein, 57 aa, synthetic construct
QEIGKRINKIRRRLVKDSNTKKAGKTGPMKTLLVPVMTPDLRERLENLRKKPENIPQ

SEQ ID NO: 2381 - protein, 57 aa, synthetic construct
QEGKRINKIRRRLVKDSNTKKAGKTRGPMKTLLVRVMTPDLRERLENLRKKPENIPQ

SEQ ID NO: 2382 - protein, 56 aa, synthetic construct
QEIKRINGIRRRLVKDSNTKKAGKTGPMKTLLVPVMTPDLRERLENLRKKPENIPQ

SEQ ID NO: 2383 - protein, 58 aa, synthetic construct
QEIGKRINKIRRRLVKDSNTKKAGKTRGPMKTLLVRVMTPDLRERLENLRKKPENIPQ

SEQ ID NO: 2384 - protein, 56 aa, synthetic construct
QEGKRINGIRRRLVKDSNTKKAGKTGPMKTLLVRVMTPDLRERLENLRKKPENIPQ

SEQ ID NO: 2385 - protein, 57 aa, synthetic construct
QEIKRINKIRRRLVKDSNTKKAGKTRGPMKTLLVPVMTPDLRERLENLRKKPENIPQ

SEQ ID NO: 2386 - protein, 57 aa, synthetic construct
QEIKRINGIRRRLVKDSNTKKAGKTRGPMKTLLVRVMTPDLRERLENLRKKPENIPQ

SEQ ID NO: 2387 - protein, 57 aa, synthetic construct
QEIGKRINGIRRRLVKDSNTKKAGKTGPMKTLLVRVMTPDLRERLENLRKKPENIPQ

SEQ ID NO: 2388 - protein, 57 aa, synthetic construct
QEGGKRINKIRRRLVKDSNTKKAGKTGPMKTLLVRVMTPDLRERLENLRKKPENIPQ

SEQ ID NO: 2389 - protein, 57 aa, synthetic construct
QEIGRINKIRRRLVKDSNTKKAGKTRGPMKTLLVRVMTPDLRERLENLRKKPENIPQ

SEQ ID NO: 2390 - protein, 58 aa, synthetic construct
QEIKGRINKIRRRLVKDSNTKKAGKTRGPMKTLLVRVMTPDLRERLENLRKKPENIPQ

SEQ ID NO: 2391 - protein, 91 aa, synthetic construct
QPASKKIDQNKLKPEMDEKGNLTTAGFACSQCGQPLFVYKLEQVSEKGKAYTNYFGRCNVAEHEKLIKLDQLKPEKDSDEAVTYSLGKFGQ

SEQ ID NO: 2392 - protein, 91 aa, synthetic construct
QPASKKIDQNKLKPEMDEKGNLTTAGFACSQCGQPLFVYKLEQVSEKGKAYTNYFGRCNVAEHEKLIKLYQLKPEKDSDEAVTYSLGKFGQ

SEQ ID NO: 2393 - protein, 91 aa, synthetic construct
QPASKKIDQNKLKPEMDEKGNLTTAGFACSQCGQPLFVYKLEQVSEKGKAYTNYFGRCNVAEHEKLIKLSQLKPEKDSDEAVTYSLGKFGQ

SEQ ID NO: 2394 - protein, 91 aa, synthetic construct
QPASKKIDQNKLKPEMDEKGNLTTAGFACSQCGQPLFVYKLEQVSEKGKAYTNYFGRCNVAEHEKLIQLDQLKPEKDSDEAVTYSLGKFGQ

SEQ ID NO: 2395 - protein, 91 aa, synthetic construct
QPASKKIDQNKLKPEMDEKGNLTTAGFACSQCGQPLFVYKLEQVSEKGKAYTNYFGRCNVAEHEKLIQLYQLKPEKDSDEAVTYSLGKFGQ

SEQ ID NO: 2396 - protein, 91 aa, synthetic construct
QPASKKIDQNKLKPEMDEKGNLTTAGFACSQCGQPLFVYKLEQVSEKGKAYTNYFGRCNVAEHEKLIQLSQLKPEKDSDEAVTYSLGKFGQ

SEQ ID NO: 2397 - protein, 141 aa, synthetic construct
RALDFYSIHVTKESTHPVKPLAQIAGNRYASTPVGKALSDACMGTIASFLSKYQDIIIEHQKVVKGNQKRLESLRELAGKENLEYPSVTLPPQPHTKEGVDAYNEVIARVRTWVNLNLWQKLKLSRDDAKPLLRLKGFPSF

SEQ ID NO: 2398 - protein, 168 aa, synthetic construct
PLVERQANEVDWWDMVCNVKKLINEKKEDGKVFWQNLAGYKRQEALRPYLSSEEDRKKGKKFARTQLGDLLLHLEKKHGEDWGKVYDEAWERIDKKVEGLSKHIKLEEERRSEDAQSKAALTDWLRAKASFVIEGLKEADKDEFCRCDLKLQKWYGDLRGKPFAIEAE

SEQ ID NO: 2399 - protein, 110 aa, synthetic construct
SNCGFTITSADYDRVLEKLKKTATGWMTTINGKELKVEGQITYYNRYKRQNVVKDLSVELDRLSEESVNNDISSWDKGRQGEALSLLKKRFSHRPVQEKFVCLNCGFETH

SEQ ID NO: 2400 - protein, 110 aa, synthetic construct
SNCGFTITSADYDRMLEKLKKTATGWMTTINGKELKVEGQITYYNRYKRQNVVKDLSVELDRLSEESVNNDISSWDKGRSGEALSLLKKRFSHRPVQEKFVCLNCGFETH

SEQ ID NO: 2401 - protein, 110 aa, synthetic construct
SNCGFTITSADYDRMLEKLKKTATGWMTTINGKELKVEGQITYYNRYKRQNVVKDLSVELDRLSEESVNNDISSWTKGRQGEALSLLKKRFSHRPVQEKFVCLNCGFETH

SEQ ID NO: 2402 - protein, 978 aa, synthetic construct
QEIKRINKIRRRLVKDSNTKKAGKTGPMKTLLVRVMTPDLRERLENLRKKPENIPQPISNTSRANLNKLLTDYTEMKKAILHVYWEEFQKDPVGLMSRVAQPASKKIDQNKLKPEMDEKGNLTTAGFACSQCGQPLFVYKLEQVSEKGKAYTNYFGRCNVAEHEKLILLAQLKPEKDSDEAVTYSLGKFGQRALDFYSIHVTKESTHPVKPLAQIAGNRYASGPVGKALSDACMGTIASFLSKYQDIIIEHQKVVKGNQKRLESLRELAGKENLEYPSVTLPPQPHTKEGVDAYNEVIARVRMWVNLNLWQKLKLSRDDAKPLLRLKKFPSFPLVERQANEVDWWDMVCNVKKLINEKKEDGKVFWQNLAGYKRQEALRPYLSSEEDRKKGKKFARYQLGDLLLHLEKKHGEDWGKVYDEAWERIDKKVEGLSKHIKLEEERRSEDAQSKAALTDWLRAKASFVIEGLKEADKDEFCRCELKLQKWYGDLRGKPFAIEAENSILDISGFSKQYNCAFIWQKDGVKKLNLYLIINYFKGGKLRFKKIKPEAFEANRFYTVINKKSGEIVPMEVNFNFDDPNLIILPLAFGKRQGREFIWNDLLSLETGSLKLANGRVIEKTLYNRRTRQDEPALFVALTFERREVLDSSNIKPMNLIGVDRGENIPAVIALTDPEGCPLSRFKDSLGNPTHILRIGESYKEKQRTIQAKKEVEQRRAGGYSRKYASKAKNLADDMVRNTARDLLYYAVTQDAMLIFENLSRGFGRQGKRTFMAERQYTRMEDWLTAKLAYEGLPSKTYLSKTLAQYTSKTCSNCGFTITSADYDRVLEKLKKTATGWMTTINGKELKVEGQITYYNRYKRQNVVKDLSVELDRLSEESVNNDISSWTKGRSGEALSLLKKRFSHRPVQEKFVCLNCGFETHADEQAALNIARSWLFLRSQEYKKYQTNKTTGNTDKRAFVETWQSFYRKKLKEVWKPAV

SEQ ID NO: 2403 - protein, 978 aa, synthetic construct
QEIKRINKIRRRLVKDSNTKKAGKTGPMKTLLVRVMTPDLRERLENLRKKPENIPQPISNTSRANLNKLLTDYTEMKKAILHVYWEEFQKDPVGLMSRVAQPASKKIDQNKLKPEMDEKGNLTTAGFACSQCGQPLFVYKLEQVSEKGKAYTNYFGRCNVAEHEKLILLAQLKPEKDSDEAVTYSLGKFGQRALDFYSIHVTKESTHPVKPLAQIAGNRYASGPVGKALSDACMGTIASFLSKYQDIIIEHQKVVKGNQKRLESLRELAGKENLEYPSVTLPPQPHTKEGVDAYNEVIARVRMWVNLNLWQKLKLSRDDAKPLLRLKGFPSFPLVERQANEVDWWDMVCNVKKLINEKKEDGKVFWQNLAGYKRQEALRPYLSSEEDRKKGKKFARYQLGDLLLHLEKKHGEDWGKVYDEAWERIDKKVEGLSKHIKLEEERRSEDAQSKAALTDWLRAKASFVIEGLKEADKDEFCRCELKLQKWYGDLRGKPFAIEAENSILDISGFSKQYNCAFIWQKDGVKKLNLYLIINYFKGGKLRFKKIKPEAFEANRFYTVINKKSGEIVPMEVNFNFDDPNLIILPLAFGKRQGREFIWNDLLSLETGSLKLANGRVIEKTLYNRRTRQDEPALFVALTFERREVLDSSNIKPMNLIGVDRGENIPAVIALTDPEGCPLSRFKDSLGNPTHILRIGERYKEKQRTIQAKKEVEQRRAGGYSRKYASKAKNLADDMVRNTARDLLYYAVTQDAMLIFENLSRGFGRQGKRTFMAERQYTRMEDWLTAKLAYEGLPSKTYLSKTLAQYTSKTCSNCGFTITSADYDRVLEKLKKTATGWMTTINGKELKVEGQITYYNRYKRQNVVKDLSVELDRLSEESVNNDISSWTKGRSGEALSLLKKRFSHRPVQEKFVCLNCGFETHADEQAALNIARSWLFLRSQEYKKYQTNKTTGNTDKRAFVETWQSFYRKKLKEVWKPAV

SEQ ID NO: 2404 - protein, 979 aa, synthetic construct
MQEIKRINKIRRRLVKDSNTKKAGKTGPMKTLLVRVMTPDLRERLENLRKKPENIPQPISNTSRANLNKLLTDYTEMKKAILHVYWEEFQKDPVGLMSRVAQPASKKIDQNKLKPEMDEKGNLTTAGFACSQCGQPLFVYKLEQVSEKGKAYTNYFGRCNVAEHEKLILLAQLKPEKDSDEAVTYSLGKFGQRALDFYSIHVTKESTHPVKPLAQIAGNRYASGPVGKALSDACMGTIASFLSKYQDIIIEHQKVVKGNQKRLESLRELAGKENLEYPSVTLPPQPHTKEGVDAYNEVIARVRMWVNLNLWQKLKLSRDDAKPLLRLKGFPSFPLVERQANEVDWWDMVCNVKKLINEKKEDGKVFWQNLAGYKRQEALRPYLSSEEDRKKGKKFARYQLGDLLLHLEKKHGEDWGKVYDEAWERIDKKVEGLSKHIKLEEERRSEDAQSKAALTDWLRAKASFVIEGLKEADKDEFCRCELKLQKWYGDLRGKPFAIEAENSILDISGFSKQYNCAFIWQKDGVKKLNLYLIINYFKGGKLRFKKIKPEAFEANRFYTVINKKSGEIVPMEVNFNFDDPNLIILPLAFGKRQGREFIWNDLLSLETGSLKLANGRVIEKTLYNRRTRQDEPALFVALTFERREVLDSSNIKPMNLIGVDRGENIPAVIALTDPEGCPLSRFKDSLGNPTHILRIGESYKEKQRTIQAKKEVEQRRAGGYSRKYASKAKNLADDMVRNTARDLLYYAVTQDAMLIFENLSRGFGRQGKRTFMAERQYTRMEDWLTAKLAYEGLPSKTYLSKTLAQYTSKTCSNCGFTITSADYDRVLEKLKKTATGWMTTINGKELKVEGQITYYNRYKRQNVVKDLSVELDRLSEESVNNDISSWTKGRSGEALSLLKKRFSHRPVQEKFVCLNCGFETHADEQAALNIARSWLFLRSQEYKKYQTNKTTGNTDKRAFVETWQSFYRKKLKEVWKPAV

SEQ ID NO: 2405 - RNA, 2931 nt, synthetic construct; identical to SEQ ID NO: 1948
  source 1..2931: mol_type = other RNA

SEQ ID NO: 2406 - RNA, 2931 nt, synthetic construct; identical to SEQ ID NO: 1948
  modified_base 1..2931: mod_base = OTHER; note = Each t is m1f
  source 1..2931: mol_type = other RNA

SEQ ID NO: 2407 - RNA, 2937 nt, synthetic construct
  source 1..2937: mol_type = other RNA
caagagatcaagagaatcaacaagatcagaaggagactggtcaaggacagcaacacaaagaaggccggcaagacacggggccccatgaaaaccctgctcgtcagagtgatgacccctgacctgagagagcggctggaaaacctgagaaagaagcccgagaacatccctcagcctatcagcaacaccagcagggccaacctgaacaagctgctgaccgactacaccgagatgaagaaagccatcctgcacgtgtactgggaagagttccagaaagaccccgtgggcctgatgagcagagttgctcagcctgccagcaagaagatcgaccagaacaagctgaagcccgagatggacgagaagggcaatctgaccacagccggctttgcctgctctcagtgtggccagcctctgttcgtgtacaagctggaacaggtgtccgagaaaggcaaggcctacaccaactacttcggcagatgtaacgtggccgagcacgagaagctgattaagctggcccagctgaaacctgagaaggactctgatgaggccgtgacctacagcctgggcaagtttggacagagagccctggacttctacagcatccacgtgaccaaagaaagcacacaccccgtgaagcccctggctcagatcgccggcaatagatacgcctcttcccctgtgggcaaagccctgtccgatgcctgcatgggaacaatcgccagcttcctgagcaagtaccaggacatcatcatcgagcaccagaaggtggtcaagggcaaccagaagagactggaaagcctgagggagctggccggcaaagagaacctggaataccccagcgtgaccctgcctcctcagcctcacacaaaagaaggcgtggacgcctacaacgaagtgatcgccagagtgagaatgtgggtcaacctgaacctgtggcagaagctgaaactgtccagggacgacgccaagcctctgctgagactgaagggcttccctagcttccctctggtggaaagacaggccaatgaagtggattggtgggacatggtctgcaacgtgaagaagctgatcaacgagaagaaagaggatggcaaggttttctggcagaacctggccggctacaagagacaagaagccctgaggccttacctgagcagcgaagaggaccggaagaagggcaagaagttcgccagataccagctgggcgacctgctgctgcacctggaaaagaagcacggcgaggactggggcaaagtgtacgatgaggcctgggagagaatcgacaagaaggtggaaggcctgagcaagcacattaagctggaagaggaaagaaggagcgaggacgcccaatctaaagccgctctgaccgattggctgagagccaaggccagctttgtgatcgagggcctgaaagaggccgacaaggacgagttctgcagatgcgagctgaagctgcagaagtggtacggcgatctgagaggcaagcccttcgccattgaggccgagaacagcatcctggacatcagcggcttcagcaagcagtacaactgcgccttcatttggcagaaagacggcgtcaagaaactgaacctgtacctgatcatcaattacttcaaaggcggcaagctgcggttcaagaagatcaaacccgaggccttcgaggctaacagattctacaccgtgatcaacaaaaagtccggcgagatcgtgcccatggaagtgaacttcaacttcgacgaccccaacctgattatcctgcctctggccttcggcaagagacagggcagagagttcatctggaacgatctgctgagcctggaaaccggctctctgaagctggccaatggcagagtgatcgagaaaaccctgtacaacaggagaaccagacaggacgagcctgctctgtttgtggccctgaccttcgagagaagagaggtgctggacagcagcaacatcaagcccatgaacctgatcggcgtggcccggggcgagaatatccctgctgtgatcgccctgacagaccctgaaggatgcccactgagcagattcaaggactccctgggcaaccctacacacatcctgagaatcggcgagagctacaaagagaagcagaggacaatccaggccaagaaagaggtggaacagagaagagccggcggatactctaggaagtacgccagcaaggccaagaatctggccgacgacatggtccgaaacaccgccagagatctgctgtactacgccgtgacacaggacgccatgctgatcttcgcgaatctgagcagaggcttcggccggcagggcaagagaacctttatggccgagaggcagtacaccagaatggaagattggctcacagctaaactggcctacgagggactgcccagcaagacctacctgtccaaaacactggcccagtatacctccaagacctgcagcaattgcggcttcaccatcaccagcgccgactacgacagagtgctggaaaagctcaagaaaaccgccaccggctggatgaccaccatcaacggcaaagagctgaaggttgagggccagatcacctactacaacaggtacaagaggcagaacgtcgtgaaggatctgagcgtggaactggacagactgagcgaagagagcgtgaacaacgacatcagcagctggacaaagggcagatcaggcgaggctctgagcctgctgaagaagaggtttagccacagacctgtgcaagagaagttcgtgtgcctgaactgcggcttcgagacacacgccgctgaacaggctgccctgaacattgccagaagctggctgttcctgagaagccaagagtacaagaagtaccagaccaacaagaccaccggcaacaccgacaagagggcctttgtggaaacctggcagagcttctacagaaaaaagctgaaagaagtctggaagcccgccgtg

SEQ ID NO: 2408 - RNA, 2937 nt, synthetic construct; identical to SEQ ID NO: 2407
  modified_base 1..2937: mod_base = OTHER; note = Each t is m1f
  source 1..2937: mol_type = other RNA

SEQ ID NO: 2409 - RNA, 5476 nt, synthetic construct
  source 1..5476: mol_type = other RNA
aggaaataagagagaaaagaagagtaagaagaaatataagagccaccatggcccctaagaagaagcgtaaagtgagccgggtgaacggcagcggcagcggcggcggcatgaaccacgaccaggagttcgacccccctaaggtgtaccctcccgtccccgccgagaagagaaagcccatccgggtcctgagcctgttcgatggcatcgccaccggtctgctggtgctgaaggacctgggcatccaggtggataggtacattgcctccgaggtgtgcgaggactccatcaccgtgggaatggtgcgtcatcagggcaagatcatgtacgtgggcgacgtgcggagcgtgacacagaagcatatccaggagtggggccctttcgacctggtgatcggcggcagcccttgcaatgacctgagcatcgtgaacccagcccggaagggcctgtacgagggaaccggcagactgttcttcgagttttacagactgctgcacgacgcccggcctaaggaaggcgacgaccggcccttcttttggctgttcgagaatgtggtggccatgggagtcagcgacaagcgggatattagccggttcctggagagcaaccccgtgatgatcgatgccaaggaagtgagcgccgcccaccgggccagatacttctggggcaatctgcctggcatgaacagacccctggccagcaccgtgaacgacaagctggagctgcaggagtgcctggagcacggccggatcgccaagttcagcaaggtgagaaccatcaccacccgaagcaacagcatcaaacaaggcaaggaccagcactttcctgtgttcatgaacgagaaggaggacatcctgtggtgtaccgagatggagagagtgttcgggttcccagtccactacacagatgtcagcaacatgtctagactggccagacagagactgctgggaagaagctggtccgtccctgtgatcagacacctgttcgcccctctgaaggagtacttcgcctgcgtgagcagcggcaacagcaacgccaacagccggggccccagcttctctagcggcctggtgccactgtccctgagagggagccacatgggccccatggagatctacaaaaccgtgagcgcctggaagcggcagcctgtgcgcgtgctgagcctgtttcggaatatcgataaagtcctgaaaagcctgggattcctggagagcggctctggctccggcggtggcaccctgaagtacgtggaggatgtgacaaacgtggtcagacgggatgtggagaagtggggccccttcgatctggtgtacggcagcacccaacccctgggcagctcttgtgaccggtgccctggctggtacatgtttcagttccaccggatcctgcagtacgccctgccgagacaggagtcccagcggccattcttttggattttcatggacaacttgctgctgaccgaggatgaccaggaaactaccactcggttcctgcagaccgaagccgtgaccctgcaggacgtgagaggccgggactaccagaacgccatgcgggtgtggtccaacatccctggactgaaaagcaagcacgcacctctgacccctaaagaagaggagtacctgcaggcccaggtgcggagcagaagcaagctggacgcccctaaggtggatctgctggtgaagaattgcctcctgcccctgagagagtacttcaagtatttcagccagaatagtctgcccctgggcggcccaagcagcggcgcccctcctcccagcggcggcagcccagccggctccccaacctctaccgaggagggcacctctgagtccgccacccccgagagcggccctggcacctccaccgagcccagcgagggcagcgcacccggcagccctgccggcagccccacctccacagaggagggaaccagcaccgagcccagcgaaggcagcgccccaggcaccagcaccgagcctagtgagggcggctctggcggcggcagcgcccaggagattaaacggatcaacaagatcagaagaagacttgtgaaagacagcaacaccaagaaggccggcaagacaggccccatgaaaaccctgctggttagagtgatgacacccgatctgagagagcggctggaaaacctgagaaagaagcctgaaaatatcccccagcccatcagcaatacatctagagccaacctgaataagctgctgaccgattacaccgaaatgaagaaggcgatcctgcatgtgtactgggaagagttccagaaggaccctgtgggcctgatgagccgggtggcccagcctgccagcaagaagatcgatcagaacaagctgaaacctgagatggacgagaagggcaacctgaccaccgccggctttgcctgctctcagtgtggccagcccctgttcgtgtacaagctggagcaggtgtctgagaagggcaaggcttacaccaactacttcggacggtgcaatgtggccgagcacgaaaagctgatcctgctggcccagctgaagcccgagaaggatagcgacgaagccgtgacatatagcctgggaaagtttgggcagagggccctggatttctacagcattcatgtgaccaaggagtccacccaccccgtgaagcccctggcccagatcgccggaaacagatacgcctccggacctgtgggaaaggccctgagcgacgcatgtatgggcacaatcgcctccttcctgtctaagtaccaggacatcatcatcgaacaccagaaggtggtgaagggcaaccagaagagactggagagcctgcgggagctggccggcaaggaaaacctggaataccctagcgtgaccctgccacctcagcctcacaccaaggagggcgttgatgcctacaacgaagtgatcgcccgggtgcgaatgtgggtgaacctgaacctgtggcagaagctgaagctaagcagagatgatgccaagcctctgctgagactgaagggattcccttcctttcctctggtcgagagacaggccaacgaagtggactggtgggacatggtgtgtaacgtgaagaagctgatcaacgagaaaaaggaggatggcaaggtgttttggcagaatctggctggctacaagagacaggaagccctgagaccatacctgagcagcgaggaagatcggaagaagggaaagaaattcgctcggtaccagctgggcgacctgctgctgcacctggaaaagaagcacggcgaggactggggaaaggtgtacgacgaggcctgggagcggattgacaagaaagtggaaggcctgagcaagcacatcaagctggaagaggaacggagaagcgaggacgcccagagcaaggccgccctgaccgactggctgcgggctaaggccagcttcgtgatcgagggcctgaaggaggccgacaaggacgagttctgcagatgcgagctgaagctgcagaagtggtacggggacctgcggggaaagcccttcgccatcgaagccgagaacagcatcctggacatcagcggcttcagcaagcagtacaactgtgccttcatctggcagaaggacggcgtgaagaagctgaacctgtacctgatcatcaactacttcaagggcggcaagctgcggttcaagaagatcaaacctgaagccttcgaagccaacagattctacaccgtgatcaacaaaaagagcggcgagatcgtgcccatggaggtgaacttcaacttcgacgaccccaacctgatcatcctgcctctggcctttggcaagagacagggcagagaattcatctggaacgacctgctgtccctggaaaccggcagcctgaagctggccaacggaagagtgatcgagaagacactgtacaacagaagaacccggcaggatgagcctgccctgttcgtggccctgaccttcgagcggcgggaggtcctggactcctccaatatcaaaccaatgaacctgatcggcgtggcaagaggcgaaaacatccccgccgtgatcgccctgaccgaccccgagggctgcccactgagccggtttaaggatagcctgggaaacccaacccacatcctgagaatcggcgagagctataaggagaagcagcggaccatccaggccaagaaggaggtggagcagcggagagccggcggctacagccggaagtacgccagcaaagccaagaatctggcagacgatatggtgagaaacaccgctagagatctgctgtactacgccgtgacccaggatgccatgctgatcttcgccaacctgagccggggcttcggccggcagggcaagcggaccttcatggccgagagacagtacacacggatggaggactggctgaccgccaagctggcctacgagggcctgagcaagacctacctgtccaagacactggcccagtacacctccaagacatgcagcaactgtgggtttaccatcaccagcgccgactacgacagggtgctggagaagctgaagaagacagcaacaggctggatgaccacaattaacggcaaggagctgaaggtggagggccagattacctactacaacagatacaagagacagaacgtagtcaaggacctgtccgtcgagctggatagactgagcgaagaatctgtgaacaacgacatctcctcctggacaaagggcagaagcggagaagctctgagcctcctgaagaaaagattctcccatagacccgtgcaggagaagttcgtgtgcctgaactgcggcttcgagacacacgcagccgagcaagccgccctgaacatcgccagatcctggctgttcctgcggagccaggagtacaagaaataccagacaaacaagacaaccggcaacaccgataagagagccttcgtcgagacctggcagtccttttaccggaagaagcttaaggaggtgtggaaacctgccgtgcggtctggcggatctggcggaggctccacaagcatgaacaactcccagggcagagtgaccttcgaggacgtgaccgtgaattttacacagggagagtggcagagactgaaccccgagcagagaaacctgtaccgggatgtgatgctggaaaactacagcaatctggtgtccgtgggccagggcgagaccacaaagcctgacgtgatcctgcgtctggagcagggcaaggaaccctggctggaggaggaggaggtgctgggaagcggacgggccgagaagaacggcgacatcggcggacagatctggaagcctaaggacgtgaaagaaagcctgaccagccccaagaaaaagagaaaagtctaagctgccttctgcggggcttgccttctggccatgcccttcttctctcccttgcacctgtacctcttggtctttgaataaagcctgagtaggaaggctagcaaaaaaaaaaaaaaaaaaaaaaaaaaaaaaaaaaaaaaaaaaaaaaaaaaaaaaaaaaaaaaaaaaaaaaaaaaaaaaaa

SEQ ID NO: 2410 - RNA, 5419 nt, synthetic construct
  source 1..5419: mol_type = other RNA
aggaaataagagagaaaagaagagtaagaagaaatataagagccaccatggcccctaagaagaagcgtaaagtgagccgggtgaacggcagcggcagcggcggcggcatgaaccacgaccaggagttcgacccccctaaggtgtaccctcccgtccccgccgagaagagaaagcccatccgggtcctgagcctgttcgatggcatcgccaccggtctgctggtgctgaaggacctgggcatccaggtggataggtacattgcctccgaggtgtgcgaggactccatcaccgtgggaatggtgcgtcatcagggcaagatcatgtacgtgggcgacgtgcggagcgtgacacagaagcatatccaggagtggggccctttcgacctggtgatcggcggcagcccttgcaatgacctgagcatcgtgaacccagcccggaagggcctgtacgagggaaccggcagactgttcttcgagttttacagactgctgcacgacgcccggcctaaggaaggcgacgaccggcccttcttttggctgttcgagaatgtggtggccatgggagtcagcgacaagcgggatattagccggttcctggagagcaaccccgtgatgatcgatgccaaggaagtgagcgccgcccaccgggccagatacttctggggcaatctgcctggcatgaacagacccctggccagcaccgtgaacgacaagctggagctgcaggagtgcctggagcacggccggatcgccaagttcagcaaggtgagaaccatcaccacccgaagcaacagcatcaaacaaggcaaggaccagcactttcctgtgttcatgaacgagaaggaggacatcctgtggtgtaccgagatggagagagtgttcgggttcccagtccactacacagatgtcagcaacatgtctagactggccagacagagactgctgggaagaagctggtccgtccctgtgatcagacacctgttcgcccctctgaaggagtacttcgcctgcgtgagcagcggcaacagcaacgccaacagccggggccccagcttctctagcggcctggtgccactgtccctgagagggagccacatgggccccatggagatctacaaaaccgtgagcgcctggaagcggcagcctgtgcgcgtgctgagcctgtttcggaatatcgataaagtcctgaaaagcctgggattcctggagagcggctctggctccggcggtggcaccctgaagtacgtggaggatgtgacaaacgtggtcagacgggatgtggagaagtggggccccttcgatctggtgtacggcagcacccaacccctgggcagctcttgtgaccggtgccctggctggtacatgtttcagttccaccggatcctgcagtacgccctgccgagacaggagtcccagcggccattcttttggattttcatggacaacttgctgctgaccgaggatgaccaggaaactaccactcggttcctgcagaccgaagccgtgaccctgcaggacgtgagaggccgggactaccagaacgccatgcgggtgtggtccaacatccctggactgaaaagcaagcacgcacctctgacccctaaagaagaggagtacctgcaggcccaggtgcggagcagaagcaagctggacgcccctaaggtggatctgctggtgaagaattgcctcctgcccctgagagagtacttcaagtatttcagccagaatagtctgcccctgggcggcccaagcagcggcgcccctcctcccagcggcggcagcccagccggctccccaacctctaccgaggagggcacctctgagtccgccacccccgagagcggccctggcacctccaccgagcccagcgagggcagcgcacccggcagccctgccggcagccccacctccacagaggagggaaccagcaccgagcccagcgaaggcagcgccccaggcaccagcaccgagcctagtgagggcggctctggcggcggcagcgcccaggagattaaacggatcaacaagatcagaagaagacttgtgaaagacagcaacaccaagaaggccggcaagacaggccccatgaaaaccctgctggttagagtgatgacacccgatctgagagagcggctggaaaacctgagaaagaagcctgaaaatatcccccagcccatcagcaatacatctagagccaacctgaataagctgctgaccgattacaccgaaatgaagaaggcgatcctgcatgtgtactgggaagagttccagaaggaccctgtgggcctgatgagccgggtggcccagcctgccagcaagaagatcgatcagaacaagctgaaacctgagatggacgagaagggcaacctgaccaccgccggctttgcctgctctcagtgtggccagcccctgttcgtgtacaagctggagcaggtgtctgagaagggcaaggcttacaccaactacttcggacggtgcaatgtggccgagcacgaaaagctgatcctgctggcccagctgaagcccgagaaggatagcgacgaagccgtgacatatagcctgggaaagtttgggcagagggccctggatttctacagcattcatgtgaccaaggagtccacccaccccgtgaagcccctggcccagatcgccggaaacagatacgcctccggacctgtgggaaaggccctgagcgacgcatgtatgggcacaatcgcctccttcctgtctaagtaccaggacatcatcatcgaacaccagaaggtggtgaagggcaaccagaagagactggagagcctgcgggagctggccggcaaggaaaacctggaataccctagcgtgaccctgccacctcagcctcacaccaaggagggcgttgatgcctacaacgaagtgatcgcccgggtgcgaatgtgggtgaacctgaacctgtggcagaagctgaagctaagcagagatgatgccaagcctctgctgagactgaagggattcccttcctttcctctggtcgagagacaggccaacgaagtggactggtgggacatggtgtgtaacgtgaagaagctgatcaacgagaaaaaggaggatggcaaggtgttttggcagaatctggctggctacaagagacaggaagccctgagaccatacctgagcagcgaggaagatcggaagaagggaaagaaattcgctcggtaccagctgggcgacctgctgctgcacctggaaaagaagcacggcgaggactggggaaaggtgtacgacgaggcctgggagcggattgacaagaaagtggaaggcctgagcaagcacatcaagctggaagaggaacggagaagcgaggacgcccagagcaaggccgccctgaccgactggctgcgggctaaggccagcttcgtgatcgagggcctgaaggaggccgacaaggacgagttctgcagatgcgagctgaagctgcagaagtggtacggggacctgcggggaaagcccttcgccatcgaagccgagaacagcatcctggacatcagcggcttcagcaagcagtacaactgtgccttcatctggcagaaggacggcgtgaagaagctgaacctgtacctgatcatcaactacttcaagggcggcaagctgcggttcaagaagatcaaacctgaagccttcgaagccaacagattctacaccgtgatcaacaaaaagagcggcgagatcgtgcccatggaggtgaacttcaacttcgacgaccccaacctgatcatcctgcctctggcctttggcaagagacagggcagagaattcatctggaacgacctgctgtccctggaaaccggcagcctgaagctggccaacggaagagtgatcgagaagacactgtacaacagaagaacccggcaggatgagcctgccctgttcgtggccctgaccttcgagcggcgggaggtcctggactcctccaatatcaaaccaatgaacctgatcggcgtggcaagaggcgaaaacatccccgccgtgatcgccctgaccgaccccgagggctgcccactgagccggtttaaggatagcctgggaaacccaacccacatcctgagaatcggcgagagctataaggagaagcagcggaccatccaggccaagaaggaggtggagcagcggagagccggcggctacagccggaagtacgccagcaaagccaagaatctggcagacgatatggtgagaaacaccgctagagatctgctgtactacgccgtgacccaggatgccatgctgatcttcgccaacctgagccggggcttcggccggcagggcaagcggaccttcatggccgagagacagtacacacggatggaggactggctgaccgccaagctggcctacgagggcctgagcaagacctacctgtccaagacactggcccagtacacctccaagacatgcagcaactgtgggtttaccatcaccagcgccgactacgacagggtgctggagaagctgaagaagacagcaacaggctggatgaccacaattaacggcaaggagctgaaggtggagggccagattacctactacaacagatacaagagacagaacgtagtcaaggacctgtccgtcgagctggatagactgagcgaagaatctgtgaacaacgacatctcctcctggacaaagggcagaagcggagaagctctgagcctcctgaagaaaagattctcccatagacccgtgcaggagaagttcgtgtgcctgaactgcggcttcgagacacacgcagccgagcaagccgccctgaacatcgccagatcctggctgttcctgcggagccaggagtacaagaaataccagacaaacaagacaaccggcaacaccgataagagagccttcgtcgagacctggcagtccttttaccggaagaagcttaaggaggtgtggaaacctgccgtgcggtctggcggatctggcggaggctccacaagcgccctggtgacatttgaggacgtcgccgtgcggttcacccaggaggaatgggctctgctggatccttctcagaaaatcctgtaccgggacgtgatgagagagacataccggaatctgacctccgtgggcatcaactgggaatgttgggaccttgaagcctgcttcagaagcctgggaagaaacctgagagtgcaggtggtgaagagaaagtgcgagctgaccaacagcggcccctgcgccgagaccagccccaagaaaaagagaaaagtctaagctgccttctgcggggcttgccttctggccatgcccttcttctctcccttgcacctgtacctcttggtctttgaataaagcctgagtaggaaggctagcaaaaaaaaaaaaaaaaaaaaaaaaaaaaaaaaaaaaaaaaaaaaaaaaaaaaaaaaaaaaaaaaaaaaaaaaaaaaaaaa

SEQ ID NO: 2411 - RNA, 5419 nt, synthetic construct
  source 1..5419: mol_type = other RNA
aggaaataagagagaaaagaagagtaagaagaaatataagagccaccatggcccctaagaagaagcgtaaagtgagccgggtgaacggcagcggcagcggcggcggcatgaaccacgaccaggagttcgacccccctaaggtgtaccctcccgtccccgccgagaagagaaagcccatccgggtcctgagcctgttcgatggcatcgccaccggtctgctggtgctgaaggacctgggcatccaggtggataggtacattgcctccgaggtgtgcgaggactccatcaccgtgggaatggtgcgtcatcagggcaagatcatgtacgtgggcgacgtgcggagcgtgacacagaagcatatccaggagtggggccctttcgacctggtgatcggcggcagcccttgcaatgacctgagcatcgtgaacccagcccggaagggcctgtacgagggaaccggcagactgttcttcgagttttacagactgctgcacgacgcccggcctaaggaaggcgacgaccggcccttcttttggctgttcgagaatgtggtggccatgggagtcagcgacaagcgggatattagccggttcctggagagcaaccccgtgatgatcgatgccaaggaagtgagcgccgcccaccgggccagatacttctggggcaatctgcctggcatgaacagacccctggccagcaccgtgaacgacaagctggagctgcaggagtgcctggagcacggccggatcgccaagttcagcaaggtgagaaccatcaccacccgaagcaacagcatcaaacaaggcaaggaccagcactttcctgtgttcatgaacgagaaggaggacatcctgtggtgtaccgagatggagagagtgttcgggttcccagtccactacacagatgtcagcaacatgtctagactggccagacagagactgctgggaagaagctggtccgtccctgtgatcagacacctgttcgcccctctgaaggagtacttcgcctgcgtgagcagcggcaacagcaacgccaacagccggggccccagcttctctagcggcctggtgccactgtccctgagagggagccacatgggccccatggagatctacaaaaccgtgagcgcctggaagcggcagcctgtgcgcgtgctgagcctgtttcggaatatcgataaagtcctgaaaagcctgggattcctggagagcggctctggctccggcggtggcaccctgaagtacgtggaggatgtgacaaacgtggtcagacgggatgtggagaagtggggccccttcgatctggtgtacggcagcacccaacccctgggcagctcttgtgaccggtgccctggctggtacatgtttcagttccaccggatcctgcagtacgccctgccgagacaggagtcccagcggccattcttttggattttcatggacaacttgctgctgaccgaggatgaccaggaaactaccactcggttcctgcagaccgaagccgtgaccctgcaggacgtgagaggccgggactaccagaacgccatgcgggtgtggtccaacatccctggactgaaaagcaagcacgcacctctgacccctaaagaagaggagtacctgcaggcccaggtgcggagcagaagcaagctggacgcccctaaggtggatctgctggtgaagaattgcctcctgcccctgagagagtacttcaagtatttcagccagaatagtctgcccctgggcggcccaagcagcggcgcccctcctcccagcggcggcagcccagccggctccccaacctctaccgaggagggcacctctgagtccgccacccccgagagcggccctggcacctccaccgagcccagcgagggcagcgcacccggcagccctgccggcagccccacctccacagaggagggaaccagcaccgagcccagcgaaggcagcgccccaggcaccagcaccgagcctagtgagggcggctctggcggcggcagcgcccaggagattaaacggatcaacaagatcagaagaagacttgtgaaagacagcaacaccaagaaggccggcaagacaggccccatgaaaaccctgctggttagagtgatgacacccgatctgagagagcggctggaaaacctgagaaagaagcctgaaaatatcccccagcccatcagcaatacatctagagccaacctgaataagctgctgaccgattacaccgaaatgaagaaggcgatcctgcatgtgtactgggaagagttccagaaggaccctgtgggcctgatgagccgggtggcccagcctgccagcaagaagatcgatcagaacaagctgaaacctgagatggacgagaagggcaacctgaccaccgccggctttgcctgctctcagtgtggccagcccctgttcgtgtacaagctggagcaggtgtctgagaagggcaaggcttacaccaactacttcggacggtgcaatgtggccgagcacgaaaagctgatcctgctggcccagctgaagcccgagaaggatagcgacgaagccgtgacatatagcctgggaaagtttgggcagagggccctggatttctacagcattcatgtgaccaaggagtccacccaccccgtgaagcccctggcccagatcgccggaaacagatacgcctccggacctgtgggaaaggccctgagcgacgcatgtatgggcacaatcgcctccttcctgtctaagtaccaggacatcatcatcgaacaccagaaggtggtgaagggcaaccagaagagactggagagcctgcgggagctggccggcaaggaaaacctggaataccctagcgtgaccctgccacctcagcctcacaccaaggagggcgttgatgcctacaacgaagtgatcgcccgggtgcgaatgtgggtgaacctgaacctgtggcagaagctgaagctaagcagagatgatgccaagcctctgctgagactgaagggattcccttcctttcctctggtcgagagacaggccaacgaagtggactggtgggacatggtgtgtaacgtgaagaagctgatcaacgagaaaaaggaggatggcaaggtgttttggcagaatctggctggctacaagagacaggaagccctgagaccatacctgagcagcgaggaagatcggaagaagggaaagaaattcgctcggtaccagctgggcgacctgctgctgcacctggaaaagaagcacggcgaggactggggaaaggtgtacgacgaggcctgggagcggattgacaagaaagtggaaggcctgagcaagcacatcaagctggaagaggaacggagaagcgaggacgcccagagcaaggccgccctgaccgactggctgcgggctaaggccagcttcgtgatcgagggcctgaaggaggccgacaaggacgagttctgcagatgcgagctgaagctgcagaagtggtacggggacctgcggggaaagcccttcgccatcgaagccgagaacagcatcctggacatcagcggcttcagcaagcagtacaactgtgccttcatctggcagaaggacggcgtgaagaagctgaacctgtacctgatcatcaactacttcaagggcggcaagctgcggttcaagaagatcaaacctgaagccttcgaagccaacagattctacaccgtgatcaacaaaaagagcggcgagatcgtgcccatggaggtgaacttcaacttcgacgaccccaacctgatcatcctgcctctggcctttggcaagagacagggcagagaattcatctggaacgacctgctgtccctggaaaccggcagcctgaagctggccaacggaagagtgatcgagaagacactgtacaacagaagaacccggcaggatgagcctgccctgttcgtggccctgaccttcgagcggcgggaggtcctggactcctccaatatcaaaccaatgaacctgatcggcgtggcaagaggcgaaaacatccccgccgtgatcgccctgaccgaccccgagggctgcccactgagccggtttaaggatagcctgggaaacccaacccacatcctgagaatcggcgagagctataaggagaagcagcggaccatccaggccaagaaggaggtggagcagcggagagccggcggctacagccggaagtacgccagcaaagccaagaatctggcagacgatatggtgagaaacaccgctagagatctgctgtactacgccgtgacccaggatgccatgctgatcttcgccaacctgagccggggcttcggccggcagggcaagcggaccttcatggccgagagacagtacacacggatggaggactggctgaccgccaagctggcctacgagggcctgagcaagacctacctgtccaagacactggcccagtacacctccaagacatgcagcaactgtgggtttaccatcaccagcgccgactacgacagggtgctggagaagctgaagaagacagcaacaggctggatgaccacaattaacggcaaggagctgaaggtggagggccagattacctactacaacagatacaagagacagaacgtagtcaaggacctgtccgtcgagctggatagactgagcgaagaatctgtgaacaacgacatctcctcctggacaaagggcagaagcggagaagctctgagcctcctgaagaaaagattctcccatagacccgtgcaggagaagttcgtgtgcctgaactgcggcttcgagacacacgcagccgagcaagccgccctgaacatcgccagatcctggctgttcctgcggagccaggagtacaagaaataccagacaaacaagacaaccggcaacaccgataagagagccttcgtcgagacctggcagtccttttaccggaagaagcttaaggaggtgtggaaacctgccgtgcggtctggcggatctggcggaggctccacaagctctacacctgtgaccttcgaggatgtggtggtctacttcaccgccgctgagtgggtgcacctgacaaactggcaaagagatttttatcaggccgtgatgatggaaacctacgagctggtggccagcgtggctggcgacggcgttccaatggccgaggacgaggaaggcggagtggaaagacccgtgtggcagtacatccccagaggcaagcggcggagaaagacccctcagcctcgcgccgacaccagccccaagaaaaagagaaaagtctaagctgccttctgcggggcttgccttctggccatgcccttcttctctcccttgcacctgtacctcttggtctttgaataaagcctgagtaggaaggctagcaaaaaaaaaaaaaaaaaaaaaaaaaaaaaaaaaaaaaaaaaaaaaaaaaaaaaaaaaaaaaaaaaaaaaaaaaaaaaaaa

SEQ ID NO: 2412 - RNA, 5419 nt, synthetic construct
  source 1..5419: mol_type = other RNA
aggaaataagagagaaaagaagagtaagaagaaatataagagccaccatggcccctaagaagaagcgtaaagtgagccgggtgaacggcagcggcagcggcggcggcatgaaccacgaccaggagttcgacccccctaaggtgtaccctcccgtccccgccgagaagagaaagcccatccgggtcctgagcctgttcgatggcatcgccaccggtctgctggtgctgaaggacctgggcatccaggtggataggtacattgcctccgaggtgtgcgaggactccatcaccgtgggaatggtgcgtcatcagggcaagatcatgtacgtgggcgacgtgcggagcgtgacacagaagcatatccaggagtggggccctttcgacctggtgatcggcggcagcccttgcaatgacctgagcatcgtgaacccagcccggaagggcctgtacgagggaaccggcagactgttcttcgagttttacagactgctgcacgacgcccggcctaaggaaggcgacgaccggcccttcttttggctgttcgagaatgtggtggccatgggagtcagcgacaagcgggatattagccggttcctggagagcaaccccgtgatgatcgatgccaaggaagtgagcgccgcccaccgggccagatacttctggggcaatctgcctggcatgaacagacccctggccagcaccgtgaacgacaagctggagctgcaggagtgcctggagcacggccggatcgccaagttcagcaaggtgagaaccatcaccacccgaagcaacagcatcaaacaaggcaaggaccagcactttcctgtgttcatgaacgagaaggaggacatcctgtggtgtaccgagatggagagagtgttcgggttcccagtccactacacagatgtcagcaacatgtctagactggccagacagagactgctgggaagaagctggtccgtccctgtgatcagacacctgttcgcccctctgaaggagtacttcgcctgcgtgagcagcggcaacagcaacgccaacagccggggccccagcttctctagcggcctggtgccactgtccctgagagggagccacatgggccccatggagatctacaaaaccgtgagcgcctggaagcggcagcctgtgcgcgtgctgagcctgtttcggaatatcgataaagtcctgaaaagcctgggattcctggagagcggctctggctccggcggtggcaccctgaagtacgtggaggatgtgacaaacgtggtcagacgggatgtggagaagtggggccccttcgatctggtgtacggcagcacccaacccctgggcagctcttgtgaccggtgccctggctggtacatgtttcagttccaccggatcctgcagtacgccctgccgagacaggagtcccagcggccattcttttggattttcatggacaacttgctgctgaccgaggatgaccaggaaactaccactcggttcctgcagaccgaagccgtgaccctgcaggacgtgagaggccgggactaccagaacgccatgcgggtgtggtccaacatccctggactgaaaagcaagcacgcacctctgacccctaaagaagaggagtacctgcaggcccaggtgcggagcagaagcaagctggacgcccctaaggtggatctgctggtgaagaattgcctcctgcccctgagagagtacttcaagtatttcagccagaatagtctgcccctgggcggcccaagcagcggcgcccctcctcccagcggcggcagcccagccggctccccaacctctaccgaggagggcacctctgagtccgccacccccgagagcggccctggcacctccaccgagcccagcgagggcagcgcacccggcagccctgccggcagccccacctccacagaggagggaaccagcaccgagcccagcgaaggcagcgccccaggcaccagcaccgagcctagtgagggcggctctggcggcggcagcgcccaggagattaaacggatcaacaagatcagaagaagacttgtgaaagacagcaacaccaagaaggccggcaagacaggccccatgaaaaccctgctggttagagtgatgacacccgatctgagagagcggctggaaaacctgagaaagaagcctgaaaatatcccccagcccatcagcaatacatctagagccaacctgaataagctgctgaccgattacaccgaaatgaagaaggcgatcctgcatgtgtactgggaagagttccagaaggaccctgtgggcctgatgagccgggtggcccagcctgccagcaagaagatcgatcagaacaagctgaaacctgagatggacgagaagggcaacctgaccaccgccggctttgcctgctctcagtgtggccagcccctgttcgtgtacaagctggagcaggtgtctgagaagggcaaggcttacaccaactacttcggacggtgcaatgtggccgagcacgaaaagctgatcctgctggcccagctgaagcccgagaaggatagcgacgaagccgtgacatatagcctgggaaagtttgggcagagggccctggatttctacagcattcatgtgaccaaggagtccacccaccccgtgaagcccctggcccagatcgccggaaacagatacgcctccggacctgtgggaaaggccctgagcgacgcatgtatgggcacaatcgcctccttcctgtctaagtaccaggacatcatcatcgaacaccagaaggtggtgaagggcaaccagaagagactggagagcctgcgggagctggccggcaaggaaaacctggaataccctagcgtgaccctgccacctcagcctcacaccaaggagggcgttgatgcctacaacgaagtgatcgcccgggtgcgaatgtgggtgaacctgaacctgtggcagaagctgaagctaagcagagatgatgccaagcctctgctgagactgaagggattcccttcctttcctctggtcgagagacaggccaacgaagtggactggtgggacatggtgtgtaacgtgaagaagctgatcaacgagaaaaaggaggatggcaaggtgttttggcagaatctggctggctacaagagacaggaagccctgagaccatacctgagcagcgaggaagatcggaagaagggaaagaaattcgctcggtaccagctgggcgacctgctgctgcacctggaaaagaagcacggcgaggactggggaaaggtgtacgacgaggcctgggagcggattgacaagaaagtggaaggcctgagcaagcacatcaagctggaagaggaacggagaagcgaggacgcccagagcaaggccgccctgaccgactggctgcgggctaaggccagcttcgtgatcgagggcctgaaggaggccgacaaggacgagttctgcagatgcgagctgaagctgcagaagtggtacggggacctgcggggaaagcccttcgccatcgaagccgagaacagcatcctggacatcagcggcttcagcaagcagtacaactgtgccttcatctggcagaaggacggcgtgaagaagctgaacctgtacctgatcatcaactacttcaagggcggcaagctgcggttcaagaagatcaaacctgaagccttcgaagccaacagattctacaccgtgatcaacaaaaagagcggcgagatcgtgcccatggaggtgaacttcaacttcgacgaccccaacctgatcatcctgcctctggcctttggcaagagacagggcagagaattcatctggaacgacctgctgtccctggaaaccggcagcctgaagctggccaacggaagagtgatcgagaagacactgtacaacagaagaacccggcaggatgagcctgccctgttcgtggccctgaccttcgagcggcgggaggtcctggactcctccaatatcaaaccaatgaacctgatcggcgtggcaagaggcgaaaacatccccgccgtgatcgccctgaccgaccccgagggctgcccactgagccggtttaaggatagcctgggaaacccaacccacatcctgagaatcggcgagagctataaggagaagcagcggaccatccaggccaagaaggaggtggagcagcggagagccggcggctacagccggaagtacgccagcaaagccaagaatctggcagacgatatggtgagaaacaccgctagagatctgctgtactacgccgtgacccaggatgccatgctgatcttcgccaacctgagccggggcttcggccggcagggcaagcggaccttcatggccgagagacagtacacacggatggaggactggctgaccgccaagctggcctacgagggcctgagcaagacctacctgtccaagacactggcccagtacacctccaagacatgcagcaactgtgggtttaccatcaccagcgccgactacgacagggtgctggagaagctgaagaagacagcaacaggctggatgaccacaattaacggcaaggagctgaaggtggagggccagattacctactacaacagatacaagagacagaacgtagtcaaggacctgtccgtcgagctggatagactgagcgaagaatctgtgaacaacgacatctcctcctggacaaagggcagaagcggagaagctctgagcctcctgaagaaaagattctcccatagacccgtgcaggagaagttcgtgtgcctgaactgcggcttcgagacacacgcagccgagcaagccgccctgaacatcgccagatcctggctgttcctgcggagccaggagtacaagaaataccagacaaacaagacaaccggcaacaccgataagagagccttcgtcgagacctggcagtccttttaccggaagaagcttaaggaggtgtggaaacctgccgtgcggtctggcggatctggcggaggctccacaagccaggacgtggtgacattcaaggacgtcgccatctacttcagccctgaggaatgggtgcggctgagcgccggacagagagaactgtaccaggaggtgatgctggacaactacgagctggtgaccagcctggatagagagagcaaactgctgtataagatggaccccgaggaagaaagctgcgagggcgtgccatacagctctgccgacagcggcgcccctgatagctcctccacctctgcttgtaccagccccaagaaaaagagaaaagtctaagctgccttctgcggggcttgccttctggccatgcccttcttctctcccttgcacctgtacctcttggtctttgaataaagcctgagtaggaaggctagcaaaaaaaaaaaaaaaaaaaaaaaaaaaaaaaaaaaaaaaaaaaaaaaaaaaaaaaaaaaaaaaaaaaaaaaaaaaaaaaa

SEQ ID NO: 2413 - RNA, 5446 nt, synthetic construct
  source 1..5446: mol_type = other RNA
aggaaataagagagaaaagaagagtaagaagaaatataagagccaccatggcccctaagaagaagcgtaaagtgagccgggtgaacggcagcggcagcggcggcggcatgaaccacgaccaggagttcgacccccctaaggtgtaccctcccgtccccgccgagaagagaaagcccatccgggtcctgagcctgttcgatggcatcgccaccggtctgctggtgctgaaggacctgggcatccaggtggataggtacattgcctccgaggtgtgcgaggactccatcaccgtgggaatggtgcgtcatcagggcaagatcatgtacgtgggcgacgtgcggagcgtgacacagaagcatatccaggagtggggccctttcgacctggtgatcggcggcagcccttgcaatgacctgagcatcgtgaacccagcccggaagggcctgtacgagggaaccggcagactgttcttcgagttttacagactgctgcacgacgcccggcctaaggaaggcgacgaccggcccttcttttggctgttcgagaatgtggtggccatgggagtcagcgacaagcgggatattagccggttcctggagagcaaccccgtgatgatcgatgccaaggaagtgagcgccgcccaccgggccagatacttctggggcaatctgcctggcatgaacagacccctggccagcaccgtgaacgacaagctggagctgcaggagtgcctggagcacggccggatcgccaagttcagcaaggtgagaaccatcaccacccgaagcaacagcatcaaacaaggcaaggaccagcactttcctgtgttcatgaacgagaaggaggacatcctgtggtgtaccgagatggagagagtgttcgggttcccagtccactacacagatgtcagcaacatgtctagactggccagacagagactgctgggaagaagctggtccgtccctgtgatcagacacctgttcgcccctctgaaggagtacttcgcctgcgtgagcagcggcaacagcaacgccaacagccggggccccagcttctctagcggcctggtgccactgtccctgagagggagccacatgggccccatggagatctacaaaaccgtgagcgcctggaagcggcagcctgtgcgcgtgctgagcctgtttcggaatatcgataaagtcctgaaaagcctgggattcctggagagcggctctggctccggcggtggcaccctgaagtacgtggaggatgtgacaaacgtggtcagacgggatgtggagaagtggggccccttcgatctggtgtacggcagcacccaacccctgggcagctcttgtgaccggtgccctggctggtacatgtttcagttccaccggatcctgcagtacgccctgccgagacaggagtcccagcggccattcttttggattttcatggacaacttgctgctgaccgaggatgaccaggaaactaccactcggttcctgcagaccgaagccgtgaccctgcaggacgtgagaggccgggactaccagaacgccatgcgggtgtggtccaacatccctggactgaaaagcaagcacgcacctctgacccctaaagaagaggagtacctgcaggcccaggtgcggagcagaagcaagctggacgcccctaaggtggatctgctggtgaagaattgcctcctgcccctgagagagtacttcaagtatttcagccagaatagtctgcccctgggcggcccaagcagcggcgcccctcctcccagcggcggcagcccagccggctccccaacctctaccgaggagggcacctctgagtccgccacccccgagagcggccctggcacctccaccgagcccagcgagggcagcgcacccggcagccctgccggcagccccacctccacagaggagggaaccagcaccgagcccagcgaaggcagcgccccaggcaccagcaccgagcctagtgagggcggctctggcggcggcagcgcccaggagattaaacggatcaacaagatcagaagaagacttgtgaaagacagcaacaccaagaaggccggcaagacaggccccatgaaaaccctgctggttagagtgatgacacccgatctgagagagcggctggaaaacctgagaaagaagcctgaaaatatcccccagcccatcagcaatacatctagagccaacctgaataagctgctgaccgattacaccgaaatgaagaaggcgatcctgcatgtgtactgggaagagttccagaaggaccctgtgggcctgatgagccgggtggcccagcctgccagcaagaagatcgatcagaacaagctgaaacctgagatggacgagaagggcaacctgaccaccgccggctttgcctgctctcagtgtggccagcccctgttcgtgtacaagctggagcaggtgtctgagaagggcaaggcttacaccaactacttcggacggtgcaatgtggccgagcacgaaaagctgatcctgctggcccagctgaagcccgagaaggatagcgacgaagccgtgacatatagcctgggaaagtttgggcagagggccctggatttctacagcattcatgtgaccaaggagtccacccaccccgtgaagcccctggcccagatcgccggaaacagatacgcctccggacctgtgggaaaggccctgagcgacgcatgtatgggcacaatcgcctccttcctgtctaagtaccaggacatcatcatcgaacaccagaaggtggtgaagggcaaccagaagagactggagagcctgcgggagctggccggcaaggaaaacctggaataccctagcgtgaccctgccacctcagcctcacaccaaggagggcgttgatgcctacaacgaagtgatcgcccgggtgcgaatgtgggtgaacctgaacctgtggcagaagctgaagctaagcagagatgatgccaagcctctgctgagactgaagggattcccttcctttcctctggtcgagagacaggccaacgaagtggactggtgggacatggtgtgtaacgtgaagaagctgatcaacgagaaaaaggaggatggcaaggtgttttggcagaatctggctggctacaagagacaggaagccctgagaccatacctgagcagcgaggaagatcggaagaagggaaagaaattcgctcggtaccagctgggcgacctgctgctgcacctggaaaagaagcacggcgaggactggggaaaggtgtacgacgaggcctgggagcggattgacaagaaagtggaaggcctgagcaagcacatcaagctggaagaggaacggagaagcgaggacgcccagagcaaggccgccctgaccgactggctgcgggctaaggccagcttcgtgatcgagggcctgaaggaggccgacaaggacgagttctgcagatgcgagctgaagctgcagaagtggtacggggacctgcggggaaagcccttcgccatcgaagccgagaacagcatcctggacatcagcggcttcagcaagcagtacaactgtgccttcatctggcagaaggacggcgtgaagaagctgaacctgtacctgatcatcaactacttcaagggcggcaagctgcggttcaagaagatcaaacctgaagccttcgaagccaacagattctacaccgtgatcaacaaaaagagcggcgagatcgtgcccatggaggtgaacttcaacttcgacgaccccaacctgatcatcctgcctctggcctttggcaagagacagggcagagaattcatctggaacgacctgctgtccctggaaaccggcagcctgaagctggccaacggaagagtgatcgagaagacactgtacaacagaagaacccggcaggatgagcctgccctgttcgtggccctgaccttcgagcggcgggaggtcctggactcctccaatatcaaaccaatgaacctgatcggcgtggcaagaggcgaaaacatccccgccgtgatcgccctgaccgaccccgagggctgcccactgagccggtttaaggatagcctgggaaacccaacccacatcctgagaatcggcgagagctataaggagaagcagcggaccatccaggccaagaaggaggtggagcagcggagagccggcggctacagccggaagtacgccagcaaagccaagaatctggcagacgatatggtgagaaacaccgctagagatctgctgtactacgccgtgacccaggatgccatgctgatcttcgccaacctgagccggggcttcggccggcagggcaagcggaccttcatggccgagagacagtacacacggatggaggactggctgaccgccaagctggcctacgagggcctgagcaagacctacctgtccaagacactggcccagtacacctccaagacatgcagcaactgtgggtttaccatcaccagcgccgactacgacagggtgctggagaagctgaagaagacagcaacaggctggatgaccacaattaacggcaaggagctgaaggtggagggccagattacctactacaacagatacaagagacagaacgtagtcaaggacctgtccgtcgagctggatagactgagcgaagaatctgtgaacaacgacatctcctcctggacaaagggcagaagcggagaagctctgagcctcctgaagaaaagattctcccatagacccgtgcaggagaagttcgtgtgcctgaactgcggcttcgagacacacgcagccgagcaagccgccctgaacatcgccagatcctggctgttcctgcggagccaggagtacaagaaataccagacaaacaagacaaccggcaacaccgataagagagccttcgtcgagacctggcagtccttttaccggaagaagcttaaggaggtgtggaaacctgccgtgcggtctggcggatctggcggaggctccacaagcgtcgccttccgggacgtgatcgtggacttcacccaggaggaatggcagcagctgaagcctgctcaaaaggacctgtacagagatgtgatgatggaaatctactggaatctggtgtctctggacctggaaaccgagggagatatgaacgagcctgaccccgagaaagacagctgggaggatagaacaagcatcgtggttgtggaaggcctgatgcggaacggcgcccagggctacgcctgcgagaaggccggcatccagggctgtagagtgaccagccccaagaaaaagagaaaagtctaagctgccttctgcggggcttgccttctggccatgcccttcttctctcccttgcacctgtacctcttggtctttgaataaagcctgagtaggaaggctagcaaaaaaaaaaaaaaaaaaaaaaaaaaaaaaaaaaaaaaaaaaaaaaaaaaaaaaaaaaaaaaaaaaaaaaaaaaaaaaaa

SEQ ID NO: 2414 - RNA, 5428 nt, synthetic construct
  source 1..5428: mol_type = other RNA
aggaaataagagagaaaagaagagtaagaagaaatataagagccaccatggcccctaagaagaagcgtaaagtgagccgggtgaacggcagcggcagcggcggcggcatgaaccacgaccaggagttcgacccccctaaggtgtaccctcccgtccccgccgagaagagaaagcccatccgggtcctgagcctgttcgatggcatcgccaccggtctgctggtgctgaaggacctgggcatccaggtggataggtacattgcctccgaggtgtgcgaggactccatcaccgtgggaatggtgcgtcatcagggcaagatcatgtacgtgggcgacgtgcggagcgtgacacagaagcatatccaggagtggggccctttcgacctggtgatcggcggcagcccttgcaatgacctgagcatcgtgaacccagcccggaagggcctgtacgagggaaccggcagactgttcttcgagttttacagactgctgcacgacgcccggcctaaggaaggcgacgaccggcccttcttttggctgttcgagaatgtggtggccatgggagtcagcgacaagcgggatattagccggttcctggagagcaaccccgtgatgatcgatgccaaggaagtgagcgccgcccaccgggccagatacttctggggcaatctgcctggcatgaacagacccctggccagcaccgtgaacgacaagctggagctgcaggagtgcctggagcacggccggatcgccaagttcagcaaggtgagaaccatcaccacccgaagcaacagcatcaaacaaggcaaggaccagcactttcctgtgttcatgaacgagaaggaggacatcctgtggtgtaccgagatggagagagtgttcgggttcccagtccactacacagatgtcagcaacatgtctagactggccagacagagactgctgggaagaagctggtccgtccctgtgatcagacacctgttcgcccctctgaaggagtacttcgcctgcgtgagcagcggcaacagcaacgccaacagccggggccccagcttctctagcggcctggtgccactgtccctgagagggagccacatgggccccatggagatctacaaaaccgtgagcgcctggaagcggcagcctgtgcgcgtgctgagcctgtttcggaatatcgataaagtcctgaaaagcctgggattcctggagagcggctctggctccggcggtggcaccctgaagtacgtggaggatgtgacaaacgtggtcagacgggatgtggagaagtggggccccttcgatctggtgtacggcagcacccaacccctgggcagctcttgtgaccggtgccctggctggtacatgtttcagttccaccggatcctgcagtacgccctgccgagacaggagtcccagcggccattcttttggattttcatggacaacttgctgctgaccgaggatgaccaggaaactaccactcggttcctgcagaccgaagccgtgaccctgcaggacgtgagaggccgggactaccagaacgccatgcgggtgtggtccaacatccctggactgaaaagcaagcacgcacctctgacccctaaagaagaggagtacctgcaggcccaggtgcggagcagaagcaagctggacgcccctaaggtggatctgctggtgaagaattgcctcctgcccctgagagagtacttcaagtatttcagccagaatagtctgcccctgggcggcccaagcagcggcgcccctcctcccagcggcggcagcccagccggctccccaacctctaccgaggagggcacctctgagtccgccacccccgagagcggccctggcacctccaccgagcccagcgagggcagcgcacccggcagccctgccggcagccccacctccacagaggagggaaccagcaccgagcccagcgaaggcagcgccccaggcaccagcaccgagcctagtgagggcggctctggcggcggcagcgcccaggagattaaacggatcaacaagatcagaagaagacttgtgaaagacagcaacaccaagaaggccggcaagacaggccccatgaaaaccctgctggttagagtgatgacacccgatctgagagagcggctggaaaacctgagaaagaagcctgaaaatatcccccagcccatcagcaatacatctagagccaacctgaataagctgctgaccgattacaccgaaatgaagaaggcgatcctgcatgtgtactgggaagagttccagaaggaccctgtgggcctgatgagccgggtggcccagcctgccagcaagaagatcgatcagaacaagctgaaacctgagatggacgagaagggcaacctgaccaccgccggctttgcctgctctcagtgtggccagcccctgttcgtgtacaagctggagcaggtgtctgagaagggcaaggcttacaccaactacttcggacggtgcaatgtggccgagcacgaaaagctgatcctgctggcccagctgaagcccgagaaggatagcgacgaagccgtgacatatagcctgggaaagtttgggcagagggccctggatttctacagcattcatgtgaccaaggagtccacccaccccgtgaagcccctggcccagatcgccggaaacagatacgcctccggacctgtgggaaaggccctgagcgacgcatgtatgggcacaatcgcctccttcctgtctaagtaccaggacatcatcatcgaacaccagaaggtggtgaagggcaaccagaagagactggagagcctgcgggagctggccggcaaggaaaacctggaataccctagcgtgaccctgccacctcagcctcacaccaaggagggcgttgatgcctacaacgaagtgatcgcccgggtgcgaatgtgggtgaacctgaacctgtggcagaagctgaagctaagcagagatgatgccaagcctctgctgagactgaagggattcccttcctttcctctggtcgagagacaggccaacgaagtggactggtgggacatggtgtgtaacgtgaagaagctgatcaacgagaaaaaggaggatggcaaggtgttttggcagaatctggctggctacaagagacaggaagccctgagaccatacctgagcagcgaggaagatcggaagaagggaaagaaattcgctcggtaccagctgggcgacctgctgctgcacctggaaaagaagcacggcgaggactggggaaaggtgtacgacgaggcctgggagcggattgacaagaaagtggaaggcctgagcaagcacatcaagctggaagaggaacggagaagcgaggacgcccagagcaaggccgccctgaccgactggctgcgggctaaggccagcttcgtgatcgagggcctgaaggaggccgacaaggacgagttctgcagatgcgagctgaagctgcagaagtggtacggggacctgcggggaaagcccttcgccatcgaagccgagaacagcatcctggacatcagcggcttcagcaagcagtacaactgtgccttcatctggcagaaggacggcgtgaagaagctgaacctgtacctgatcatcaactacttcaagggcggcaagctgcggttcaagaagatcaaacctgaagccttcgaagccaacagattctacaccgtgatcaacaaaaagagcggcgagatcgtgcccatggaggtgaacttcaacttcgacgaccccaacctgatcatcctgcctctggcctttggcaagagacagggcagagaattcatctggaacgacctgctgtccctggaaaccggcagcctgaagctggccaacggaagagtgatcgagaagacactgtacaacagaagaacccggcaggatgagcctgccctgttcgtggccctgaccttcgagcggcgggaggtcctggactcctccaatatcaaaccaatgaacctgatcggcgtggcaagaggcgaaaacatccccgccgtgatcgccctgaccgaccccgagggctgcccactgagccggtttaaggatagcctgggaaacccaacccacatcctgagaatcggcgagagctataaggagaagcagcggaccatccaggccaagaaggaggtggagcagcggagagccggcggctacagccggaagtacgccagcaaagccaagaatctggcagacgatatggtgagaaacaccgctagagatctgctgtactacgccgtgacccaggatgccatgctgatcttcgccaacctgagccggggcttcggccggcagggcaagcggaccttcatggccgagagacagtacacacggatggaggactggctgaccgccaagctggcctacgagggcctgagcaagacctacctgtccaagacactggcccagtacacctccaagacatgcagcaactgtgggtttaccatcaccagcgccgactacgacagggtgctggagaagctgaagaagacagcaacaggctggatgaccacaattaacggcaaggagctgaaggtggagggccagattacctactacaacagatacaagagacagaacgtagtcaaggacctgtccgtcgagctggatagactgagcgaagaatctgtgaacaacgacatctcctcctggacaaagggcagaagcggagaagctctgagcctcctgaagaaaagattctcccatagacccgtgcaggagaagttcgtgtgcctgaactgcggcttcgagacacacgcagccgagcaagccgccctgaacatcgccagatcctggctgttcctgcggagccaggagtacaagaaataccagacaaacaagacaaccggcaacaccgataagagagccttcgtcgagacctggcagtccttttaccggaagaagcttaaggaggtgtggaaacctgccgtgcggtctggcggatctggcggaggctccacaagcgtgacctacaacgacgtgcacgtggacatcacccaggaggaatgggctctgatggaccccagccagcggaacctgtacaaggatgtgatggtcgagacatacatgaacctgaccgccatcggatataattgggagaacctggaagtggaagaaccatgtcagaaccccctgaagcacggcagacacgagagacctcatacaggcgagaaaccttacgagtacaatcagtgcggcaaggccttcgcccaacctaccagccccaagaaaaagagaaaagtctaagctgccttctgcggggcttgccttctggccatgcccttcttctctcccttgcacctgtacctcttggtctttgaataaagcctgagtaggaaggctagcaaaaaaaaaaaaaaaaaaaaaaaaaaaaaaaaaaaaaaaaaaaaaaaaaaaaaaaaaaaaaaaaaaaaaaaaaaaaaaaa

SEQ ID NO: 2415 - RNA, 5419 nt, synthetic construct
  source 1..5419: mol_type = other RNA
aggaaataagagagaaaagaagagtaagaagaaatataagagccaccatggcccctaagaagaagcgtaaagtgagccgggtgaacggcagcggcagcggcggcggcatgaaccacgaccaggagttcgacccccctaaggtgtaccctcccgtccccgccgagaagagaaagcccatccgggtcctgagcctgttcgatggcatcgccaccggtctgctggtgctgaaggacctgggcatccaggtggataggtacattgcctccgaggtgtgcgaggactccatcaccgtgggaatggtgcgtcatcagggcaagatcatgtacgtgggcgacgtgcggagcgtgacacagaagcatatccaggagtggggccctttcgacctggtgatcggcggcagcccttgcaatgacctgagcatcgtgaacccagcccggaagggcctgtacgagggaaccggcagactgttcttcgagttttacagactgctgcacgacgcccggcctaaggaaggcgacgaccggcccttcttttggctgttcgagaatgtggtggccatgggagtcagcgacaagcgggatattagccggttcctggagagcaaccccgtgatgatcgatgccaaggaagtgagcgccgcccaccgggccagatacttctggggcaatctgcctggcatgaacagacccctggccagcaccgtgaacgacaagctggagctgcaggagtgcctggagcacggccggatcgccaagttcagcaaggtgagaaccatcaccacccgaagcaacagcatcaaacaaggcaaggaccagcactttcctgtgttcatgaacgagaaggaggacatcctgtggtgtaccgagatggagagagtgttcgggttcccagtccactacacagatgtcagcaacatgtctagactggccagacagagactgctgggaagaagctggtccgtccctgtgatcagacacctgttcgcccctctgaaggagtacttcgcctgcgtgagcagcggcaacagcaacgccaacagccggggccccagcttctctagcggcctggtgccactgtccctgagagggagccacatgggccccatggagatctacaaaaccgtgagcgcctggaagcggcagcctgtgcgcgtgctgagcctgtttcggaatatcgataaagtcctgaaaagcctgggattcctggagagcggctctggctccggcggtggcaccctgaagtacgtggaggatgtgacaaacgtggtcagacgggatgtggagaagtggggccccttcgatctggtgtacggcagcacccaacccctgggcagctcttgtgaccggtgccctggctggtacatgtttcagttccaccggatcctgcagtacgccctgccgagacaggagtcccagcggccattcttttggattttcatggacaacttgctgctgaccgaggatgaccaggaaactaccactcggttcctgcagaccgaagccgtgaccctgcaggacgtgagaggccgggactaccagaacgccatgcgggtgtggtccaacatccctggactgaaaagcaagcacgcacctctgacccctaaagaagaggagtacctgcaggcccaggtgcggagcagaagcaagctggacgcccctaaggtggatctgctggtgaagaattgcctcctgcccctgagagagtacttcaagtatttcagccagaatagtctgcccctgggcggcccaagcagcggcgcccctcctcccagcggcggcagcccagccggctccccaacctctaccgaggagggcacctctgagtccgccacccccgagagcggccctggcacctccaccgagcccagcgagggcagcgcacccggcagccctgccggcagccccacctccacagaggagggaaccagcaccgagcccagcgaaggcagcgccccaggcaccagcaccgagcctagtgagggcggctctggcggcggcagcgcccaggagattaaacggatcaacaagatcagaagaagacttgtgaaagacagcaacaccaagaaggccggcaagacaggccccatgaaaaccctgctggttagagtgatgacacccgatctgagagagcggctggaaaacctgagaaagaagcctgaaaatatcccccagcccatcagcaatacatctagagccaacctgaataagctgctgaccgattacaccgaaatgaagaaggcgatcctgcatgtgtactgggaagagttccagaaggaccctgtgggcctgatgagccgggtggcccagcctgccagcaagaagatcgatcagaacaagctgaaacctgagatggacgagaagggcaacctgaccaccgccggctttgcctgctctcagtgtggccagcccctgttcgtgtacaagctggagcaggtgtctgagaagggcaaggcttacaccaactacttcggacggtgcaatgtggccgagcacgaaaagctgatcctgctggcccagctgaagcccgagaaggatagcgacgaagccgtgacatatagcctgggaaagtttgggcagagggccctggatttctacagcattcatgtgaccaaggagtccacccaccccgtgaagcccctggcccagatcgccggaaacagatacgcctccggacctgtgggaaaggccctgagcgacgcatgtatgggcacaatcgcctccttcctgtctaagtaccaggacatcatcatcgaacaccagaaggtggtgaagggcaaccagaagagactggagagcctgcgggagctggccggcaaggaaaacctggaataccctagcgtgaccctgccacctcagcctcacaccaaggagggcgttgatgcctacaacgaagtgatcgcccgggtgcgaatgtgggtgaacctgaacctgtggcagaagctgaagctaagcagagatgatgccaagcctctgctgagactgaagggattcccttcctttcctctggtcgagagacaggccaacgaagtggactggtgggacatggtgtgtaacgtgaagaagctgatcaacgagaaaaaggaggatggcaaggtgttttggcagaatctggctggctacaagagacaggaagccctgagaccatacctgagcagcgaggaagatcggaagaagggaaagaaattcgctcggtaccagctgggcgacctgctgctgcacctggaaaagaagcacggcgaggactggggaaaggtgtacgacgaggcctgggagcggattgacaagaaagtggaaggcctgagcaagcacatcaagctggaagaggaacggagaagcgaggacgcccagagcaaggccgccctgaccgactggctgcgggctaaggccagcttcgtgatcgagggcctgaaggaggccgacaaggacgagttctgcagatgcgagctgaagctgcagaagtggtacggggacctgcggggaaagcccttcgccatcgaagccgagaacagcatcctggacatcagcggcttcagcaagcagtacaactgtgccttcatctggcagaaggacggcgtgaagaagctgaacctgtacctgatcatcaactacttcaagggcggcaagctgcggttcaagaagatcaaacctgaagccttcgaagccaacagattctacaccgtgatcaacaaaaagagcggcgagatcgtgcccatggaggtgaacttcaacttcgacgaccccaacctgatcatcctgcctctggcctttggcaagagacagggcagagaattcatctggaacgacctgctgtccctggaaaccggcagcctgaagctggccaacggaagagtgatcgagaagacactgtacaacagaagaacccggcaggatgagcctgccctgttcgtggccctgaccttcgagcggcgggaggtcctggactcctccaatatcaaaccaatgaacctgatcggcgtggcaagaggcgaaaacatccccgccgtgatcgccctgaccgaccccgagggctgcccactgagccggtttaaggatagcctgggaaacccaacccacatcctgagaatcggcgagagctataaggagaagcagcggaccatccaggccaagaaggaggtggagcagcggagagccggcggctacagccggaagtacgccagcaaagccaagaatctggcagacgatatggtgagaaacaccgctagagatctgctgtactacgccgtgacccaggatgccatgctgatcttcgccaacctgagccggggcttcggccggcagggcaagcggaccttcatggccgagagacagtacacacggatggaggactggctgaccgccaagctggcctacgagggcctgagcaagacctacctgtccaagacactggcccagtacacctccaagacatgcagcaactgtgggtttaccatcaccagcgccgactacgacagggtgctggagaagctgaagaagacagcaacaggctggatgaccacaattaacggcaaggagctgaaggtggagggccagattacctactacaacagatacaagagacagaacgtagtcaaggacctgtccgtcgagctggatagactgagcgaagaatctgtgaacaacgacatctcctcctggacaaagggcagaagcggagaagctctgagcctcctgaagaaaagattctcccatagacccgtgcaggagaagttcgtgtgcctgaactgcggcttcgagacacacgcagccgagcaagccgccctgaacatcgccagatcctggctgttcctgcggagccaggagtacaagaaataccagacaaacaagacaaccggcaacaccgataagagagccttcgtcgagacctggcagtccttttaccggaagaagcttaaggaggtgtggaaacctgccgtgcggtctggcggatctggcggaggctccacaagctctcaggagagcgtggccttcgaggacgtggccgtctacttcaccaccaaagagtgggccatcatggtgcccgccgagagagccctgtacagagatgtgatgctggaaaactacgaggccgtggcttttgtggccgtgcctcctacaagcaagcccgctctggtgtcccacctggaacagggcaaggaaagctgcttcatccggcctccaggcgtgctgagcagaagcgactggcgggccggaaccagccccaagaaaaagagaaaagtctaagctgccttctgcggggcttgccttctggccatgcccttcttctctcccttgcacctgtacctcttggtctttgaataaagcctgagtaggaaggctagcaaaaaaaaaaaaaaaaaaaaaaaaaaaaaaaaaaaaaaaaaaaaaaaaaaaaaaaaaaaaaaaaaaaaaaaaaaaaaaaa

SEQ ID NO: 2416 - RNA, 5419 nt, synthetic construct
  source 1..5419: mol_type = other RNA
aggaaataagagagaaaagaagagtaagaagaaatataagagccaccatggcccctaagaagaagcgtaaagtgagccgggtgaacggcagcggcagcggcggcggcatgaaccacgaccaggagttcgacccccctaaggtgtaccctcccgtccccgccgagaagagaaagcccatccgggtcctgagcctgttcgatggcatcgccaccggtctgctggtgctgaaggacctgggcatccaggtggataggtacattgcctccgaggtgtgcgaggactccatcaccgtgggaatggtgcgtcatcagggcaagatcatgtacgtgggcgacgtgcggagcgtgacacagaagcatatccaggagtggggccctttcgacctggtgatcggcggcagcccttgcaatgacctgagcatcgtgaacccagcccggaagggcctgtacgagggaaccggcagactgttcttcgagttttacagactgctgcacgacgcccggcctaaggaaggcgacgaccggcccttcttttggctgttcgagaatgtggtggccatgggagtcagcgacaagcgggatattagccggttcctggagagcaaccccgtgatgatcgatgccaaggaagtgagcgccgcccaccgggccagatacttctggggcaatctgcctggcatgaacagacccctggccagcaccgtgaacgacaagctggagctgcaggagtgcctggagcacggccggatcgccaagttcagcaaggtgagaaccatcaccacccgaagcaacagcatcaaacaaggcaaggaccagcactttcctgtgttcatgaacgagaaggaggacatcctgtggtgtaccgagatggagagagtgttcgggttcccagtccactacacagatgtcagcaacatgtctagactggccagacagagactgctgggaagaagctggtccgtccctgtgatcagacacctgttcgcccctctgaaggagtacttcgcctgcgtgagcagcggcaacagcaacgccaacagccggggccccagcttctctagcggcctggtgccactgtccctgagagggagccacatgggccccatggagatctacaaaaccgtgagcgcctggaagcggcagcctgtgcgcgtgctgagcctgtttcggaatatcgataaagtcctgaaaagcctgggattcctggagagcggctctggctccggcggtggcaccctgaagtacgtggaggatgtgacaaacgtggtcagacgggatgtggagaagtggggccccttcgatctggtgtacggcagcacccaacccctgggcagctcttgtgaccggtgccctggctggtacatgtttcagttccaccggatcctgcagtacgccctgccgagacaggagtcccagcggccattcttttggattttcatggacaacttgctgctgaccgaggatgaccaggaaactaccactcggttcctgcagaccgaagccgtgaccctgcaggacgtgagaggccgggactaccagaacgccatgcgggtgtggtccaacatccctggactgaaaagcaagcacgcacctctgacccctaaagaagaggagtacctgcaggcccaggtgcggagcagaagcaagctggacgcccctaaggtggatctgctggtgaagaattgcctcctgcccctgagagagtacttcaagtatttcagccagaatagtctgcccctgggcggcccaagcagcggcgcccctcctcccagcggcggcagcccagccggctccccaacctctaccgaggagggcacctctgagtccgccacccccgagagcggccctggcacctccaccgagcccagcgagggcagcgcacccggcagccctgccggcagccccacctccacagaggagggaaccagcaccgagcccagcgaaggcagcgccccaggcaccagcaccgagcctagtgagggcggctctggcggcggcagcgcccaggagattaaacggatcaacaagatcagaagaagacttgtgaaagacagcaacaccaagaaggccggcaagacaggccccatgaaaaccctgctggttagagtgatgacacccgatctgagagagcggctggaaaacctgagaaagaagcctgaaaatatcccccagcccatcagcaatacatctagagccaacctgaataagctgctgaccgattacaccgaaatgaagaaggcgatcctgcatgtgtactgggaagagttccagaaggaccctgtgggcctgatgagccgggtggcccagcctgccagcaagaagatcgatcagaacaagctgaaacctgagatggacgagaagggcaacctgaccaccgccggctttgcctgctctcagtgtggccagcccctgttcgtgtacaagctggagcaggtgtctgagaagggcaaggcttacaccaactacttcggacggtgcaatgtggccgagcacgaaaagctgatcctgctggcccagctgaagcccgagaaggatagcgacgaagccgtgacatatagcctgggaaagtttgggcagagggccctggatttctacagcattcatgtgaccaaggagtccacccaccccgtgaagcccctggcccagatcgccggaaacagatacgcctccggacctgtgggaaaggccctgagcgacgcatgtatgggcacaatcgcctccttcctgtctaagtaccaggacatcatcatcgaacaccagaaggtggtgaagggcaaccagaagagactggagagcctgcgggagctggccggcaaggaaaacctggaataccctagcgtgaccctgccacctcagcctcacaccaaggagggcgttgatgcctacaacgaagtgatcgcccgggtgcgaatgtgggtgaacctgaacctgtggcagaagctgaagctaagcagagatgatgccaagcctctgctgagactgaagggattcccttcctttcctctggtcgagagacaggccaacgaagtggactggtgggacatggtgtgtaacgtgaagaagctgatcaacgagaaaaaggaggatggcaaggtgttttggcagaatctggctggctacaagagacaggaagccctgagaccatacctgagcagcgaggaagatcggaagaagggaaagaaattcgctcggtaccagctgggcgacctgctgctgcacctggaaaagaagcacggcgaggactggggaaaggtgtacgacgaggcctgggagcggattgacaagaaagtggaaggcctgagcaagcacatcaagctggaagaggaacggagaagcgaggacgcccagagcaaggccgccctgaccgactggctgcgggctaaggccagcttcgtgatcgagggcctgaaggaggccgacaaggacgagttctgcagatgcgagctgaagctgcagaagtggtacggggacctgcggggaaagcccttcgccatcgaagccgagaacagcatcctggacatcagcggcttcagcaagcagtacaactgtgccttcatctggcagaaggacggcgtgaagaagctgaacctgtacctgatcatcaactacttcaagggcggcaagctgcggttcaagaagatcaaacctgaagccttcgaagccaacagattctacaccgtgatcaacaaaaagagcggcgagatcgtgcccatggaggtgaacttcaacttcgacgaccccaacctgatcatcctgcctctggcctttggcaagagacagggcagagaattcatctggaacgacctgctgtccctggaaaccggcagcctgaagctggccaacggaagagtgatcgagaagacactgtacaacagaagaacccggcaggatgagcctgccctgttcgtggccctgaccttcgagcggcgggaggtcctggactcctccaatatcaaaccaatgaacctgatcggcgtggcaagaggcgaaaacatccccgccgtgatcgccctgaccgaccccgagggctgcccactgagccggtttaaggatagcctgggaaacccaacccacatcctgagaatcggcgagagctataaggagaagcagcggaccatccaggccaagaaggaggtggagcagcggagagccggcggctacagccggaagtacgccagcaaagccaagaatctggcagacgatatggtgagaaacaccgctagagatctgctgtactacgccgtgacccaggatgccatgctgatcttcgccaacctgagccggggcttcggccggcagggcaagcggaccttcatggccgagagacagtacacacggatggaggactggctgaccgccaagctggcctacgagggcctgagcaagacctacctgtccaagacactggcccagtacacctccaagacatgcagcaactgtgggtttaccatcaccagcgccgactacgacagggtgctggagaagctgaagaagacagcaacaggctggatgaccacaattaacggcaaggagctgaaggtggagggccagattacctactacaacagatacaagagacagaacgtagtcaaggacctgtccgtcgagctggatagactgagcgaagaatctgtgaacaacgacatctcctcctggacaaagggcagaagcggagaagctctgagcctcctgaagaaaagattctcccatagacccgtgcaggagaagttcgtgtgcctgaactgcggcttcgagacacacgcagccgagcaagccgccctgaacatcgccagatcctggctgttcctgcggagccaggagtacaagaaataccagacaaacaagacaaccggcaacaccgataagagagccttcgtcgagacctggcagtccttttaccggaagaagcttaaggaggtgtggaaacctgccgtgcggtctggcggatctggcggaggctccacaagctctaaagcccctatcacattcggcgacctggccatctacttcagccaggaggaatgggagtggctgagccccatccagaaggacctgtacgaggacgtgatgctggaaaactacagaaatctggtgtccctgggcctcagctttagacgccccaacgtgatcaccctgctggaaaagggcaaggccccatggatggtcgagcctgctagacggcggagaggacctgatagcggcagcaaggtgaccagccccaagaaaaagagaaaagtctaagctgccttctgcggggcttgccttctggccatgcccttcttctctcccttgcacctgtacctcttggtctttgaataaagcctgagtaggaaggctagcaaaaaaaaaaaaaaaaaaaaaaaaaaaaaaaaaaaaaaaaaaaaaaaaaaaaaaaaaaaaaaaaaaaaaaaaaaaaaaaa

SEQ ID NO: 2417 - RNA, 5419 nt, synthetic construct
  source 1..5419: mol_type = other RNA
aggaaataagagagaaaagaagagtaagaagaaatataagagccaccatggcccctaagaagaagcgtaaagtgagccgggtgaacggcagcggcagcggcggcggcatgaaccacgaccaggagttcgacccccctaaggtgtaccctcccgtccccgccgagaagagaaagcccatccgggtcctgagcctgttcgatggcatcgccaccggtctgctggtgctgaaggacctgggcatccaggtggataggtacattgcctccgaggtgtgcgaggactccatcaccgtgggaatggtgcgtcatcagggcaagatcatgtacgtgggcgacgtgcggagcgtgacacagaagcatatccaggagtggggccctttcgacctggtgatcggcggcagcccttgcaatgacctgagcatcgtgaacccagcccggaagggcctgtacgagggaaccggcagactgttcttcgagttttacagactgctgcacgacgcccggcctaaggaaggcgacgaccggcccttcttttggctgttcgagaatgtggtggccatgggagtcagcgacaagcgggatattagccggttcctggagagcaaccccgtgatgatcgatgccaaggaagtgagcgccgcccaccgggccagatacttctggggcaatctgcctggcatgaacagacccctggccagcaccgtgaacgacaagctggagctgcaggagtgcctggagcacggccggatcgccaagttcagcaaggtgagaaccatcaccacccgaagcaacagcatcaaacaaggcaaggaccagcactttcctgtgttcatgaacgagaaggaggacatcctgtggtgtaccgagatggagagagtgttcgggttcccagtccactacacagatgtcagcaacatgtctagactggccagacagagactgctgggaagaagctggtccgtccctgtgatcagacacctgttcgcccctctgaaggagtacttcgcctgcgtgagcagcggcaacagcaacgccaacagccggggccccagcttctctagcggcctggtgccactgtccctgagagggagccacatgggccccatggagatctacaaaaccgtgagcgcctggaagcggcagcctgtgcgcgtgctgagcctgtttcggaatatcgataaagtcctgaaaagcctgggattcctggagagcggctctggctccggcggtggcaccctgaagtacgtggaggatgtgacaaacgtggtcagacgggatgtggagaagtggggccccttcgatctggtgtacggcagcacccaacccctgggcagctcttgtgaccggtgccctggctggtacatgtttcagttccaccggatcctgcagtacgccctgccgagacaggagtcccagcggccattcttttggattttcatggacaacttgctgctgaccgaggatgaccaggaaactaccactcggttcctgcagaccgaagccgtgaccctgcaggacgtgagaggccgggactaccagaacgccatgcgggtgtggtccaacatccctggactgaaaagcaagcacgcacctctgacccctaaagaagaggagtacctgcaggcccaggtgcggagcagaagcaagctggacgcccctaaggtggatctgctggtgaagaattgcctcctgcccctgagagagtacttcaagtatttcagccagaatagtctgcccctgggcggcccaagcagcggcgcccctcctcccagcggcggcagcccagccggctccccaacctctaccgaggagggcacctctgagtccgccacccccgagagcggccctggcacctccaccgagcccagcgagggcagcgcacccggcagccctgccggcagccccacctccacagaggagggaaccagcaccgagcccagcgaaggcagcgccccaggcaccagcaccgagcctagtgagggcggctctggcggcggcagcgcccaggagattaaacggatcaacaagatcagaagaagacttgtgaaagacagcaacaccaagaaggccggcaagacaggccccatgaaaaccctgctggttagagtgatgacacccgatctgagagagcggctggaaaacctgagaaagaagcctgaaaatatcccccagcccatcagcaatacatctagagccaacctgaataagctgctgaccgattacaccgaaatgaagaaggcgatcctgcatgtgtactgggaagagttccagaaggaccctgtgggcctgatgagccgggtggcccagcctgccagcaagaagatcgatcagaacaagctgaaacctgagatggacgagaagggcaacctgaccaccgccggctttgcctgctctcagtgtggccagcccctgttcgtgtacaagctggagcaggtgtctgagaagggcaaggcttacaccaactacttcggacggtgcaatgtggccgagcacgaaaagctgatcctgctggcccagctgaagcccgagaaggatagcgacgaagccgtgacatatagcctgggaaagtttgggcagagggccctggatttctacagcattcatgtgaccaaggagtccacccaccccgtgaagcccctggcccagatcgccggaaacagatacgcctccggacctgtgggaaaggccctgagcgacgcatgtatgggcacaatcgcctccttcctgtctaagtaccaggacatcatcatcgaacaccagaaggtggtgaagggcaaccagaagagactggagagcctgcgggagctggccggcaaggaaaacctggaataccctagcgtgaccctgccacctcagcctcacaccaaggagggcgttgatgcctacaacgaagtgatcgcccgggtgcgaatgtgggtgaacctgaacctgtggcagaagctgaagctaagcagagatgatgccaagcctctgctgagactgaagggattcccttcctttcctctggtcgagagacaggccaacgaagtggactggtgggacatggtgtgtaacgtgaagaagctgatcaacgagaaaaaggaggatggcaaggtgttttggcagaatctggctggctacaagagacaggaagccctgagaccatacctgagcagcgaggaagatcggaagaagggaaagaaattcgctcggtaccagctgggcgacctgctgctgcacctggaaaagaagcacggcgaggactggggaaaggtgtacgacgaggcctgggagcggattgacaagaaagtggaaggcctgagcaagcacatcaagctggaagaggaacggagaagcgaggacgcccagagcaaggccgccctgaccgactggctgcgggctaaggccagcttcgtgatcgagggcctgaaggaggccgacaaggacgagttctgcagatgcgagctgaagctgcagaagtggtacggggacctgcggggaaagcccttcgccatcgaagccgagaacagcatcctggacatcagcggcttcagcaagcagtacaactgtgccttcatctggcagaaggacggcgtgaagaagctgaacctgtacctgatcatcaactacttcaagggcggcaagctgcggttcaagaagatcaaacctgaagccttcgaagccaacagattctacaccgtgatcaacaaaaagagcggcgagatcgtgcccatggaggtgaacttcaacttcgacgaccccaacctgatcatcctgcctctggcctttggcaagagacagggcagagaattcatctggaacgacctgctgtccctggaaaccggcagcctgaagctggccaacggaagagtgatcgagaagacactgtacaacagaagaacccggcaggatgagcctgccctgttcgtggccctgaccttcgagcggcgggaggtcctggactcctccaatatcaaaccaatgaacctgatcggcgtggcaagaggcgaaaacatccccgccgtgatcgccctgaccgaccccgagggctgcccactgagccggtttaaggatagcctgggaaacccaacccacatcctgagaatcggcgagagctataaggagaagcagcggaccatccaggccaagaaggaggtggagcagcggagagccggcggctacagccggaagtacgccagcaaagccaagaatctggcagacgatatggtgagaaacaccgctagagatctgctgtactacgccgtgacccaggatgccatgctgatcttcgccaacctgagccggggcttcggccggcagggcaagcggaccttcatggccgagagacagtacacacggatggaggactggctgaccgccaagctggcctacgagggcctgagcaagacctacctgtccaagacactggcccagtacacctccaagacatgcagcaactgtgggtttaccatcaccagcgccgactacgacagggtgctggagaagctgaagaagacagcaacaggctggatgaccacaattaacggcaaggagctgaaggtggagggccagattacctactacaacagatacaagagacagaacgtagtcaaggacctgtccgtcgagctggatagactgagcgaagaatctgtgaacaacgacatctcctcctggacaaagggcagaagcggagaagctctgagcctcctgaagaaaagattctcccatagacccgtgcaggagaagttcgtgtgcctgaactgcggcttcgagacacacgcagccgagcaagccgccctgaacatcgccagatcctggctgttcctgcggagccaggagtacaagaaataccagacaaacaagacaaccggcaacaccgataagagagccttcgtcgagacctggcagtccttttaccggaagaagcttaaggaggtgtggaaacctgccgtgcggtctggcggatctggcggaggctccacaagcgagatgggcctgctgacattcagagacatcgctatcgagttcagcctggaggaatggcaatgtctggactgcgcccagagaaatctgtacagagatgtgatgctggaaaactaccggaacctggtgtctctgggcatcgccgtgtccaagcccgacctgatcacctgcctcgagcagaacaaggaaagccagaacatcaagcggaacaaaatggtcgccaagcaccctgtgatgcacagccacaccagccccaagaaaaagagaaaagtctaagctgccttctgcggggcttgccttctggccatgcccttcttctctcccttgcacctgtacctcttggtctttgaataaagcctgagtaggaaggctagcaaaaaaaaaaaaaaaaaaaaaaaaaaaaaaaaaaaaaaaaaaaaaaaaaaaaaaaaaaaaaaaaaaaaaaaaaaaaaaaa

SEQ ID NO: 2418 - RNA, 5419 nt, synthetic construct
  source 1..5419: mol_type = other RNA
aggaaataagagagaaaagaagagtaagaagaaatataagagccaccatggcccctaagaagaagcgtaaagtgagccgggtgaacggcagcggcagcggcggcggcatgaaccacgaccaggagttcgacccccctaaggtgtaccctcccgtccccgccgagaagagaaagcccatccgggtcctgagcctgttcgatggcatcgccaccggtctgctggtgctgaaggacctgggcatccaggtggataggtacattgcctccgaggtgtgcgaggactccatcaccgtgggaatggtgcgtcatcagggcaagatcatgtacgtgggcgacgtgcggagcgtgacacagaagcatatccaggagtggggccctttcgacctggtgatcggcggcagcccttgcaatgacctgagcatcgtgaacccagcccggaagggcctgtacgagggaaccggcagactgttcttcgagttttacagactgctgcacgacgcccggcctaaggaaggcgacgaccggcccttcttttggctgttcgagaatgtggtggccatgggagtcagcgacaagcgggatattagccggttcctggagagcaaccccgtgatgatcgatgccaaggaagtgagcgccgcccaccgggccagatacttctggggcaatctgcctggcatgaacagacccctggccagcaccgtgaacgacaagctggagctgcaggagtgcctggagcacggccggatcgccaagttcagcaaggtgagaaccatcaccacccgaagcaacagcatcaaacaaggcaaggaccagcactttcctgtgttcatgaacgagaaggaggacatcctgtggtgtaccgagatggagagagtgttcgggttcccagtccactacacagatgtcagcaacatgtctagactggccagacagagactgctgggaagaagctggtccgtccctgtgatcagacacctgttcgcccctctgaaggagtacttcgcctgcgtgagcagcggcaacagcaacgccaacagccggggccccagcttctctagcggcctggtgccactgtccctgagagggagccacatgggccccatggagatctacaaaaccgtgagcgcctggaagcggcagcctgtgcgcgtgctgagcctgtttcggaatatcgataaagtcctgaaaagcctgggattcctggagagcggctctggctccggcggtggcaccctgaagtacgtggaggatgtgacaaacgtggtcagacgggatgtggagaagtggggccccttcgatctggtgtacggcagcacccaacccctgggcagctcttgtgaccggtgccctggctggtacatgtttcagttccaccggatcctgcagtacgccctgccgagacaggagtcccagcggccattcttttggattttcatggacaacttgctgctgaccgaggatgaccaggaaactaccactcggttcctgcagaccgaagccgtgaccctgcaggacgtgagaggccgggactaccagaacgccatgcgggtgtggtccaacatccctggactgaaaagcaagcacgcacctctgacccctaaagaagaggagtacctgcaggcccaggtgcggagcagaagcaagctggacgcccctaaggtggatctgctggtgaagaattgcctcctgcccctgagagagtacttcaagtatttcagccagaatagtctgcccctgggcggcccaagcagcggcgcccctcctcccagcggcggcagcccagccggctccccaacctctaccgaggagggcacctctgagtccgccacccccgagagcggccctggcacctccaccgagcccagcgagggcagcgcacccggcagccctgccggcagccccacctccacagaggagggaaccagcaccgagcccagcgaaggcagcgccccaggcaccagcaccgagcctagtgagggcggctctggcggcggcagcgcccaggagattaaacggatcaacaagatcagaagaagacttgtgaaagacagcaacaccaagaaggccggcaagacaggccccatgaaaaccctgctggttagagtgatgacacccgatctgagagagcggctggaaaacctgagaaagaagcctgaaaatatcccccagcccatcagcaatacatctagagccaacctgaataagctgctgaccgattacaccgaaatgaagaaggcgatcctgcatgtgtactgggaagagttccagaaggaccctgtgggcctgatgagccgggtggcccagcctgccagcaagaagatcgatcagaacaagctgaaacctgagatggacgagaagggcaacctgaccaccgccggctttgcctgctctcagtgtggccagcccctgttcgtgtacaagctggagcaggtgtctgagaagggcaaggcttacaccaactacttcggacggtgcaatgtggccgagcacgaaaagctgatcctgctggcccagctgaagcccgagaaggatagcgacgaagccgtgacatatagcctgggaaagtttgggcagagggccctggatttctacagcattcatgtgaccaaggagtccacccaccccgtgaagcccctggcccagatcgccggaaacagatacgcctccggacctgtgggaaaggccctgagcgacgcatgtatgggcacaatcgcctccttcctgtctaagtaccaggacatcatcatcgaacaccagaaggtggtgaagggcaaccagaagagactggagagcctgcgggagctggccggcaaggaaaacctggaataccctagcgtgaccctgccacctcagcctcacaccaaggagggcgttgatgcctacaacgaagtgatcgcccgggtgcgaatgtgggtgaacctgaacctgtggcagaagctgaagctaagcagagatgatgccaagcctctgctgagactgaagggattcccttcctttcctctggtcgagagacaggccaacgaagtggactggtgggacatggtgtgtaacgtgaagaagctgatcaacgagaaaaaggaggatggcaaggtgttttggcagaatctggctggctacaagagacaggaagccctgagaccatacctgagcagcgaggaagatcggaagaagggaaagaaattcgctcggtaccagctgggcgacctgctgctgcacctggaaaagaagcacggcgaggactggggaaaggtgtacgacgaggcctgggagcggattgacaagaaagtggaaggcctgagcaagcacatcaagctggaagaggaacggagaagcgaggacgcccagagcaaggccgccctgaccgactggctgcgggctaaggccagcttcgtgatcgagggcctgaaggaggccgacaaggacgagttctgcagatgcgagctgaagctgcagaagtggtacggggacctgcggggaaagcccttcgccatcgaagccgagaacagcatcctggacatcagcggcttcagcaagcagtacaactgtgccttcatctggcagaaggacggcgtgaagaagctgaacctgtacctgatcatcaactacttcaagggcggcaagctgcggttcaagaagatcaaacctgaagccttcgaagccaacagattctacaccgtgatcaacaaaaagagcggcgagatcgtgcccatggaggtgaacttcaacttcgacgaccccaacctgatcatcctgcctctggcctttggcaagagacagggcagagaattcatctggaacgacctgctgtccctggaaaccggcagcctgaagctggccaacggaagagtgatcgagaagacactgtacaacagaagaacccggcaggatgagcctgccctgttcgtggccctgaccttcgagcggcgggaggtcctggactcctccaatatcaaaccaatgaacctgatcggcgtggcaagaggcgaaaacatccccgccgtgatcgccctgaccgaccccgagggctgcccactgagccggtttaaggatagcctgggaaacccaacccacatcctgagaatcggcgagagctataaggagaagcagcggaccatccaggccaagaaggaggtggagcagcggagagccggcggctacagccggaagtacgccagcaaagccaagaatctggcagacgatatggtgagaaacaccgctagagatctgctgtactacgccgtgacccaggatgccatgctgatcttcgccaacctgagccggggcttcggccggcagggcaagcggaccttcatggccgagagacagtacacacggatggaggactggctgaccgccaagctggcctacgagggcctgagcaagacctacctgtccaagacactggcccagtacacctccaagacatgcagcaactgtgggtttaccatcaccagcgccgactacgacagggtgctggagaagctgaagaagacagcaacaggctggatgaccacaattaacggcaaggagctgaaggtggagggccagattacctactacaacagatacaagagacagaacgtagtcaaggacctgtccgtcgagctggatagactgagcgaagaatctgtgaacaacgacatctcctcctggacaaagggcagaagcggagaagctctgagcctcctgaagaaaagattctcccatagacccgtgcaggagaagttcgtgtgcctgaactgcggcttcgagacacacgcagccgagcaagccgccctgaacatcgccagatcctggctgttcctgcggagccaggagtacaagaaataccagacaaacaagacaaccggcaacaccgataagagagccttcgtcgagacctggcagtccttttaccggaagaagcttaaggaggtgtggaaacctgccgtgcggtctggcggatctggcggaggctccacaagcctgctgaccttcgaggacgtcgccgtgtccttcagcgaggaagaatgggagctgctcgatcctcctcagaaaaccctgtacaacgacgtgatgcaagagaactacgagacagtgatctctctgggcctgaagctgaagaacgacaccggaaatgatcagcccatcagcatcagcgccctggaaatgcaggccagcggcagcaaggtgctgcggaaggccagaatgaaagtggctcagaagacaaccagccccaagaaaaagagaaaagtctaagctgccttctgcggggcttgccttctggccatgcccttcttctctcccttgcacctgtacctcttggtctttgaataaagcctgagtaggaaggctagcaaaaaaaaaaaaaaaaaaaaaaaaaaaaaaaaaaaaaaaaaaaaaaaaaaaaaaaaaaaaaaaaaaaaaaaaaaaaaaaa

SEQ ID NO: 2419 - RNA, 5854 nt, synthetic construct
  source 1..5854: mol_type = other RNA
aggaaataagagagaaaagaagagtaagaagaaatataagagccaccatggcccctaagaagaagcgtaaagtgagccggatggaacgcctcgtctacgaggtgcggcagaagtgcagaaacatcgaggacatctgcatctcctgcggatctctgaacgtgaccctggagcacccactgttcatcggcggcatgtgccagaactgtaaaaactgttttctggagtgtgcctatcaatacgacgatgacggctaccagagctactgcaccatctgttgcggcggaagagaggtgctgatgtgtggaaataacaactgctgccggtgcttctgcgtggaatgcgtggacctgctggtgggccccggcgccgcccaggccgctattaaggaagatccttggaactgctacatgtgcggccacaagggcacatacggcctgctgagacggagagaggactggcctagcagactgcagatgttcttcgccaataaccacgaccaggagttcgacccccctaaggtgtaccctcccgtccccgccgagaagagaaagcccatccgggtcctgagcctgttcgatggcatcgccaccggtctgctggtgctgaaggacctgggcatccaggtggataggtacattgcctccgaggtgtgcgaggactccatcaccgtgggaatggtgcgtcatcagggcaagatcatgtacgtgggcgacgtgcggagcgtgacacagaagcatatccaggagtggggccctttcgacctggtgatcggcggcagcccttgcaatgacctgagcatcgtgaacccagcccggaagggcctgtacgagggaaccggcagactgttcttcgagttttacagactgctgcacgacgcccggcctaaggaaggcgacgaccggcccttcttttggctgttcgagaatgtggtggccatgggagtcagcgacaagcgggatattagccggttcctggagagcaaccccgtgatgatcgatgccaaggaagtgagcgccgcccaccgggccagatacttctggggcaatctgcctggcatgaacagacccctggccagcaccgtgaacgacaagctggagctgcaggagtgcctggagcacggccggatcgccaagttcagcaaggtgagaaccatcaccacccgaagcaacagcatcaaacaaggcaaggaccagcactttcctgtgttcatgaacgagaaggaggacatcctgtggtgtaccgagatggagagagtgttcgggttcccagtccactacacagatgtcagcaacatgtctagactggccagacagagactgctgggaagaagctggtccgtccctgtgatcagacacctgttcgcccctctgaaggagtacttcgcctgcgtgagcagcggcaacagcaacgccaacagccggggccccagcttctctagcggcctggtgccactgtccctgagagggagccacatgggccccatggagatctacaaaaccgtgagcgcctggaagcggcagcctgtgcgcgtgctgagcctgtttcggaatatcgataaagtcctgaaaagcctgggattcctggagagcggctctggctccggcggtggcaccctgaagtacgtggaggatgtgacaaacgtggtcagacgggatgtggagaagtggggccccttcgatctggtgtacggcagcacccaacccctgggcagctcttgtgaccggtgccctggctggtacatgtttcagttccaccggatcctgcagtacgccctgccgagacaggagtcccagcggccattcttttggattttcatggacaacttgctgctgaccgaggatgaccaggaaactaccactcggttcctgcagaccgaagccgtgaccctgcaggacgtgagaggccgggactaccagaacgccatgcgggtgtggtccaacatccctggactgaaaagcaagcacgcacctctgacccctaaagaagaggagtacctgcaggcccaggtgcggagcagaagcaagctggacgcccctaaggtggatctgctggtgaagaattgcctcctgcccctgagagagtacttcaagtatttcagccagaatagtctgcccctgggcggcccaagcagcggcgcccctcctcccagcggcggcagcccagccggctccccaacctctaccgaggagggcacctctgagtccgccacccccgagagcggccctggcacctccaccgagcccagcgagggcagcgcacccggcagccctgccggcagccccacctccacagaggagggaaccagcaccgagcccagcgaaggcagcgccccaggcaccagcaccgagcctagtgagggcggctctggcggcggcagcgcccaggagattaaacggatcaacaagatcagaagaagacttgtgaaagacagcaacaccaagaaggccggcaagacaggccccatgaaaaccctgctggttagagtgatgacacccgatctgagagagcggctggaaaacctgagaaagaagcctgaaaatatcccccagcccatcagcaatacatctagagccaacctgaataagctgctgaccgattacaccgaaatgaagaaggcgatcctgcatgtgtactgggaagagttccagaaggaccctgtgggcctgatgagccgggtggcccagcctgccagcaagaagatcgatcagaacaagctgaaacctgagatggacgagaagggcaacctgaccaccgccggctttgcctgctctcagtgtggccagcccctgttcgtgtacaagctggagcaggtgtctgagaagggcaaggcttacaccaactacttcggacggtgcaatgtggccgagcacgaaaagctgatcctgctggcccagctgaagcccgagaaggatagcgacgaagccgtgacatatagcctgggaaagtttgggcagagggccctggatttctacagcattcatgtgaccaaggagtccacccaccccgtgaagcccctggcccagatcgccggaaacagatacgcctccggacctgtgggaaaggccctgagcgacgcatgtatgggcacaatcgcctccttcctgtctaagtaccaggacatcatcatcgaacaccagaaggtggtgaagggcaaccagaagagactggagagcctgcgggagctggccggcaaggaaaacctggaataccctagcgtgaccctgccacctcagcctcacaccaaggagggcgttgatgcctacaacgaagtgatcgcccgggtgcgaatgtgggtgaacctgaacctgtggcagaagctgaagctaagcagagatgatgccaagcctctgctgagactgaagggattcccttcctttcctctggtcgagagacaggccaacgaagtggactggtgggacatggtgtgtaacgtgaagaagctgatcaacgagaaaaaggaggatggcaaggtgttttggcagaatctggctggctacaagagacaggaagccctgagaccatacctgagcagcgaggaagatcggaagaagggaaagaaattcgctcggtaccagctgggcgacctgctgctgcacctggaaaagaagcacggcgaggactggggaaaggtgtacgacgaggcctgggagcggattgacaagaaagtggaaggcctgagcaagcacatcaagctggaagaggaacggagaagcgaggacgcccagagcaaggccgccctgaccgactggctgcgggctaaggccagcttcgtgatcgagggcctgaaggaggccgacaaggacgagttctgcagatgcgagctgaagctgcagaagtggtacggggacctgcggggaaagcccttcgccatcgaagccgagaacagcatcctggacatcagcggcttcagcaagcagtacaactgtgccttcatctggcagaaggacggcgtgaagaagctgaacctgtacctgatcatcaactacttcaagggcggcaagctgcggttcaagaagatcaaacctgaagccttcgaagccaacagattctacaccgtgatcaacaaaaagagcggcgagatcgtgcccatggaggtgaacttcaacttcgacgaccccaacctgatcatcctgcctctggcctttggcaagagacagggcagagaattcatctggaacgacctgctgtccctggaaaccggcagcctgaagctggccaacggaagagtgatcgagaagacactgtacaacagaagaacccggcaggatgagcctgccctgttcgtggccctgaccttcgagcggcgggaggtcctggactcctccaatatcaaaccaatgaacctgatcggcgtggcaagaggcgaaaacatccccgccgtgatcgccctgaccgaccccgagggctgcccactgagccggtttaaggatagcctgggaaacccaacccacatcctgagaatcggcgagagctataaggagaagcagcggaccatccaggccaagaaggaggtggagcagcggagagccggcggctacagccggaagtacgccagcaaagccaagaatctggcagacgatatggtgagaaacaccgctagagatctgctgtactacgccgtgacccaggatgccatgctgatcttcgccaacctgagccggggcttcggccggcagggcaagcggaccttcatggccgagagacagtacacacggatggaggactggctgaccgccaagctggcctacgagggcctgagcaagacctacctgtccaagacactggcccagtacacctccaagacatgcagcaactgtgggtttaccatcaccagcgccgactacgacagggtgctggagaagctgaagaagacagcaacaggctggatgaccacaattaacggcaaggagctgaaggtggagggccagattacctactacaacagatacaagagacagaacgtagtcaaggacctgtccgtcgagctggatagactgagcgaagaatctgtgaacaacgacatctcctcctggacaaagggcagaagcggagaagctctgagcctcctgaagaaaagattctcccatagacccgtgcaggagaagttcgtgtgcctgaactgcggcttcgagacacacgcagccgagcaagccgccctgaacatcgccagatcctggctgttcctgcggagccaggagtacaagaaataccagacaaacaagacaaccggcaacaccgataagagagccttcgtcgagacctggcagtccttttaccggaagaagcttaaggaggtgtggaaacctgccgtgcggtctggcggatctggcggaggctccacaagcatgaacaactcccagggcagagtgaccttcgaggacgtgaccgtgaattttacacagggagagtggcagagactgaaccccgagcagagaaacctgtaccgggatgtgatgctggaaaactacagcaatctggtgtccgtgggccagggcgagaccacaaagcctgacgtgatcctgcgtctggagcagggcaaggaaccctggctggaggaggaggaggtgctgggaagcggacgggccgagaagaacggcgacatcggcggacagatctggaagcctaaggacgtgaaagaaagcctgaccagccccaagaaaaagagaaaagtctaagctgccttctgcggggcttgccttctggccatgcccttcttctctcccttgcacctgtacctcttggtctttgaataaagcctgagtaggaaggctagcaaaaaaaaaaaaaaaaaaaaaaaaaaaaaaaaaaaaaaaaaaaaaaaaaaaaaaaaaaaaaaaaaaaaaaaaaaaaaaaa

SEQ ID NO: 2420 - RNA, 5797 nt, synthetic construct
  source 1..5797: mol_type = other RNA
aggaaataagagagaaaagaagagtaagaagaaatataagagccaccatggcccctaagaagaagcgtaaagtgagccggatggaacgcctcgtctacgaggtgcggcagaagtgcagaaacatcgaggacatctgcatctcctgcggatctctgaacgtgaccctggagcacccactgttcatcggcggcatgtgccagaactgtaaaaactgttttctggagtgtgcctatcaatacgacgatgacggctaccagagctactgcaccatctgttgcggcggaagagaggtgctgatgtgtggaaataacaactgctgccggtgcttctgcgtggaatgcgtggacctgctggtgggccccggcgccgcccaggccgctattaaggaagatccttggaactgctacatgtgcggccacaagggcacatacggcctgctgagacggagagaggactggcctagcagactgcagatgttcttcgccaataaccacgaccaggagttcgacccccctaaggtgtaccctcccgtccccgccgagaagagaaagcccatccgggtcctgagcctgttcgatggcatcgccaccggtctgctggtgctgaaggacctgggcatccaggtggataggtacattgcctccgaggtgtgcgaggactccatcaccgtgggaatggtgcgtcatcagggcaagatcatgtacgtgggcgacgtgcggagcgtgacacagaagcatatccaggagtggggccctttcgacctggtgatcggcggcagcccttgcaatgacctgagcatcgtgaacccagcccggaagggcctgtacgagggaaccggcagactgttcttcgagttttacagactgctgcacgacgcccggcctaaggaaggcgacgaccggcccttcttttggctgttcgagaatgtggtggccatgggagtcagcgacaagcgggatattagccggttcctggagagcaaccccgtgatgatcgatgccaaggaagtgagcgccgcccaccgggccagatacttctggggcaatctgcctggcatgaacagacccctggccagcaccgtgaacgacaagctggagctgcaggagtgcctggagcacggccggatcgccaagttcagcaaggtgagaaccatcaccacccgaagcaacagcatcaaacaaggcaaggaccagcactttcctgtgttcatgaacgagaaggaggacatcctgtggtgtaccgagatggagagagtgttcgggttcccagtccactacacagatgtcagcaacatgtctagactggccagacagagactgctgggaagaagctggtccgtccctgtgatcagacacctgttcgcccctctgaaggagtacttcgcctgcgtgagcagcggcaacagcaacgccaacagccggggccccagcttctctagcggcctggtgccactgtccctgagagggagccacatgggccccatggagatctacaaaaccgtgagcgcctggaagcggcagcctgtgcgcgtgctgagcctgtttcggaatatcgataaagtcctgaaaagcctgggattcctggagagcggctctggctccggcggtggcaccctgaagtacgtggaggatgtgacaaacgtggtcagacgggatgtggagaagtggggccccttcgatctggtgtacggcagcacccaacccctgggcagctcttgtgaccggtgccctggctggtacatgtttcagttccaccggatcctgcagtacgccctgccgagacaggagtcccagcggccattcttttggattttcatggacaacttgctgctgaccgaggatgaccaggaaactaccactcggttcctgcagaccgaagccgtgaccctgcaggacgtgagaggccgggactaccagaacgccatgcgggtgtggtccaacatccctggactgaaaagcaagcacgcacctctgacccctaaagaagaggagtacctgcaggcccaggtgcggagcagaagcaagctggacgcccctaaggtggatctgctggtgaagaattgcctcctgcccctgagagagtacttcaagtatttcagccagaatagtctgcccctgggcggcccaagcagcggcgcccctcctcccagcggcggcagcccagccggctccccaacctctaccgaggagggcacctctgagtccgccacccccgagagcggccctggcacctccaccgagcccagcgagggcagcgcacccggcagccctgccggcagccccacctccacagaggagggaaccagcaccgagcccagcgaaggcagcgccccaggcaccagcaccgagcctagtgagggcggctctggcggcggcagcgcccaggagattaaacggatcaacaagatcagaagaagacttgtgaaagacagcaacaccaagaaggccggcaagacaggccccatgaaaaccctgctggttagagtgatgacacccgatctgagagagcggctggaaaacctgagaaagaagcctgaaaatatcccccagcccatcagcaatacatctagagccaacctgaataagctgctgaccgattacaccgaaatgaagaaggcgatcctgcatgtgtactgggaagagttccagaaggaccctgtgggcctgatgagccgggtggcccagcctgccagcaagaagatcgatcagaacaagctgaaacctgagatggacgagaagggcaacctgaccaccgccggctttgcctgctctcagtgtggccagcccctgttcgtgtacaagctggagcaggtgtctgagaagggcaaggcttacaccaactacttcggacggtgcaatgtggccgagcacgaaaagctgatcctgctggcccagctgaagcccgagaaggatagcgacgaagccgtgacatatagcctgggaaagtttgggcagagggccctggatttctacagcattcatgtgaccaaggagtccacccaccccgtgaagcccctggcccagatcgccggaaacagatacgcctccggacctgtgggaaaggccctgagcgacgcatgtatgggcacaatcgcctccttcctgtctaagtaccaggacatcatcatcgaacaccagaaggtggtgaagggcaaccagaagagactggagagcctgcgggagctggccggcaaggaaaacctggaataccctagcgtgaccctgccacctcagcctcacaccaaggagggcgttgatgcctacaacgaagtgatcgcccgggtgcgaatgtgggtgaacctgaacctgtggcagaagctgaagctaagcagagatgatgccaagcctctgctgagactgaagggattcccttcctttcctctggtcgagagacaggccaacgaagtggactggtgggacatggtgtgtaacgtgaagaagctgatcaacgagaaaaaggaggatggcaaggtgttttggcagaatctggctggctacaagagacaggaagccctgagaccatacctgagcagcgaggaagatcggaagaagggaaagaaattcgctcggtaccagctgggcgacctgctgctgcacctggaaaagaagcacggcgaggactggggaaaggtgtacgacgaggcctgggagcggattgacaagaaagtggaaggcctgagcaagcacatcaagctggaagaggaacggagaagcgaggacgcccagagcaaggccgccctgaccgactggctgcgggctaaggccagcttcgtgatcgagggcctgaaggaggccgacaaggacgagttctgcagatgcgagctgaagctgcagaagtggtacggggacctgcggggaaagcccttcgccatcgaagccgagaacagcatcctggacatcagcggcttcagcaagcagtacaactgtgccttcatctggcagaaggacggcgtgaagaagctgaacctgtacctgatcatcaactacttcaagggcggcaagctgcggttcaagaagatcaaacctgaagccttcgaagccaacagattctacaccgtgatcaacaaaaagagcggcgagatcgtgcccatggaggtgaacttcaacttcgacgaccccaacctgatcatcctgcctctggcctttggcaagagacagggcagagaattcatctggaacgacctgctgtccctggaaaccggcagcctgaagctggccaacggaagagtgatcgagaagacactgtacaacagaagaacccggcaggatgagcctgccctgttcgtggccctgaccttcgagcggcgggaggtcctggactcctccaatatcaaaccaatgaacctgatcggcgtggcaagaggcgaaaacatccccgccgtgatcgccctgaccgaccccgagggctgcccactgagccggtttaaggatagcctgggaaacccaacccacatcctgagaatcggcgagagctataaggagaagcagcggaccatccaggccaagaaggaggtggagcagcggagagccggcggctacagccggaagtacgccagcaaagccaagaatctggcagacgatatggtgagaaacaccgctagagatctgctgtactacgccgtgacccaggatgccatgctgatcttcgccaacctgagccggggcttcggccggcagggcaagcggaccttcatggccgagagacagtacacacggatggaggactggctgaccgccaagctggcctacgagggcctgagcaagacctacctgtccaagacactggcccagtacacctccaagacatgcagcaactgtgggtttaccatcaccagcgccgactacgacagggtgctggagaagctgaagaagacagcaacaggctggatgaccacaattaacggcaaggagctgaaggtggagggccagattacctactacaacagatacaagagacagaacgtagtcaaggacctgtccgtcgagctggatagactgagcgaagaatctgtgaacaacgacatctcctcctggacaaagggcagaagcggagaagctctgagcctcctgaagaaaagattctcccatagacccgtgcaggagaagttcgtgtgcctgaactgcggcttcgagacacacgcagccgagcaagccgccctgaacatcgccagatcctggctgttcctgcggagccaggagtacaagaaataccagacaaacaagacaaccggcaacaccgataagagagccttcgtcgagacctggcagtccttttaccggaagaagcttaaggaggtgtggaaacctgccgtgcggtctggcggatctggcggaggctccacaagcgccctggtgacatttgaggacgtcgccgtgcggttcacccaggaggaatgggctctgctggatccttctcagaaaatcctgtaccgggacgtgatgagagagacataccggaatctgacctccgtgggcatcaactgggaatgttgggaccttgaagcctgcttcagaagcctgggaagaaacctgagagtgcaggtggtgaagagaaagtgcgagctgaccaacagcggcccctgcgccgagaccagccccaagaaaaagagaaaagtctaagctgccttctgcggggcttgccttctggccatgcccttcttctctcccttgcacctgtacctcttggtctttgaataaagcctgagtaggaaggctagcaaaaaaaaaaaaaaaaaaaaaaaaaaaaaaaaaaaaaaaaaaaaaaaaaaaaaaaaaaaaaaaaaaaaaaaaaaaaaaaa

SEQ ID NO: 2421 - RNA, 5797 nt, synthetic construct
  source 1..5797: mol_type = other RNA
aggaaataagagagaaaagaagagtaagaagaaatataagagccaccatggcccctaagaagaagcgtaaagtgagccggatggaacgcctcgtctacgaggtgcggcagaagtgcagaaacatcgaggacatctgcatctcctgcggatctctgaacgtgaccctggagcacccactgttcatcggcggcatgtgccagaactgtaaaaactgttttctggagtgtgcctatcaatacgacgatgacggctaccagagctactgcaccatctgttgcggcggaagagaggtgctgatgtgtggaaataacaactgctgccggtgcttctgcgtggaatgcgtggacctgctggtgggccccggcgccgcccaggccgctattaaggaagatccttggaactgctacatgtgcggccacaagggcacatacggcctgctgagacggagagaggactggcctagcagactgcagatgttcttcgccaataaccacgaccaggagttcgacccccctaaggtgtaccctcccgtccccgccgagaagagaaagcccatccgggtcctgagcctgttcgatggcatcgccaccggtctgctggtgctgaaggacctgggcatccaggtggataggtacattgcctccgaggtgtgcgaggactccatcaccgtgggaatggtgcgtcatcagggcaagatcatgtacgtgggcgacgtgcggagcgtgacacagaagcatatccaggagtggggccctttcgacctggtgatcggcggcagcccttgcaatgacctgagcatcgtgaacccagcccggaagggcctgtacgagggaaccggcagactgttcttcgagttttacagactgctgcacgacgcccggcctaaggaaggcgacgaccggcccttcttttggctgttcgagaatgtggtggccatgggagtcagcgacaagcgggatattagccggttcctggagagcaaccccgtgatgatcgatgccaaggaagtgagcgccgcccaccgggccagatacttctggggcaatctgcctggcatgaacagacccctggccagcaccgtgaacgacaagctggagctgcaggagtgcctggagcacggccggatcgccaagttcagcaaggtgagaaccatcaccacccgaagcaacagcatcaaacaaggcaaggaccagcactttcctgtgttcatgaacgagaaggaggacatcctgtggtgtaccgagatggagagagtgttcgggttcccagtccactacacagatgtcagcaacatgtctagactggccagacagagactgctgggaagaagctggtccgtccctgtgatcagacacctgttcgcccctctgaaggagtacttcgcctgcgtgagcagcggcaacagcaacgccaacagccggggccccagcttctctagcggcctggtgccactgtccctgagagggagccacatgggccccatggagatctacaaaaccgtgagcgcctggaagcggcagcctgtgcgcgtgctgagcctgtttcggaatatcgataaagtcctgaaaagcctgggattcctggagagcggctctggctccggcggtggcaccctgaagtacgtggaggatgtgacaaacgtggtcagacgggatgtggagaagtggggccccttcgatctggtgtacggcagcacccaacccctgggcagctcttgtgaccggtgccctggctggtacatgtttcagttccaccggatcctgcagtacgccctgccgagacaggagtcccagcggccattcttttggattttcatggacaacttgctgctgaccgaggatgaccaggaaactaccactcggttcctgcagaccgaagccgtgaccctgcaggacgtgagaggccgggactaccagaacgccatgcgggtgtggtccaacatccctggactgaaaagcaagcacgcacctctgacccctaaagaagaggagtacctgcaggcccaggtgcggagcagaagcaagctggacgcccctaaggtggatctgctggtgaagaattgcctcctgcccctgagagagtacttcaagtatttcagccagaatagtctgcccctgggcggcccaagcagcggcgcccctcctcccagcggcggcagcccagccggctccccaacctctaccgaggagggcacctctgagtccgccacccccgagagcggccctggcacctccaccgagcccagcgagggcagcgcacccggcagccctgccggcagccccacctccacagaggagggaaccagcaccgagcccagcgaaggcagcgccccaggcaccagcaccgagcctagtgagggcggctctggcggcggcagcgcccaggagattaaacggatcaacaagatcagaagaagacttgtgaaagacagcaacaccaagaaggccggcaagacaggccccatgaaaaccctgctggttagagtgatgacacccgatctgagagagcggctggaaaacctgagaaagaagcctgaaaatatcccccagcccatcagcaatacatctagagccaacctgaataagctgctgaccgattacaccgaaatgaagaaggcgatcctgcatgtgtactgggaagagttccagaaggaccctgtgggcctgatgagccgggtggcccagcctgccagcaagaagatcgatcagaacaagctgaaacctgagatggacgagaagggcaacctgaccaccgccggctttgcctgctctcagtgtggccagcccctgttcgtgtacaagctggagcaggtgtctgagaagggcaaggcttacaccaactacttcggacggtgcaatgtggccgagcacgaaaagctgatcctgctggcccagctgaagcccgagaaggatagcgacgaagccgtgacatatagcctgggaaagtttgggcagagggccctggatttctacagcattcatgtgaccaaggagtccacccaccccgtgaagcccctggcccagatcgccggaaacagatacgcctccggacctgtgggaaaggccctgagcgacgcatgtatgggcacaatcgcctccttcctgtctaagtaccaggacatcatcatcgaacaccagaaggtggtgaagggcaaccagaagagactggagagcctgcgggagctggccggcaaggaaaacctggaataccctagcgtgaccctgccacctcagcctcacaccaaggagggcgttgatgcctacaacgaagtgatcgcccgggtgcgaatgtgggtgaacctgaacctgtggcagaagctgaagctaagcagagatgatgccaagcctctgctgagactgaagggattcccttcctttcctctggtcgagagacaggccaacgaagtggactggtgggacatggtgtgtaacgtgaagaagctgatcaacgagaaaaaggaggatggcaaggtgttttggcagaatctggctggctacaagagacaggaagccctgagaccatacctgagcagcgaggaagatcggaagaagggaaagaaattcgctcggtaccagctgggcgacctgctgctgcacctggaaaagaagcacggcgaggactggggaaaggtgtacgacgaggcctgggagcggattgacaagaaagtggaaggcctgagcaagcacatcaagctggaagaggaacggagaagcgaggacgcccagagcaaggccgccctgaccgactggctgcgggctaaggccagcttcgtgatcgagggcctgaaggaggccgacaaggacgagttctgcagatgcgagctgaagctgcagaagtggtacggggacctgcggggaaagcccttcgccatcgaagccgagaacagcatcctggacatcagcggcttcagcaagcagtacaactgtgccttcatctggcagaaggacggcgtgaagaagctgaacctgtacctgatcatcaactacttcaagggcggcaagctgcggttcaagaagatcaaacctgaagccttcgaagccaacagattctacaccgtgatcaacaaaaagagcggcgagatcgtgcccatggaggtgaacttcaacttcgacgaccccaacctgatcatcctgcctctggcctttggcaagagacagggcagagaattcatctggaacgacctgctgtccctggaaaccggcagcctgaagctggccaacggaagagtgatcgagaagacactgtacaacagaagaacccggcaggatgagcctgccctgttcgtggccctgaccttcgagcggcgggaggtcctggactcctccaatatcaaaccaatgaacctgatcggcgtggcaagaggcgaaaacatccccgccgtgatcgccctgaccgaccccgagggctgcccactgagccggtttaaggatagcctgggaaacccaacccacatcctgagaatcggcgagagctataaggagaagcagcggaccatccaggccaagaaggaggtggagcagcggagagccggcggctacagccggaagtacgccagcaaagccaagaatctggcagacgatatggtgagaaacaccgctagagatctgctgtactacgccgtgacccaggatgccatgctgatcttcgccaacctgagccggggcttcggccggcagggcaagcggaccttcatggccgagagacagtacacacggatggaggactggctgaccgccaagctggcctacgagggcctgagcaagacctacctgtccaagacactggcccagtacacctccaagacatgcagcaactgtgggtttaccatcaccagcgccgactacgacagggtgctggagaagctgaagaagacagcaacaggctggatgaccacaattaacggcaaggagctgaaggtggagggccagattacctactacaacagatacaagagacagaacgtagtcaaggacctgtccgtcgagctggatagactgagcgaagaatctgtgaacaacgacatctcctcctggacaaagggcagaagcggagaagctctgagcctcctgaagaaaagattctcccatagacccgtgcaggagaagttcgtgtgcctgaactgcggcttcgagacacacgcagccgagcaagccgccctgaacatcgccagatcctggctgttcctgcggagccaggagtacaagaaataccagacaaacaagacaaccggcaacaccgataagagagccttcgtcgagacctggcagtccttttaccggaagaagcttaaggaggtgtggaaacctgccgtgcggtctggcggatctggcggaggctccacaagctctacacctgtgaccttcgaggatgtggtggtctacttcaccgccgctgagtgggtgcacctgacaaactggcaaagagatttttatcaggccgtgatgatggaaacctacgagctggtggccagcgtggctggcgacggcgttccaatggccgaggacgaggaaggcggagtggaaagacccgtgtggcagtacatccccagaggcaagcggcggagaaagacccctcagcctcgcgccgacaccagccccaagaaaaagagaaaagtctaagctgccttctgcggggcttgccttctggccatgcccttcttctctcccttgcacctgtacctcttggtctttgaataaagcctgagtaggaaggctagcaaaaaaaaaaaaaaaaaaaaaaaaaaaaaaaaaaaaaaaaaaaaaaaaaaaaaaaaaaaaaaaaaaaaaaaaaaaaaaaa

SEQ ID NO: 2422 - RNA, 5797 nt, synthetic construct
  source 1..5797: mol_type = other RNA
aggaaataagagagaaaagaagagtaagaagaaatataagagccaccatggcccctaagaagaagcgtaaagtgagccggatggaacgcctcgtctacgaggtgcggcagaagtgcagaaacatcgaggacatctgcatctcctgcggatctctgaacgtgaccctggagcacccactgttcatcggcggcatgtgccagaactgtaaaaactgttttctggagtgtgcctatcaatacgacgatgacggctaccagagctactgcaccatctgttgcggcggaagagaggtgctgatgtgtggaaataacaactgctgccggtgcttctgcgtggaatgcgtggacctgctggtgggccccggcgccgcccaggccgctattaaggaagatccttggaactgctacatgtgcggccacaagggcacatacggcctgctgagacggagagaggactggcctagcagactgcagatgttcttcgccaataaccacgaccaggagttcgacccccctaaggtgtaccctcccgtccccgccgagaagagaaagcccatccgggtcctgagcctgttcgatggcatcgccaccggtctgctggtgctgaaggacctgggcatccaggtggataggtacattgcctccgaggtgtgcgaggactccatcaccgtgggaatggtgcgtcatcagggcaagatcatgtacgtgggcgacgtgcggagcgtgacacagaagcatatccaggagtggggccctttcgacctggtgatcggcggcagcccttgcaatgacctgagcatcgtgaacccagcccggaagggcctgtacgagggaaccggcagactgttcttcgagttttacagactgctgcacgacgcccggcctaaggaaggcgacgaccggcccttcttttggctgttcgagaatgtggtggccatgggagtcagcgacaagcgggatattagccggttcctggagagcaaccccgtgatgatcgatgccaaggaagtgagcgccgcccaccgggccagatacttctggggcaatctgcctggcatgaacagacccctggccagcaccgtgaacgacaagctggagctgcaggagtgcctggagcacggccggatcgccaagttcagcaaggtgagaaccatcaccacccgaagcaacagcatcaaacaaggcaaggaccagcactttcctgtgttcatgaacgagaaggaggacatcctgtggtgtaccgagatggagagagtgttcgggttcccagtccactacacagatgtcagcaacatgtctagactggccagacagagactgctgggaagaagctggtccgtccctgtgatcagacacctgttcgcccctctgaaggagtacttcgcctgcgtgagcagcggcaacagcaacgccaacagccggggccccagcttctctagcggcctggtgccactgtccctgagagggagccacatgggccccatggagatctacaaaaccgtgagcgcctggaagcggcagcctgtgcgcgtgctgagcctgtttcggaatatcgataaagtcctgaaaagcctgggattcctggagagcggctctggctccggcggtggcaccctgaagtacgtggaggatgtgacaaacgtggtcagacgggatgtggagaagtggggccccttcgatctggtgtacggcagcacccaacccctgggcagctcttgtgaccggtgccctggctggtacatgtttcagttccaccggatcctgcagtacgccctgccgagacaggagtcccagcggccattcttttggattttcatggacaacttgctgctgaccgaggatgaccaggaaactaccactcggttcctgcagaccgaagccgtgaccctgcaggacgtgagaggccgggactaccagaacgccatgcgggtgtggtccaacatccctggactgaaaagcaagcacgcacctctgacccctaaagaagaggagtacctgcaggcccaggtgcggagcagaagcaagctggacgcccctaaggtggatctgctggtgaagaattgcctcctgcccctgagagagtacttcaagtatttcagccagaatagtctgcccctgggcggcccaagcagcggcgcccctcctcccagcggcggcagcccagccggctccccaacctctaccgaggagggcacctctgagtccgccacccccgagagcggccctggcacctccaccgagcccagcgagggcagcgcacccggcagccctgccggcagccccacctccacagaggagggaaccagcaccgagcccagcgaaggcagcgccccaggcaccagcaccgagcctagtgagggcggctctggcggcggcagcgcccaggagattaaacggatcaacaagatcagaagaagacttgtgaaagacagcaacaccaagaaggccggcaagacaggccccatgaaaaccctgctggttagagtgatgacacccgatctgagagagcggctggaaaacctgagaaagaagcctgaaaatatcccccagcccatcagcaatacatctagagccaacctgaataagctgctgaccgattacaccgaaatgaagaaggcgatcctgcatgtgtactgggaagagttccagaaggaccctgtgggcctgatgagccgggtggcccagcctgccagcaagaagatcgatcagaacaagctgaaacctgagatggacgagaagggcaacctgaccaccgccggctttgcctgctctcagtgtggccagcccctgttcgtgtacaagctggagcaggtgtctgagaagggcaaggcttacaccaactacttcggacggtgcaatgtggccgagcacgaaaagctgatcctgctggcccagctgaagcccgagaaggatagcgacgaagccgtgacatatagcctgggaaagtttgggcagagggccctggatttctacagcattcatgtgaccaaggagtccacccaccccgtgaagcccctggcccagatcgccggaaacagatacgcctccggacctgtgggaaaggccctgagcgacgcatgtatgggcacaatcgcctccttcctgtctaagtaccaggacatcatcatcgaacaccagaaggtggtgaagggcaaccagaagagactggagagcctgcgggagctggccggcaaggaaaacctggaataccctagcgtgaccctgccacctcagcctcacaccaaggagggcgttgatgcctacaacgaagtgatcgcccgggtgcgaatgtgggtgaacctgaacctgtggcagaagctgaagctaagcagagatgatgccaagcctctgctgagactgaagggattcccttcctttcctctggtcgagagacaggccaacgaagtggactggtgggacatggtgtgtaacgtgaagaagctgatcaacgagaaaaaggaggatggcaaggtgttttggcagaatctggctggctacaagagacaggaagccctgagaccatacctgagcagcgaggaagatcggaagaagggaaagaaattcgctcggtaccagctgggcgacctgctgctgcacctggaaaagaagcacggcgaggactggggaaaggtgtacgacgaggcctgggagcggattgacaagaaagtggaaggcctgagcaagcacatcaagctggaagaggaacggagaagcgaggacgcccagagcaaggccgccctgaccgactggctgcgggctaaggccagcttcgtgatcgagggcctgaaggaggccgacaaggacgagttctgcagatgcgagctgaagctgcagaagtggtacggggacctgcggggaaagcccttcgccatcgaagccgagaacagcatcctggacatcagcggcttcagcaagcagtacaactgtgccttcatctggcagaaggacggcgtgaagaagctgaacctgtacctgatcatcaactacttcaagggcggcaagctgcggttcaagaagatcaaacctgaagccttcgaagccaacagattctacaccgtgatcaacaaaaagagcggcgagatcgtgcccatggaggtgaacttcaacttcgacgaccccaacctgatcatcctgcctctggcctttggcaagagacagggcagagaattcatctggaacgacctgctgtccctggaaaccggcagcctgaagctggccaacggaagagtgatcgagaagacactgtacaacagaagaacccggcaggatgagcctgccctgttcgtggccctgaccttcgagcggcgggaggtcctggactcctccaatatcaaaccaatgaacctgatcggcgtggcaagaggcgaaaacatccccgccgtgatcgccctgaccgaccccgagggctgcccactgagccggtttaaggatagcctgggaaacccaacccacatcctgagaatcggcgagagctataaggagaagcagcggaccatccaggccaagaaggaggtggagcagcggagagccggcggctacagccggaagtacgccagcaaagccaagaatctggcagacgatatggtgagaaacaccgctagagatctgctgtactacgccgtgacccaggatgccatgctgatcttcgccaacctgagccggggcttcggccggcagggcaagcggaccttcatggccgagagacagtacacacggatggaggactggctgaccgccaagctggcctacgagggcctgagcaagacctacctgtccaagacactggcccagtacacctccaagacatgcagcaactgtgggtttaccatcaccagcgccgactacgacagggtgctggagaagctgaagaagacagcaacaggctggatgaccacaattaacggcaaggagctgaaggtggagggccagattacctactacaacagatacaagagacagaacgtagtcaaggacctgtccgtcgagctggatagactgagcgaagaatctgtgaacaacgacatctcctcctggacaaagggcagaagcggagaagctctgagcctcctgaagaaaagattctcccatagacccgtgcaggagaagttcgtgtgcctgaactgcggcttcgagacacacgcagccgagcaagccgccctgaacatcgccagatcctggctgttcctgcggagccaggagtacaagaaataccagacaaacaagacaaccggcaacaccgataagagagccttcgtcgagacctggcagtccttttaccggaagaagcttaaggaggtgtggaaacctgccgtgcggtctggcggatctggcggaggctccacaagccaggacgtggtgacattcaaggacgtcgccatctacttcagccctgaggaatgggtgcggctgagcgccggacagagagaactgtaccaggaggtgatgctggacaactacgagctggtgaccagcctggatagagagagcaaactgctgtataagatggaccccgaggaagaaagctgcgagggcgtgccatacagctctgccgacagcggcgcccctgatagctcctccacctctgcttgtaccagccccaagaaaaagagaaaagtctaagctgccttctgcggggcttgccttctggccatgcccttcttctctcccttgcacctgtacctcttggtctttgaataaagcctgagtaggaaggctagcaaaaaaaaaaaaaaaaaaaaaaaaaaaaaaaaaaaaaaaaaaaaaaaaaaaaaaaaaaaaaaaaaaaaaaaaaaaaaaaa

SEQ ID NO: 2423 - RNA, 5824 nt, synthetic construct
  source 1..5824: mol_type = other RNA
aggaaataagagagaaaagaagagtaagaagaaatataagagccaccatggcccctaagaagaagcgtaaagtgagccggatggaacgcctcgtctacgaggtgcggcagaagtgcagaaacatcgaggacatctgcatctcctgcggatctctgaacgtgaccctggagcacccactgttcatcggcggcatgtgccagaactgtaaaaactgttttctggagtgtgcctatcaatacgacgatgacggctaccagagctactgcaccatctgttgcggcggaagagaggtgctgatgtgtggaaataacaactgctgccggtgcttctgcgtggaatgcgtggacctgctggtgggccccggcgccgcccaggccgctattaaggaagatccttggaactgctacatgtgcggccacaagggcacatacggcctgctgagacggagagaggactggcctagcagactgcagatgttcttcgccaataaccacgaccaggagttcgacccccctaaggtgtaccctcccgtccccgccgagaagagaaagcccatccgggtcctgagcctgttcgatggcatcgccaccggtctgctggtgctgaaggacctgggcatccaggtggataggtacattgcctccgaggtgtgcgaggactccatcaccgtgggaatggtgcgtcatcagggcaagatcatgtacgtgggcgacgtgcggagcgtgacacagaagcatatccaggagtggggccctttcgacctggtgatcggcggcagcccttgcaatgacctgagcatcgtgaacccagcccggaagggcctgtacgagggaaccggcagactgttcttcgagttttacagactgctgcacgacgcccggcctaaggaaggcgacgaccggcccttcttttggctgttcgagaatgtggtggccatgggagtcagcgacaagcgggatattagccggttcctggagagcaaccccgtgatgatcgatgccaaggaagtgagcgccgcccaccgggccagatacttctggggcaatctgcctggcatgaacagacccctggccagcaccgtgaacgacaagctggagctgcaggagtgcctggagcacggccggatcgccaagttcagcaaggtgagaaccatcaccacccgaagcaacagcatcaaacaaggcaaggaccagcactttcctgtgttcatgaacgagaaggaggacatcctgtggtgtaccgagatggagagagtgttcgggttcccagtccactacacagatgtcagcaacatgtctagactggccagacagagactgctgggaagaagctggtccgtccctgtgatcagacacctgttcgcccctctgaaggagtacttcgcctgcgtgagcagcggcaacagcaacgccaacagccggggccccagcttctctagcggcctggtgccactgtccctgagagggagccacatgggccccatggagatctacaaaaccgtgagcgcctggaagcggcagcctgtgcgcgtgctgagcctgtttcggaatatcgataaagtcctgaaaagcctgggattcctggagagcggctctggctccggcggtggcaccctgaagtacgtggaggatgtgacaaacgtggtcagacgggatgtggagaagtggggccccttcgatctggtgtacggcagcacccaacccctgggcagctcttgtgaccggtgccctggctggtacatgtttcagttccaccggatcctgcagtacgccctgccgagacaggagtcccagcggccattcttttggattttcatggacaacttgctgctgaccgaggatgaccaggaaactaccactcggttcctgcagaccgaagccgtgaccctgcaggacgtgagaggccgggactaccagaacgccatgcgggtgtggtccaacatccctggactgaaaagcaagcacgcacctctgacccctaaagaagaggagtacctgcaggcccaggtgcggagcagaagcaagctggacgcccctaaggtggatctgctggtgaagaattgcctcctgcccctgagagagtacttcaagtatttcagccagaatagtctgcccctgggcggcccaagcagcggcgcccctcctcccagcggcggcagcccagccggctccccaacctctaccgaggagggcacctctgagtccgccacccccgagagcggccctggcacctccaccgagcccagcgagggcagcgcacccggcagccctgccggcagccccacctccacagaggagggaaccagcaccgagcccagcgaaggcagcgccccaggcaccagcaccgagcctagtgagggcggctctggcggcggcagcgcccaggagattaaacggatcaacaagatcagaagaagacttgtgaaagacagcaacaccaagaaggccggcaagacaggccccatgaaaaccctgctggttagagtgatgacacccgatctgagagagcggctggaaaacctgagaaagaagcctgaaaatatcccccagcccatcagcaatacatctagagccaacctgaataagctgctgaccgattacaccgaaatgaagaaggcgatcctgcatgtgtactgggaagagttccagaaggaccctgtgggcctgatgagccgggtggcccagcctgccagcaagaagatcgatcagaacaagctgaaacctgagatggacgagaagggcaacctgaccaccgccggctttgcctgctctcagtgtggccagcccctgttcgtgtacaagctggagcaggtgtctgagaagggcaaggcttacaccaactacttcggacggtgcaatgtggccgagcacgaaaagctgatcctgctggcccagctgaagcccgagaaggatagcgacgaagccgtgacatatagcctgggaaagtttgggcagagggccctggatttctacagcattcatgtgaccaaggagtccacccaccccgtgaagcccctggcccagatcgccggaaacagatacgcctccggacctgtgggaaaggccctgagcgacgcatgtatgggcacaatcgcctccttcctgtctaagtaccaggacatcatcatcgaacaccagaaggtggtgaagggcaaccagaagagactggagagcctgcgggagctggccggcaaggaaaacctggaataccctagcgtgaccctgccacctcagcctcacaccaaggagggcgttgatgcctacaacgaagtgatcgcccgggtgcgaatgtgggtgaacctgaacctgtggcagaagctgaagctaagcagagatgatgccaagcctctgctgagactgaagggattcccttcctttcctctggtcgagagacaggccaacgaagtggactggtgggacatggtgtgtaacgtgaagaagctgatcaacgagaaaaaggaggatggcaaggtgttttggcagaatctggctggctacaagagacaggaagccctgagaccatacctgagcagcgaggaagatcggaagaagggaaagaaattcgctcggtaccagctgggcgacctgctgctgcacctggaaaagaagcacggcgaggactggggaaaggtgtacgacgaggcctgggagcggattgacaagaaagtggaaggcctgagcaagcacatcaagctggaagaggaacggagaagcgaggacgcccagagcaaggccgccctgaccgactggctgcgggctaaggccagcttcgtgatcgagggcctgaaggaggccgacaaggacgagttctgcagatgcgagctgaagctgcagaagtggtacggggacctgcggggaaagcccttcgccatcgaagccgagaacagcatcctggacatcagcggcttcagcaagcagtacaactgtgccttcatctggcagaaggacggcgtgaagaagctgaacctgtacctgatcatcaactacttcaagggcggcaagctgcggttcaagaagatcaaacctgaagccttcgaagccaacagattctacaccgtgatcaacaaaaagagcggcgagatcgtgcccatggaggtgaacttcaacttcgacgaccccaacctgatcatcctgcctctggcctttggcaagagacagggcagagaattcatctggaacgacctgctgtccctggaaaccggcagcctgaagctggccaacggaagagtgatcgagaagacactgtacaacagaagaacccggcaggatgagcctgccctgttcgtggccctgaccttcgagcggcgggaggtcctggactcctccaatatcaaaccaatgaacctgatcggcgtggcaagaggcgaaaacatccccgccgtgatcgccctgaccgaccccgagggctgcccactgagccggtttaaggatagcctgggaaacccaacccacatcctgagaatcggcgagagctataaggagaagcagcggaccatccaggccaagaaggaggtggagcagcggagagccggcggctacagccggaagtacgccagcaaagccaagaatctggcagacgatatggtgagaaacaccgctagagatctgctgtactacgccgtgacccaggatgccatgctgatcttcgccaacctgagccggggcttcggccggcagggcaagcggaccttcatggccgagagacagtacacacggatggaggactggctgaccgccaagctggcctacgagggcctgagcaagacctacctgtccaagacactggcccagtacacctccaagacatgcagcaactgtgggtttaccatcaccagcgccgactacgacagggtgctggagaagctgaagaagacagcaacaggctggatgaccacaattaacggcaaggagctgaaggtggagggccagattacctactacaacagatacaagagacagaacgtagtcaaggacctgtccgtcgagctggatagactgagcgaagaatctgtgaacaacgacatctcctcctggacaaagggcagaagcggagaagctctgagcctcctgaagaaaagattctcccatagacccgtgcaggagaagttcgtgtgcctgaactgcggcttcgagacacacgcagccgagcaagccgccctgaacatcgccagatcctggctgttcctgcggagccaggagtacaagaaataccagacaaacaagacaaccggcaacaccgataagagagccttcgtcgagacctggcagtccttttaccggaagaagcttaaggaggtgtggaaacctgccgtgcggtctggcggatctggcggaggctccacaagcgtcgccttccgggacgtgatcgtggacttcacccaggaggaatggcagcagctgaagcctgctcaaaaggacctgtacagagatgtgatgatggaaatctactggaatctggtgtctctggacctggaaaccgagggagatatgaacgagcctgaccccgagaaagacagctgggaggatagaacaagcatcgtggttgtggaaggcctgatgcggaacggcgcccagggctacgcctgcgagaaggccggcatccagggctgtagagtgaccagccccaagaaaaagagaaaagtctaagctgccttctgcggggcttgccttctggccatgcccttcttctctcccttgcacctgtacctcttggtctttgaataaagcctgagtaggaaggctagcaaaaaaaaaaaaaaaaaaaaaaaaaaaaaaaaaaaaaaaaaaaaaaaaaaaaaaaaaaaaaaaaaaaaaaaaaaaaaaaa

SEQ ID NO: 2424 - RNA, 5806 nt, synthetic construct
  source 1..5806: mol_type = other RNA
aggaaataagagagaaaagaagagtaagaagaaatataagagccaccatggcccctaagaagaagcgtaaagtgagccggatggaacgcctcgtctacgaggtgcggcagaagtgcagaaacatcgaggacatctgcatctcctgcggatctctgaacgtgaccctggagcacccactgttcatcggcggcatgtgccagaactgtaaaaactgttttctggagtgtgcctatcaatacgacgatgacggctaccagagctactgcaccatctgttgcggcggaagagaggtgctgatgtgtggaaataacaactgctgccggtgcttctgcgtggaatgcgtggacctgctggtgggccccggcgccgcccaggccgctattaaggaagatccttggaactgctacatgtgcggccacaagggcacatacggcctgctgagacggagagaggactggcctagcagactgcagatgttcttcgccaataaccacgaccaggagttcgacccccctaaggtgtaccctcccgtccccgccgagaagagaaagcccatccgggtcctgagcctgttcgatggcatcgccaccggtctgctggtgctgaaggacctgggcatccaggtggataggtacattgcctccgaggtgtgcgaggactccatcaccgtgggaatggtgcgtcatcagggcaagatcatgtacgtgggcgacgtgcggagcgtgacacagaagcatatccaggagtggggccctttcgacctggtgatcggcggcagcccttgcaatgacctgagcatcgtgaacccagcccggaagggcctgtacgagggaaccggcagactgttcttcgagttttacagactgctgcacgacgcccggcctaaggaaggcgacgaccggcccttcttttggctgttcgagaatgtggtggccatgggagtcagcgacaagcgggatattagccggttcctggagagcaaccccgtgatgatcgatgccaaggaagtgagcgccgcccaccgggccagatacttctggggcaatctgcctggcatgaacagacccctggccagcaccgtgaacgacaagctggagctgcaggagtgcctggagcacggccggatcgccaagttcagcaaggtgagaaccatcaccacccgaagcaacagcatcaaacaaggcaaggaccagcactttcctgtgttcatgaacgagaaggaggacatcctgtggtgtaccgagatggagagagtgttcgggttcccagtccactacacagatgtcagcaacatgtctagactggccagacagagactgctgggaagaagctggtccgtccctgtgatcagacacctgttcgcccctctgaaggagtacttcgcctgcgtgagcagcggcaacagcaacgccaacagccggggccccagcttctctagcggcctggtgccactgtccctgagagggagccacatgggccccatggagatctacaaaaccgtgagcgcctggaagcggcagcctgtgcgcgtgctgagcctgtttcggaatatcgataaagtcctgaaaagcctgggattcctggagagcggctctggctccggcggtggcaccctgaagtacgtggaggatgtgacaaacgtggtcagacgggatgtggagaagtggggccccttcgatctggtgtacggcagcacccaacccctgggcagctcttgtgaccggtgccctggctggtacatgtttcagttccaccggatcctgcagtacgccctgccgagacaggagtcccagcggccattcttttggattttcatggacaacttgctgctgaccgaggatgaccaggaaactaccactcggttcctgcagaccgaagccgtgaccctgcaggacgtgagaggccgggactaccagaacgccatgcgggtgtggtccaacatccctggactgaaaagcaagcacgcacctctgacccctaaagaagaggagtacctgcaggcccaggtgcggagcagaagcaagctggacgcccctaaggtggatctgctggtgaagaattgcctcctgcccctgagagagtacttcaagtatttcagccagaatagtctgcccctgggcggcccaagcagcggcgcccctcctcccagcggcggcagcccagccggctccccaacctctaccgaggagggcacctctgagtccgccacccccgagagcggccctggcacctccaccgagcccagcgagggcagcgcacccggcagccctgccggcagccccacctccacagaggagggaaccagcaccgagcccagcgaaggcagcgccccaggcaccagcaccgagcctagtgagggcggctctggcggcggcagcgcccaggagattaaacggatcaacaagatcagaagaagacttgtgaaagacagcaacaccaagaaggccggcaagacaggccccatgaaaaccctgctggttagagtgatgacacccgatctgagagagcggctggaaaacctgagaaagaagcctgaaaatatcccccagcccatcagcaatacatctagagccaacctgaataagctgctgaccgattacaccgaaatgaagaaggcgatcctgcatgtgtactgggaagagttccagaaggaccctgtgggcctgatgagccgggtggcccagcctgccagcaagaagatcgatcagaacaagctgaaacctgagatggacgagaagggcaacctgaccaccgccggctttgcctgctctcagtgtggccagcccctgttcgtgtacaagctggagcaggtgtctgagaagggcaaggcttacaccaactacttcggacggtgcaatgtggccgagcacgaaaagctgatcctgctggcccagctgaagcccgagaaggatagcgacgaagccgtgacatatagcctgggaaagtttgggcagagggccctggatttctacagcattcatgtgaccaaggagtccacccaccccgtgaagcccctggcccagatcgccggaaacagatacgcctccggacctgtgggaaaggccctgagcgacgcatgtatgggcacaatcgcctccttcctgtctaagtaccaggacatcatcatcgaacaccagaaggtggtgaagggcaaccagaagagactggagagcctgcgggagctggccggcaaggaaaacctggaataccctagcgtgaccctgccacctcagcctcacaccaaggagggcgttgatgcctacaacgaagtgatcgcccgggtgcgaatgtgggtgaacctgaacctgtggcagaagctgaagctaagcagagatgatgccaagcctctgctgagactgaagggattcccttcctttcctctggtcgagagacaggccaacgaagtggactggtgggacatggtgtgtaacgtgaagaagctgatcaacgagaaaaaggaggatggcaaggtgttttggcagaatctggctggctacaagagacaggaagccctgagaccatacctgagcagcgaggaagatcggaagaagggaaagaaattcgctcggtaccagctgggcgacctgctgctgcacctggaaaagaagcacggcgaggactggggaaaggtgtacgacgaggcctgggagcggattgacaagaaagtggaaggcctgagcaagcacatcaagctggaagaggaacggagaagcgaggacgcccagagcaaggccgccctgaccgactggctgcgggctaaggccagcttcgtgatcgagggcctgaaggaggccgacaaggacgagttctgcagatgcgagctgaagctgcagaagtggtacggggacctgcggggaaagcccttcgccatcgaagccgagaacagcatcctggacatcagcggcttcagcaagcagtacaactgtgccttcatctggcagaaggacggcgtgaagaagctgaacctgtacctgatcatcaactacttcaagggcggcaagctgcggttcaagaagatcaaacctgaagccttcgaagccaacagattctacaccgtgatcaacaaaaagagcggcgagatcgtgcccatggaggtgaacttcaacttcgacgaccccaacctgatcatcctgcctctggcctttggcaagagacagggcagagaattcatctggaacgacctgctgtccctggaaaccggcagcctgaagctggccaacggaagagtgatcgagaagacactgtacaacagaagaacccggcaggatgagcctgccctgttcgtggccctgaccttcgagcggcgggaggtcctggactcctccaatatcaaaccaatgaacctgatcggcgtggcaagaggcgaaaacatccccgccgtgatcgccctgaccgaccccgagggctgcccactgagccggtttaaggatagcctgggaaacccaacccacatcctgagaatcggcgagagctataaggagaagcagcggaccatccaggccaagaaggaggtggagcagcggagagccggcggctacagccggaagtacgccagcaaagccaagaatctggcagacgatatggtgagaaacaccgctagagatctgctgtactacgccgtgacccaggatgccatgctgatcttcgccaacctgagccggggcttcggccggcagggcaagcggaccttcatggccgagagacagtacacacggatggaggactggctgaccgccaagctggcctacgagggcctgagcaagacctacctgtccaagacactggcccagtacacctccaagacatgcagcaactgtgggtttaccatcaccagcgccgactacgacagggtgctggagaagctgaagaagacagcaacaggctggatgaccacaattaacggcaaggagctgaaggtggagggccagattacctactacaacagatacaagagacagaacgtagtcaaggacctgtccgtcgagctggatagactgagcgaagaatctgtgaacaacgacatctcctcctggacaaagggcagaagcggagaagctctgagcctcctgaagaaaagattctcccatagacccgtgcaggagaagttcgtgtgcctgaactgcggcttcgagacacacgcagccgagcaagccgccctgaacatcgccagatcctggctgttcctgcggagccaggagtacaagaaataccagacaaacaagacaaccggcaacaccgataagagagccttcgtcgagacctggcagtccttttaccggaagaagcttaaggaggtgtggaaacctgccgtgcggtctggcggatctggcggaggctccacaagcgtgacctacaacgacgtgcacgtggacatcacccaggaggaatgggctctgatggaccccagccagcggaacctgtacaaggatgtgatggtcgagacatacatgaacctgaccgccatcggatataattgggagaacctggaagtggaagaaccatgtcagaaccccctgaagcacggcagacacgagagacctcatacaggcgagaaaccttacgagtacaatcagtgcggcaaggccttcgcccaacctaccagccccaagaaaaagagaaaagtctaagctgccttctgcggggcttgccttctggccatgcccttcttctctcccttgcacctgtacctcttggtctttgaataaagcctgagtaggaaggctagcaaaaaaaaaaaaaaaaaaaaaaaaaaaaaaaaaaaaaaaaaaaaaaaaaaaaaaaaaaaaaaaaaaaaaaaaaaaaaaaa

SEQ ID NO: 2425 - RNA, 5797 nt, synthetic construct
  source 1..5797: mol_type = other RNA
aggaaataagagagaaaagaagagtaagaagaaatataagagccaccatggcccctaagaagaagcgtaaagtgagccggatggaacgcctcgtctacgaggtgcggcagaagtgcagaaacatcgaggacatctgcatctcctgcggatctctgaacgtgaccctggagcacccactgttcatcggcggcatgtgccagaactgtaaaaactgttttctggagtgtgcctatcaatacgacgatgacggctaccagagctactgcaccatctgttgcggcggaagagaggtgctgatgtgtggaaataacaactgctgccggtgcttctgcgtggaatgcgtggacctgctggtgggccccggcgccgcccaggccgctattaaggaagatccttggaactgctacatgtgcggccacaagggcacatacggcctgctgagacggagagaggactggcctagcagactgcagatgttcttcgccaataaccacgaccaggagttcgacccccctaaggtgtaccctcccgtccccgccgagaagagaaagcccatccgggtcctgagcctgttcgatggcatcgccaccggtctgctggtgctgaaggacctgggcatccaggtggataggtacattgcctccgaggtgtgcgaggactccatcaccgtgggaatggtgcgtcatcagggcaagatcatgtacgtgggcgacgtgcggagcgtgacacagaagcatatccaggagtggggccctttcgacctggtgatcggcggcagcccttgcaatgacctgagcatcgtgaacccagcccggaagggcctgtacgagggaaccggcagactgttcttcgagttttacagactgctgcacgacgcccggcctaaggaaggcgacgaccggcccttcttttggctgttcgagaatgtggtggccatgggagtcagcgacaagcgggatattagccggttcctggagagcaaccccgtgatgatcgatgccaaggaagtgagcgccgcccaccgggccagatacttctggggcaatctgcctggcatgaacagacccctggccagcaccgtgaacgacaagctggagctgcaggagtgcctggagcacggccggatcgccaagttcagcaaggtgagaaccatcaccacccgaagcaacagcatcaaacaaggcaaggaccagcactttcctgtgttcatgaacgagaaggaggacatcctgtggtgtaccgagatggagagagtgttcgggttcccagtccactacacagatgtcagcaacatgtctagactggccagacagagactgctgggaagaagctggtccgtccctgtgatcagacacctgttcgcccctctgaaggagtacttcgcctgcgtgagcagcggcaacagcaacgccaacagccggggccccagcttctctagcggcctggtgccactgtccctgagagggagccacatgggccccatggagatctacaaaaccgtgagcgcctggaagcggcagcctgtgcgcgtgctgagcctgtttcggaatatcgataaagtcctgaaaagcctgggattcctggagagcggctctggctccggcggtggcaccctgaagtacgtggaggatgtgacaaacgtggtcagacgggatgtggagaagtggggccccttcgatctggtgtacggcagcacccaacccctgggcagctcttgtgaccggtgccctggctggtacatgtttcagttccaccggatcctgcagtacgccctgccgagacaggagtcccagcggccattcttttggattttcatggacaacttgctgctgaccgaggatgaccaggaaactaccactcggttcctgcagaccgaagccgtgaccctgcaggacgtgagaggccgggactaccagaacgccatgcgggtgtggtccaacatccctggactgaaaagcaagcacgcacctctgacccctaaagaagaggagtacctgcaggcccaggtgcggagcagaagcaagctggacgcccctaaggtggatctgctggtgaagaattgcctcctgcccctgagagagtacttcaagtatttcagccagaatagtctgcccctgggcggcccaagcagcggcgcccctcctcccagcggcggcagcccagccggctccccaacctctaccgaggagggcacctctgagtccgccacccccgagagcggccctggcacctccaccgagcccagcgagggcagcgcacccggcagccctgccggcagccccacctccacagaggagggaaccagcaccgagcccagcgaaggcagcgccccaggcaccagcaccgagcctagtgagggcggctctggcggcggcagcgcccaggagattaaacggatcaacaagatcagaagaagacttgtgaaagacagcaacaccaagaaggccggcaagacaggccccatgaaaaccctgctggttagagtgatgacacccgatctgagagagcggctggaaaacctgagaaagaagcctgaaaatatcccccagcccatcagcaatacatctagagccaacctgaataagctgctgaccgattacaccgaaatgaagaaggcgatcctgcatgtgtactgggaagagttccagaaggaccctgtgggcctgatgagccgggtggcccagcctgccagcaagaagatcgatcagaacaagctgaaacctgagatggacgagaagggcaacctgaccaccgccggctttgcctgctctcagtgtggccagcccctgttcgtgtacaagctggagcaggtgtctgagaagggcaaggcttacaccaactacttcggacggtgcaatgtggccgagcacgaaaagctgatcctgctggcccagctgaagcccgagaaggatagcgacgaagccgtgacatatagcctgggaaagtttgggcagagggccctggatttctacagcattcatgtgaccaaggagtccacccaccccgtgaagcccctggcccagatcgccggaaacagatacgcctccggacctgtgggaaaggccctgagcgacgcatgtatgggcacaatcgcctccttcctgtctaagtaccaggacatcatcatcgaacaccagaaggtggtgaagggcaaccagaagagactggagagcctgcgggagctggccggcaaggaaaacctggaataccctagcgtgaccctgccacctcagcctcacaccaaggagggcgttgatgcctacaacgaagtgatcgcccgggtgcgaatgtgggtgaacctgaacctgtggcagaagctgaagctaagcagagatgatgccaagcctctgctgagactgaagggattcccttcctttcctctggtcgagagacaggccaacgaagtggactggtgggacatggtgtgtaacgtgaagaagctgatcaacgagaaaaaggaggatggcaaggtgttttggcagaatctggctggctacaagagacaggaagccctgagaccatacctgagcagcgaggaagatcggaagaagggaaagaaattcgctcggtaccagctgggcgacctgctgctgcacctggaaaagaagcacggcgaggactggggaaaggtgtacgacgaggcctgggagcggattgacaagaaagtggaaggcctgagcaagcacatcaagctggaagaggaacggagaagcgaggacgcccagagcaaggccgccctgaccgactggctgcgggctaaggccagcttcgtgatcgagggcctgaaggaggccgacaaggacgagttctgcagatgcgagctgaagctgcagaagtggtacggggacctgcggggaaagcccttcgccatcgaagccgagaacagcatcctggacatcagcggcttcagcaagcagtacaactgtgccttcatctggcagaaggacggcgtgaagaagctgaacctgtacctgatcatcaactacttcaagggcggcaagctgcggttcaagaagatcaaacctgaagccttcgaagccaacagattctacaccgtgatcaacaaaaagagcggcgagatcgtgcccatggaggtgaacttcaacttcgacgaccccaacctgatcatcctgcctctggcctttggcaagagacagggcagagaattcatctggaacgacctgctgtccctggaaaccggcagcctgaagctggccaacggaagagtgatcgagaagacactgtacaacagaagaacccggcaggatgagcctgccctgttcgtggccctgaccttcgagcggcgggaggtcctggactcctccaatatcaaaccaatgaacctgatcggcgtggcaagaggcgaaaacatccccgccgtgatcgccctgaccgaccccgagggctgcccactgagccggtttaaggatagcctgggaaacccaacccacatcctgagaatcggcgagagctataaggagaagcagcggaccatccaggccaagaaggaggtggagcagcggagagccggcggctacagccggaagtacgccagcaaagccaagaatctggcagacgatatggtgagaaacaccgctagagatctgctgtactacgccgtgacccaggatgccatgctgatcttcgccaacctgagccggggcttcggccggcagggcaagcggaccttcatggccgagagacagtacacacggatggaggactggctgaccgccaagctggcctacgagggcctgagcaagacctacctgtccaagacactggcccagtacacctccaagacatgcagcaactgtgggtttaccatcaccagcgccgactacgacagggtgctggagaagctgaagaagacagcaacaggctggatgaccacaattaacggcaaggagctgaaggtggagggccagattacctactacaacagatacaagagacagaacgtagtcaaggacctgtccgtcgagctggatagactgagcgaagaatctgtgaacaacgacatctcctcctggacaaagggcagaagcggagaagctctgagcctcctgaagaaaagattctcccatagacccgtgcaggagaagttcgtgtgcctgaactgcggcttcgagacacacgcagccgagcaagccgccctgaacatcgccagatcctggctgttcctgcggagccaggagtacaagaaataccagacaaacaagacaaccggcaacaccgataagagagccttcgtcgagacctggcagtccttttaccggaagaagcttaaggaggtgtggaaacctgccgtgcggtctggcggatctggcggaggctccacaagctctcaggagagcgtggccttcgaggacgtggccgtctacttcaccaccaaagagtgggccatcatggtgcccgccgagagagccctgtacagagatgtgatgctggaaaactacgaggccgtggcttttgtggccgtgcctcctacaagcaagcccgctctggtgtcccacctggaacagggcaaggaaagctgcttcatccggcctccaggcgtgctgagcagaagcgactggcgggccggaaccagccccaagaaaaagagaaaagtctaagctgccttctgcggggcttgccttctggccatgcccttcttctctcccttgcacctgtacctcttggtctttgaataaagcctgagtaggaaggctagcaaaaaaaaaaaaaaaaaaaaaaaaaaaaaaaaaaaaaaaaaaaaaaaaaaaaaaaaaaaaaaaaaaaaaaaaaaaaaaaa

SEQ ID NO: 2426 - RNA, 5797 nt, synthetic construct
  source 1..5797: mol_type = other RNA
aggaaataagagagaaaagaagagtaagaagaaatataagagccaccatggcccctaagaagaagcgtaaagtgagccggatggaacgcctcgtctacgaggtgcggcagaagtgcagaaacatcgaggacatctgcatctcctgcggatctctgaacgtgaccctggagcacccactgttcatcggcggcatgtgccagaactgtaaaaactgttttctggagtgtgcctatcaatacgacgatgacggctaccagagctactgcaccatctgttgcggcggaagagaggtgctgatgtgtggaaataacaactgctgccggtgcttctgcgtggaatgcgtggacctgctggtgggccccggcgccgcccaggccgctattaaggaagatccttggaactgctacatgtgcggccacaagggcacatacggcctgctgagacggagagaggactggcctagcagactgcagatgttcttcgccaataaccacgaccaggagttcgacccccctaaggtgtaccctcccgtccccgccgagaagagaaagcccatccgggtcctgagcctgttcgatggcatcgccaccggtctgctggtgctgaaggacctgggcatccaggtggataggtacattgcctccgaggtgtgcgaggactccatcaccgtgggaatggtgcgtcatcagggcaagatcatgtacgtgggcgacgtgcggagcgtgacacagaagcatatccaggagtggggccctttcgacctggtgatcggcggcagcccttgcaatgacctgagcatcgtgaacccagcccggaagggcctgtacgagggaaccggcagactgttcttcgagttttacagactgctgcacgacgcccggcctaaggaaggcgacgaccggcccttcttttggctgttcgagaatgtggtggccatgggagtcagcgacaagcgggatattagccggttcctggagagcaaccccgtgatgatcgatgccaaggaagtgagcgccgcccaccgggccagatacttctggggcaatctgcctggcatgaacagacccctggccagcaccgtgaacgacaagctggagctgcaggagtgcctggagcacggccggatcgccaagttcagcaaggtgagaaccatcaccacccgaagcaacagcatcaaacaaggcaaggaccagcactttcctgtgttcatgaacgagaaggaggacatcctgtggtgtaccgagatggagagagtgttcgggttcccagtccactacacagatgtcagcaacatgtctagactggccagacagagactgctgggaagaagctggtccgtccctgtgatcagacacctgttcgcccctctgaaggagtacttcgcctgcgtgagcagcggcaacagcaacgccaacagccggggccccagcttctctagcggcctggtgccactgtccctgagagggagccacatgggccccatggagatctacaaaaccgtgagcgcctggaagcggcagcctgtgcgcgtgctgagcctgtttcggaatatcgataaagtcctgaaaagcctgggattcctggagagcggctctggctccggcggtggcaccctgaagtacgtggaggatgtgacaaacgtggtcagacgggatgtggagaagtggggccccttcgatctggtgtacggcagcacccaacccctgggcagctcttgtgaccggtgccctggctggtacatgtttcagttccaccggatcctgcagtacgccctgccgagacaggagtcccagcggccattcttttggattttcatggacaacttgctgctgaccgaggatgaccaggaaactaccactcggttcctgcagaccgaagccgtgaccctgcaggacgtgagaggccgggactaccagaacgccatgcgggtgtggtccaacatccctggactgaaaagcaagcacgcacctctgacccctaaagaagaggagtacctgcaggcccaggtgcggagcagaagcaagctggacgcccctaaggtggatctgctggtgaagaattgcctcctgcccctgagagagtacttcaagtatttcagccagaatagtctgcccctgggcggcccaagcagcggcgcccctcctcccagcggcggcagcccagccggctccccaacctctaccgaggagggcacctctgagtccgccacccccgagagcggccctggcacctccaccgagcccagcgagggcagcgcacccggcagccctgccggcagccccacctccacagaggagggaaccagcaccgagcccagcgaaggcagcgccccaggcaccagcaccgagcctagtgagggcggctctggcggcggcagcgcccaggagattaaacggatcaacaagatcagaagaagacttgtgaaagacagcaacaccaagaaggccggcaagacaggccccatgaaaaccctgctggttagagtgatgacacccgatctgagagagcggctggaaaacctgagaaagaagcctgaaaatatcccccagcccatcagcaatacatctagagccaacctgaataagctgctgaccgattacaccgaaatgaagaaggcgatcctgcatgtgtactgggaagagttccagaaggaccctgtgggcctgatgagccgggtggcccagcctgccagcaagaagatcgatcagaacaagctgaaacctgagatggacgagaagggcaacctgaccaccgccggctttgcctgctctcagtgtggccagcccctgttcgtgtacaagctggagcaggtgtctgagaagggcaaggcttacaccaactacttcggacggtgcaatgtggccgagcacgaaaagctgatcctgctggcccagctgaagcccgagaaggatagcgacgaagccgtgacatatagcctgggaaagtttgggcagagggccctggatttctacagcattcatgtgaccaaggagtccacccaccccgtgaagcccctggcccagatcgccggaaacagatacgcctccggacctgtgggaaaggccctgagcgacgcatgtatgggcacaatcgcctccttcctgtctaagtaccaggacatcatcatcgaacaccagaaggtggtgaagggcaaccagaagagactggagagcctgcgggagctggccggcaaggaaaacctggaataccctagcgtgaccctgccacctcagcctcacaccaaggagggcgttgatgcctacaacgaagtgatcgcccgggtgcgaatgtgggtgaacctgaacctgtggcagaagctgaagctaagcagagatgatgccaagcctctgctgagactgaagggattcccttcctttcctctggtcgagagacaggccaacgaagtggactggtgggacatggtgtgtaacgtgaagaagctgatcaacgagaaaaaggaggatggcaaggtgttttggcagaatctggctggctacaagagacaggaagccctgagaccatacctgagcagcgaggaagatcggaagaagggaaagaaattcgctcggtaccagctgggcgacctgctgctgcacctggaaaagaagcacggcgaggactggggaaaggtgtacgacgaggcctgggagcggattgacaagaaagtggaaggcctgagcaagcacatcaagctggaagaggaacggagaagcgaggacgcccagagcaaggccgccctgaccgactggctgcgggctaaggccagcttcgtgatcgagggcctgaaggaggccgacaaggacgagttctgcagatgcgagctgaagctgcagaagtggtacggggacctgcggggaaagcccttcgccatcgaagccgagaacagcatcctggacatcagcggcttcagcaagcagtacaactgtgccttcatctggcagaaggacggcgtgaagaagctgaacctgtacctgatcatcaactacttcaagggcggcaagctgcggttcaagaagatcaaacctgaagccttcgaagccaacagattctacaccgtgatcaacaaaaagagcggcgagatcgtgcccatggaggtgaacttcaacttcgacgaccccaacctgatcatcctgcctctggcctttggcaagagacagggcagagaattcatctggaacgacctgctgtccctggaaaccggcagcctgaagctggccaacggaagagtgatcgagaagacactgtacaacagaagaacccggcaggatgagcctgccctgttcgtggccctgaccttcgagcggcgggaggtcctggactcctccaatatcaaaccaatgaacctgatcggcgtggcaagaggcgaaaacatccccgccgtgatcgccctgaccgaccccgagggctgcccactgagccggtttaaggatagcctgggaaacccaacccacatcctgagaatcggcgagagctataaggagaagcagcggaccatccaggccaagaaggaggtggagcagcggagagccggcggctacagccggaagtacgccagcaaagccaagaatctggcagacgatatggtgagaaacaccgctagagatctgctgtactacgccgtgacccaggatgccatgctgatcttcgccaacctgagccggggcttcggccggcagggcaagcggaccttcatggccgagagacagtacacacggatggaggactggctgaccgccaagctggcctacgagggcctgagcaagacctacctgtccaagacactggcccagtacacctccaagacatgcagcaactgtgggtttaccatcaccagcgccgactacgacagggtgctggagaagctgaagaagacagcaacaggctggatgaccacaattaacggcaaggagctgaaggtggagggccagattacctactacaacagatacaagagacagaacgtagtcaaggacctgtccgtcgagctggatagactgagcgaagaatctgtgaacaacgacatctcctcctggacaaagggcagaagcggagaagctctgagcctcctgaagaaaagattctcccatagacccgtgcaggagaagttcgtgtgcctgaactgcggcttcgagacacacgcagccgagcaagccgccctgaacatcgccagatcctggctgttcctgcggagccaggagtacaagaaataccagacaaacaagacaaccggcaacaccgataagagagccttcgtcgagacctggcagtccttttaccggaagaagcttaaggaggtgtggaaacctgccgtgcggtctggcggatctggcggaggctccacaagctctaaagcccctatcacattcggcgacctggccatctacttcagccaggaggaatgggagtggctgagccccatccagaaggacctgtacgaggacgtgatgctggaaaactacagaaatctggtgtccctgggcctcagctttagacgccccaacgtgatcaccctgctggaaaagggcaaggccccatggatggtcgagcctgctagacggcggagaggacctgatagcggcagcaaggtgaccagccccaagaaaaagagaaaagtctaagctgccttctgcggggcttgccttctggccatgcccttcttctctcccttgcacctgtacctcttggtctttgaataaagcctgagtaggaaggctagcaaaaaaaaaaaaaaaaaaaaaaaaaaaaaaaaaaaaaaaaaaaaaaaaaaaaaaaaaaaaaaaaaaaaaaaaaaaaaaaa

SEQ ID NO: 2427 - RNA, 5797 nt, synthetic construct
  source 1..5797: mol_type = other RNA
aggaaataagagagaaaagaagagtaagaagaaatataagagccaccatggcccctaagaagaagcgtaaagtgagccggatggaacgcctcgtctacgaggtgcggcagaagtgcagaaacatcgaggacatctgcatctcctgcggatctctgaacgtgaccctggagcacccactgttcatcggcggcatgtgccagaactgtaaaaactgttttctggagtgtgcctatcaatacgacgatgacggctaccagagctactgcaccatctgttgcggcggaagagaggtgctgatgtgtggaaataacaactgctgccggtgcttctgcgtggaatgcgtggacctgctggtgggccccggcgccgcccaggccgctattaaggaagatccttggaactgctacatgtgcggccacaagggcacatacggcctgctgagacggagagaggactggcctagcagactgcagatgttcttcgccaataaccacgaccaggagttcgacccccctaaggtgtaccctcccgtccccgccgagaagagaaagcccatccgggtcctgagcctgttcgatggcatcgccaccggtctgctggtgctgaaggacctgggcatccaggtggataggtacattgcctccgaggtgtgcgaggactccatcaccgtgggaatggtgcgtcatcagggcaagatcatgtacgtgggcgacgtgcggagcgtgacacagaagcatatccaggagtggggccctttcgacctggtgatcggcggcagcccttgcaatgacctgagcatcgtgaacccagcccggaagggcctgtacgagggaaccggcagactgttcttcgagttttacagactgctgcacgacgcccggcctaaggaaggcgacgaccggcccttcttttggctgttcgagaatgtggtggccatgggagtcagcgacaagcgggatattagccggttcctggagagcaaccccgtgatgatcgatgccaaggaagtgagcgccgcccaccgggccagatacttctggggcaatctgcctggcatgaacagacccctggccagcaccgtgaacgacaagctggagctgcaggagtgcctggagcacggccggatcgccaagttcagcaaggtgagaaccatcaccacccgaagcaacagcatcaaacaaggcaaggaccagcactttcctgtgttcatgaacgagaaggaggacatcctgtggtgtaccgagatggagagagtgttcgggttcccagtccactacacagatgtcagcaacatgtctagactggccagacagagactgctgggaagaagctggtccgtccctgtgatcagacacctgttcgcccctctgaaggagtacttcgcctgcgtgagcagcggcaacagcaacgccaacagccggggccccagcttctctagcggcctggtgccactgtccctgagagggagccacatgggccccatggagatctacaaaaccgtgagcgcctggaagcggcagcctgtgcgcgtgctgagcctgtttcggaatatcgataaagtcctgaaaagcctgggattcctggagagcggctctggctccggcggtggcaccctgaagtacgtggaggatgtgacaaacgtggtcagacgggatgtggagaagtggggccccttcgatctggtgtacggcagcacccaacccctgggcagctcttgtgaccggtgccctggctggtacatgtttcagttccaccggatcctgcagtacgccctgccgagacaggagtcccagcggccattcttttggattttcatggacaacttgctgctgaccgaggatgaccaggaaactaccactcggttcctgcagaccgaagccgtgaccctgcaggacgtgagaggccgggactaccagaacgccatgcgggtgtggtccaacatccctggactgaaaagcaagcacgcacctctgacccctaaagaagaggagtacctgcaggcccaggtgcggagcagaagcaagctggacgcccctaaggtggatctgctggtgaagaattgcctcctgcccctgagagagtacttcaagtatttcagccagaatagtctgcccctgggcggcccaagcagcggcgcccctcctcccagcggcggcagcccagccggctccccaacctctaccgaggagggcacctctgagtccgccacccccgagagcggccctggcacctccaccgagcccagcgagggcagcgcacccggcagccctgccggcagccccacctccacagaggagggaaccagcaccgagcccagcgaaggcagcgccccaggcaccagcaccgagcctagtgagggcggctctggcggcggcagcgcccaggagattaaacggatcaacaagatcagaagaagacttgtgaaagacagcaacaccaagaaggccggcaagacaggccccatgaaaaccctgctggttagagtgatgacacccgatctgagagagcggctggaaaacctgagaaagaagcctgaaaatatcccccagcccatcagcaatacatctagagccaacctgaataagctgctgaccgattacaccgaaatgaagaaggcgatcctgcatgtgtactgggaagagttccagaaggaccctgtgggcctgatgagccgggtggcccagcctgccagcaagaagatcgatcagaacaagctgaaacctgagatggacgagaagggcaacctgaccaccgccggctttgcctgctctcagtgtggccagcccctgttcgtgtacaagctggagcaggtgtctgagaagggcaaggcttacaccaactacttcggacggtgcaatgtggccgagcacgaaaagctgatcctgctggcccagctgaagcccgagaaggatagcgacgaagccgtgacatatagcctgggaaagtttgggcagagggccctggatttctacagcattcatgtgaccaaggagtccacccaccccgtgaagcccctggcccagatcgccggaaacagatacgcctccggacctgtgggaaaggccctgagcgacgcatgtatgggcacaatcgcctccttcctgtctaagtaccaggacatcatcatcgaacaccagaaggtggtgaagggcaaccagaagagactggagagcctgcgggagctggccggcaaggaaaacctggaataccctagcgtgaccctgccacctcagcctcacaccaaggagggcgttgatgcctacaacgaagtgatcgcccgggtgcgaatgtgggtgaacctgaacctgtggcagaagctgaagctaagcagagatgatgccaagcctctgctgagactgaagggattcccttcctttcctctggtcgagagacaggccaacgaagtggactggtgggacatggtgtgtaacgtgaagaagctgatcaacgagaaaaaggaggatggcaaggtgttttggcagaatctggctggctacaagagacaggaagccctgagaccatacctgagcagcgaggaagatcggaagaagggaaagaaattcgctcggtaccagctgggcgacctgctgctgcacctggaaaagaagcacggcgaggactggggaaaggtgtacgacgaggcctgggagcggattgacaagaaagtggaaggcctgagcaagcacatcaagctggaagaggaacggagaagcgaggacgcccagagcaaggccgccctgaccgactggctgcgggctaaggccagcttcgtgatcgagggcctgaaggaggccgacaaggacgagttctgcagatgcgagctgaagctgcagaagtggtacggggacctgcggggaaagcccttcgccatcgaagccgagaacagcatcctggacatcagcggcttcagcaagcagtacaactgtgccttcatctggcagaaggacggcgtgaagaagctgaacctgtacctgatcatcaactacttcaagggcggcaagctgcggttcaagaagatcaaacctgaagccttcgaagccaacagattctacaccgtgatcaacaaaaagagcggcgagatcgtgcccatggaggtgaacttcaacttcgacgaccccaacctgatcatcctgcctctggcctttggcaagagacagggcagagaattcatctggaacgacctgctgtccctggaaaccggcagcctgaagctggccaacggaagagtgatcgagaagacactgtacaacagaagaacccggcaggatgagcctgccctgttcgtggccctgaccttcgagcggcgggaggtcctggactcctccaatatcaaaccaatgaacctgatcggcgtggcaagaggcgaaaacatccccgccgtgatcgccctgaccgaccccgagggctgcccactgagccggtttaaggatagcctgggaaacccaacccacatcctgagaatcggcgagagctataaggagaagcagcggaccatccaggccaagaaggaggtggagcagcggagagccggcggctacagccggaagtacgccagcaaagccaagaatctggcagacgatatggtgagaaacaccgctagagatctgctgtactacgccgtgacccaggatgccatgctgatcttcgccaacctgagccggggcttcggccggcagggcaagcggaccttcatggccgagagacagtacacacggatggaggactggctgaccgccaagctggcctacgagggcctgagcaagacctacctgtccaagacactggcccagtacacctccaagacatgcagcaactgtgggtttaccatcaccagcgccgactacgacagggtgctggagaagctgaagaagacagcaacaggctggatgaccacaattaacggcaaggagctgaaggtggagggccagattacctactacaacagatacaagagacagaacgtagtcaaggacctgtccgtcgagctggatagactgagcgaagaatctgtgaacaacgacatctcctcctggacaaagggcagaagcggagaagctctgagcctcctgaagaaaagattctcccatagacccgtgcaggagaagttcgtgtgcctgaactgcggcttcgagacacacgcagccgagcaagccgccctgaacatcgccagatcctggctgttcctgcggagccaggagtacaagaaataccagacaaacaagacaaccggcaacaccgataagagagccttcgtcgagacctggcagtccttttaccggaagaagcttaaggaggtgtggaaacctgccgtgcggtctggcggatctggcggaggctccacaagcgagatgggcctgctgacattcagagacatcgctatcgagttcagcctggaggaatggcaatgtctggactgcgcccagagaaatctgtacagagatgtgatgctggaaaactaccggaacctggtgtctctgggcatcgccgtgtccaagcccgacctgatcacctgcctcgagcagaacaaggaaagccagaacatcaagcggaacaaaatggtcgccaagcaccctgtgatgcacagccacaccagccccaagaaaaagagaaaagtctaagctgccttctgcggggcttgccttctggccatgcccttcttctctcccttgcacctgtacctcttggtctttgaataaagcctgagtaggaaggctagcaaaaaaaaaaaaaaaaaaaaaaaaaaaaaaaaaaaaaaaaaaaaaaaaaaaaaaaaaaaaaaaaaaaaaaaaaaaaaaaa

SEQ ID NO: 2428 - RNA, 5797 nt, synthetic construct
  source 1..5797: mol_type = other RNA
aggaaataagagagaaaagaagagtaagaagaaatataagagccaccatggcccctaagaagaagcgtaaagtgagccggatggaacgcctcgtctacgaggtgcggcagaagtgcagaaacatcgaggacatctgcatctcctgcggatctctgaacgtgaccctggagcacccactgttcatcggcggcatgtgccagaactgtaaaaactgttttctggagtgtgcctatcaatacgacgatgacggctaccagagctactgcaccatctgttgcggcggaagagaggtgctgatgtgtggaaataacaactgctgccggtgcttctgcgtggaatgcgtggacctgctggtgggccccggcgccgcccaggccgctattaaggaagatccttggaactgctacatgtgcggccacaagggcacatacggcctgctgagacggagagaggactggcctagcagactgcagatgttcttcgccaataaccacgaccaggagttcgacccccctaaggtgtaccctcccgtccccgccgagaagagaaagcccatccgggtcctgagcctgttcgatggcatcgccaccggtctgctggtgctgaaggacctgggcatccaggtggataggtacattgcctccgaggtgtgcgaggactccatcaccgtgggaatggtgcgtcatcagggcaagatcatgtacgtgggcgacgtgcggagcgtgacacagaagcatatccaggagtggggccctttcgacctggtgatcggcggcagcccttgcaatgacctgagcatcgtgaacccagcccggaagggcctgtacgagggaaccggcagactgttcttcgagttttacagactgctgcacgacgcccggcctaaggaaggcgacgaccggcccttcttttggctgttcgagaatgtggtggccatgggagtcagcgacaagcgggatattagccggttcctggagagcaaccccgtgatgatcgatgccaaggaagtgagcgccgcccaccgggccagatacttctggggcaatctgcctggcatgaacagacccctggccagcaccgtgaacgacaagctggagctgcaggagtgcctggagcacggccggatcgccaagttcagcaaggtgagaaccatcaccacccgaagcaacagcatcaaacaaggcaaggaccagcactttcctgtgttcatgaacgagaaggaggacatcctgtggtgtaccgagatggagagagtgttcgggttcccagtccactacacagatgtcagcaacatgtctagactggccagacagagactgctgggaagaagctggtccgtccctgtgatcagacacctgttcgcccctctgaaggagtacttcgcctgcgtgagcagcggcaacagcaacgccaacagccggggccccagcttctctagcggcctggtgccactgtccctgagagggagccacatgggccccatggagatctacaaaaccgtgagcgcctggaagcggcagcctgtgcgcgtgctgagcctgtttcggaatatcgataaagtcctgaaaagcctgggattcctggagagcggctctggctccggcggtggcaccctgaagtacgtggaggatgtgacaaacgtggtcagacgggatgtggagaagtggggccccttcgatctggtgtacggcagcacccaacccctgggcagctcttgtgaccggtgccctggctggtacatgtttcagttccaccggatcctgcagtacgccctgccgagacaggagtcccagcggccattcttttggattttcatggacaacttgctgctgaccgaggatgaccaggaaactaccactcggttcctgcagaccgaagccgtgaccctgcaggacgtgagaggccgggactaccagaacgccatgcgggtgtggtccaacatccctggactgaaaagcaagcacgcacctctgacccctaaagaagaggagtacctgcaggcccaggtgcggagcagaagcaagctggacgcccctaaggtggatctgctggtgaagaattgcctcctgcccctgagagagtacttcaagtatttcagccagaatagtctgcccctgggcggcccaagcagcggcgcccctcctcccagcggcggcagcccagccggctccccaacctctaccgaggagggcacctctgagtccgccacccccgagagcggccctggcacctccaccgagcccagcgagggcagcgcacccggcagccctgccggcagccccacctccacagaggagggaaccagcaccgagcccagcgaaggcagcgccccaggcaccagcaccgagcctagtgagggcggctctggcggcggcagcgcccaggagattaaacggatcaacaagatcagaagaagacttgtgaaagacagcaacaccaagaaggccggcaagacaggccccatgaaaaccctgctggttagagtgatgacacccgatctgagagagcggctggaaaacctgagaaagaagcctgaaaatatcccccagcccatcagcaatacatctagagccaacctgaataagctgctgaccgattacaccgaaatgaagaaggcgatcctgcatgtgtactgggaagagttccagaaggaccctgtgggcctgatgagccgggtggcccagcctgccagcaagaagatcgatcagaacaagctgaaacctgagatggacgagaagggcaacctgaccaccgccggctttgcctgctctcagtgtggccagcccctgttcgtgtacaagctggagcaggtgtctgagaagggcaaggcttacaccaactacttcggacggtgcaatgtggccgagcacgaaaagctgatcctgctggcccagctgaagcccgagaaggatagcgacgaagccgtgacatatagcctgggaaagtttgggcagagggccctggatttctacagcattcatgtgaccaaggagtccacccaccccgtgaagcccctggcccagatcgccggaaacagatacgcctccggacctgtgggaaaggccctgagcgacgcatgtatgggcacaatcgcctccttcctgtctaagtaccaggacatcatcatcgaacaccagaaggtggtgaagggcaaccagaagagactggagagcctgcgggagctggccggcaaggaaaacctggaataccctagcgtgaccctgccacctcagcctcacaccaaggagggcgttgatgcctacaacgaagtgatcgcccgggtgcgaatgtgggtgaacctgaacctgtggcagaagctgaagctaagcagagatgatgccaagcctctgctgagactgaagggattcccttcctttcctctggtcgagagacaggccaacgaagtggactggtgggacatggtgtgtaacgtgaagaagctgatcaacgagaaaaaggaggatggcaaggtgttttggcagaatctggctggctacaagagacaggaagccctgagaccatacctgagcagcgaggaagatcggaagaagggaaagaaattcgctcggtaccagctgggcgacctgctgctgcacctggaaaagaagcacggcgaggactggggaaaggtgtacgacgaggcctgggagcggattgacaagaaagtggaaggcctgagcaagcacatcaagctggaagaggaacggagaagcgaggacgcccagagcaaggccgccctgaccgactggctgcgggctaaggccagcttcgtgatcgagggcctgaaggaggccgacaaggacgagttctgcagatgcgagctgaagctgcagaagtggtacggggacctgcggggaaagcccttcgccatcgaagccgagaacagcatcctggacatcagcggcttcagcaagcagtacaactgtgccttcatctggcagaaggacggcgtgaagaagctgaacctgtacctgatcatcaactacttcaagggcggcaagctgcggttcaagaagatcaaacctgaagccttcgaagccaacagattctacaccgtgatcaacaaaaagagcggcgagatcgtgcccatggaggtgaacttcaacttcgacgaccccaacctgatcatcctgcctctggcctttggcaagagacagggcagagaattcatctggaacgacctgctgtccctggaaaccggcagcctgaagctggccaacggaagagtgatcgagaagacactgtacaacagaagaacccggcaggatgagcctgccctgttcgtggccctgaccttcgagcggcgggaggtcctggactcctccaatatcaaaccaatgaacctgatcggcgtggcaagaggcgaaaacatccccgccgtgatcgccctgaccgaccccgagggctgcccactgagccggtttaaggatagcctgggaaacccaacccacatcctgagaatcggcgagagctataaggagaagcagcggaccatccaggccaagaaggaggtggagcagcggagagccggcggctacagccggaagtacgccagcaaagccaagaatctggcagacgatatggtgagaaacaccgctagagatctgctgtactacgccgtgacccaggatgccatgctgatcttcgccaacctgagccggggcttcggccggcagggcaagcggaccttcatggccgagagacagtacacacggatggaggactggctgaccgccaagctggcctacgagggcctgagcaagacctacctgtccaagacactggcccagtacacctccaagacatgcagcaactgtgggtttaccatcaccagcgccgactacgacagggtgctggagaagctgaagaagacagcaacaggctggatgaccacaattaacggcaaggagctgaaggtggagggccagattacctactacaacagatacaagagacagaacgtagtcaaggacctgtccgtcgagctggatagactgagcgaagaatctgtgaacaacgacatctcctcctggacaaagggcagaagcggagaagctctgagcctcctgaagaaaagattctcccatagacccgtgcaggagaagttcgtgtgcctgaactgcggcttcgagacacacgcagccgagcaagccgccctgaacatcgccagatcctggctgttcctgcggagccaggagtacaagaaataccagacaaacaagacaaccggcaacaccgataagagagccttcgtcgagacctggcagtccttttaccggaagaagcttaaggaggtgtggaaacctgccgtgcggtctggcggatctggcggaggctccacaagcctgctgaccttcgaggacgtcgccgtgtccttcagcgaggaagaatgggagctgctcgatcctcctcagaaaaccctgtacaacgacgtgatgcaagagaactacgagacagtgatctctctgggcctgaagctgaagaacgacaccggaaatgatcagcccatcagcatcagcgccctggaaatgcaggccagcggcagcaaggtgctgcggaaggccagaatgaaagtggctcagaagacaaccagccccaagaaaaagagaaaagtctaagctgccttctgcggggcttgccttctggccatgcccttcttctctcccttgcacctgtacctcttggtctttgaataaagcctgagtaggaaggctagcaaaaaaaaaaaaaaaaaaaaaaaaaaaaaaaaaaaaaaaaaaaaaaaaaaaaaaaaaaaaaaaaaaaaaaaaaaaaaaaa

SEQ ID NO: 2429 - RNA, 8787 nt, synthetic construct
  source 1..8787: mol_type = other RNA
aggaaataagagagaaaagaagagtaagaagaaatataagagccaccatggcccctaagaagaagcgtaaagtgagccggatgaaccacgaccaggagttcgacccccctaaggtgtaccctcccgtccccgccgagaagagaaagcccatccgggtcctgagcctgttcgatggcatcgccaccggtctgctggtgctgaaggacctgggcatccaggtggataggtacattgcctccgaggtgtgcgaggactccatcaccgtgggaatggtgcgtcatcagggcaagatcatgtacgtgggcgacgtgcggagcgtgacacagaagcatatccaggagtggggccctttcgacctggtgatcggcggcagcccttgcaatgacctgagcatcgtgaacccagcccggaagggcctgtacgagggaaccggcagactgttcttcgagttttacagactgctgcacgacgcccggcctaaggaaggcgacgaccggcccttcttttggctgttcgagaatgtggtggccatgggagtcagcgacaagcgggatattagccggttcctggagagcaaccccgtgatgatcgatgccaaggaagtgagcgccgcccaccgggccagatacttctggggcaatctgcctggcatgaacagacccctggccagcaccgtgaacgacaagctggagctgcaggagtgcctggagcacggccggatcgccaagttcagcaaggtgagaaccatcaccacccgaagcaacagcatcaaacaaggcaaggaccagcactttcctgtgttcatgaacgagaaggaggacatcctgtggtgtaccgagatggagagagtgttcgggttcccagtccactacacagatgtcagcaacatgtctagactggccagacagagactgctgggaagaagctggtccgtccctgtgatcagacacctgttcgcccctctgaaggagtacttcgcctgcgtgagcagcggcaacagcaacgccaacagccggggccccagcttctctagcggcctggtgccactgtccctgagagggagccacatgggccccatggagatctacaaaaccgtgagcgcctggaagcggcagcctgtgcgcgtgctgagcctgtttcggaatatcgataaagtcctgaaaagcctgggattcctggagagcggctctggctccggcggtggcaccctgaagtacgtggaggatgtgacaaacgtggtcagacgggatgtggagaagtggggccccttcgatctggtgtacggcagcacccaacccctgggcagctcttgtgaccggtgccctggctggtacatgtttcagttccaccggatcctgcagtacgccctgccgagacaggagtcccagcggccattcttttggattttcatggacaacttgctgctgaccgaggatgaccaggaaactaccactcggttcctgcagaccgaagccgtgaccctgcaggacgtgagaggccgggactaccagaacgccatgcgggtgtggtccaacatccctggactgaaaagcaagcacgcacctctgacccctaaagaagaggagtacctgcaggcccaggtgcggagcagaagcaagctggacgcccctaaggtggatctgctggtgaagaattgcctcctgcccctgagagagtacttcaagtatttcagccagaatagtctgcccctgggaggcagcggcggcggcgccctggtgacatttgaggacgtcgccgtgcggttcacccaggaggaatgggctctgctggatccttctcagaaaatcctgtaccgggacgtgatgagagagacataccggaatctgacctccgtgggcatcaactgggaatgttgggaccttgaagcctgcttcagaagcctgggaagaaacctgagagtgcaggtggtgaagagaaagtgcgagctgaccaacagcggcccctgcgccgagggcggcccaagcagcggcgcccctcctcccagcggcggcaggcggcccaagcagcggcgcccctcctcccagcggcggcagcccagccggctccccaacctctaccgaggagggcacctctgagtccgccacccccgagagcggccctggcacctccaccgagcccagcgagggcagcgcacccggcagccctgccggcagccccacctccacagaggagggaaccagcaccgagcccagcgaaggcagcgccccaggcaccagcaccgagcctagtgagcaggagattaaacggatcaacaagatcagaagaagacttgtgaaagacagcaacaccaagaaggccggcaagacaggccccatgaaaaccctgctggttagagtgatgacacccgatctgagagagcggctggaaaacctgagaaagaagcctgaaaatatcccccagcccatcagcaatacatctagagccaacctgaataagctgctgaccgattacaccgaaatgaagaaggcgatcctgcatgtgtactgggaagagttccagaaggaccctgtgggcctgatgagccgggtggcccagcctgccagcaagaagatcgatcagaacaagctgaaacctgagatggacgagaagggcaacctgaccaccgccggctttgcctgctctcagtgtggccagcccctgttcgtgtacaagctggagcaggtgtctgagaagggcaaggcttacaccaactacttcggacggtgcaatgtggccgagcacgaaaagctgatcctgctggcccagctgaagcccgagaaggatagcgacgaagccgtgacatatagcctgggaaagtttgggcagagggccctggatttctacagcattcatgtgaccaaggagtccacccaccccgtgaagcccctggcccagatcgccggaaacagatacgcctccggacctgtgggaaaggccctgagcgacgcatgtatgggcacaatcgcctccttcctgtctaagtaccaggacatcatcatcgaacaccagaaggtggtgaagggcaaccagaagagactggagagcctgcgggagctggccggcaaggaaaacctggaataccctagcgtgaccctgccacctcagcctcacaccaaggagggcgttgatgcctacaacgaagtgatcgcccgggtgcgaatgtgggtgaacctgaacctgtggcagaagctgaagctaagcagagatgatgccaagcctctgctgagactgaagggattcccttcctttcctctggtcgagagacaggccaacgaagtggactggtgggacatggtgtgtaacgtgaagaagctgatcaacgagaaaaaggaggatggcaaggtgttttggcagaatctggctggctacaagagacaggaagccctgagaccatacctgagcagcgaggaagatcggaagaagggaaagaaattcgctcggtaccagctgggcgacctgctgctgcacctggaaaagaagcacggcgaggactggggaaaggtgtacgacgaggcctgggagcggattgacaagaaagtggaaggcctgagcaagcacatcaagctggaagaggaacggagaagcgaggacgcccagagcaaggccgccctgaccgactggctgcgggctaaggccagcttcgtgatcgagggcctgaaggaggccgacaaggacgagttctgcagatgcgagctgaagctgcagaagtggtacggggacctgcggggaaagcccttcgccatcgaagccgagaacagcatcctggacatcagcggcttcagcaagcagtacaactgtgccttcatctggcagaaggacggcgtgaagaagctgaacctgtacctgatcatcaactacttcaagggcggcaagctgcggttcaagaagatcaaacctgaagccttcgaagccaacagattctacaccgtgatcaacaaaaagagcggcgagatcgtgcccatggaggtgaacttcaacttcgacgaccccaacctgatcatcctgcctctggcctttggcaagagacagggcagagaattcatctggaacgacctgctgtccctggaaaccggcagcctgaagctggccaacggaagagtgatcgagaagacactgtacaacagaagaacccggcaggatgagcctgccctgttcgtggccctgaccttcgagcggcgggaggtcctggactcctccaatatcaaaccaatgaacctgatcggcgtggcaagaggcgaaaacatccccgccgtgatcgccctgaccgaccccgagggctgcccactgagccggtttaaggatagcctgggaaacccaacccacatcctgagaatcggcgagagctataaggagaagcagcggaccatccaggccaagaaggaggtggagcagcggagagccggcggctacagccggaagtacgccagcaaagccaagaatctggcagacgatatggtgagaaacaccgctagagatctgctgtactacgccgtgacccaggatgccatgctgatcttcgccaacctgagccggggcttcggccggcagggcaagcggaccttcatggccgagagacagtacacacggatggaggactggctgaccgccaagctggcctacgagggcctgagcaagacctacctgtccaagacactggcccagtacacctccaagacatgcagcaactgtgggtttaccatcaccagcgccgactacgacagggtgctggagaagctgaagaagacagcaacaggctggatgaccacaattaacggcaaggagctgaaggtggagggccagattacctactacaacagatacaagagacagaacgtagtcaaggacctgtccgtcgagctggatagactgagcgaagaatctgtgaacaacgacatctcctcctggacaaagggcagaagcggagaagctctgagcctcctgaagaaaagattctcccatagacccgtgcaggagaagttcgtgtgcctgaactgcggcttcgagacacacgcagccgagcaagccgccctgaacatcgccagatcctggctgttcctgcggagccaggagtacaagaaataccagacaaacaagacaaccggcaacaccgataagagagccttcgtcgagacctggcagtccttttaccggaagaagcttaaggaggtgtggaaacctgccgtgcggtctggcggatctggcggaggctccaccagccccaagaaaaagagaaaagtctaagctgccttctgcggggcttgccttctggccatgcccttcttctctcccttgcacctgtacctcttggtctttgaataaagcctgagtaggaaggctagcaaaaaaaaaaaaaaaaaaaaaaaaaaaaaaaaaaaaaaaaaaaaaaaaaaaaaaaaaaaaaaaaaaaaaaaaaaaaaaaagcccagccggctccccaacctctaccgaggagggcacctctgagtccgccacccccgagagcggccctggcacctccaccgagcccagcgagggcagcgcacccggcagccctgccggcagccccacctccacagaggagggaaccagcaccgagcccagcgaaggcagcgccccaggcaccagcaccgagcctagtgagcaggagattaaacggatcaacaagatcagaagaagacttgtgaaagacagcaacaccaagaaggccggcaagacaggccccatgaaaaccctgctggttagagtgatgacacccgatctgagagagcggctggaaaacctgagaaagaagcctgaaaatatcccccagcccatcagcaatacatctagagccaacctgaataagctgctgaccgattacaccgaaatgaagaaggcgatcctgcatgtgtactgggaagagttccagaaggaccctgtgggcctgatgagccgggtggcccagcctgccagcaagaagatcgatcagaacaagctgaaacctgagatggacgagaagggcaacctgaccaccgccggctttgcctgctctcagtgtggccagcccctgttcgtgtacaagctggagcaggtgtctgagaagggcaaggcttacaccaactacttcggacggtgcaatgtggccgagcacgaaaagctgatcctgctggcccagctgaagcccgagaaggatagcgacgaagccgtgacatatagcctgggaaagtttgggcagagggccctggatttctacagcattcatgtgaccaaggagtccacccaccccgtgaagcccctggcccagatcgccggaaacagatacgcctccggacctgtgggaaaggccctgagcgacgcatgtatgggcacaatcgcctccttcctgtctaagtaccaggacatcatcatcgaacaccagaaggtggtgaagggcaaccagaagagactggagagcctgcgggagctggccggcaaggaaaacctggaataccctagcgtgaccctgccacctcagcctcacaccaaggagggcgttgatgcctacaacgaagtgatcgcccgggtgcgaatgtgggtgaacctgaacctgtggcagaagctgaagctaagcagagatgatgccaagcctctgctgagactgaagggattcccttcctttcctctggtcgagagacaggccaacgaagtggactggtgggacatggtgtgtaacgtgaagaagctgatcaacgagaaaaaggaggatggcaaggtgttttggcagaatctggctggctacaagagacaggaagccctgagaccatacctgagcagcgaggaagatcggaagaagggaaagaaattcgctcggtaccagctgggcgacctgctgctgcacctggaaaagaagcacggcgaggactggggaaaggtgtacgacgaggcctgggagcggattgacaagaaagtggaaggcctgagcaagcacatcaagctggaagaggaacggagaagcgaggacgcccagagcaaggccgccctgaccgactggctgcgggctaaggccagcttcgtgatcgagggcctgaaggaggccgacaaggacgagttctgcagatgcgagctgaagctgcagaagtggtacggggacctgcggggaaagcccttcgccatcgaagccgagaacagcatcctggacatcagcggcttcagcaagcagtacaactgtgccttcatctggcagaaggacggcgtgaagaagctgaacctgtacctgatcatcaactacttcaagggcggcaagctgcggttcaagaagatcaaacctgaagccttcgaagccaacagattctacaccgtgatcaacaaaaagagcggcgagatcgtgcccatggaggtgaacttcaacttcgacgaccccaacctgatcatcctgcctctggcctttggcaagagacagggcagagaattcatctggaacgacctgctgtccctggaaaccggcagcctgaagctggccaacggaagagtgatcgagaagacactgtacaacagaagaacccggcaggatgagcctgccctgttcgtggccctgaccttcgagcggcgggaggtcctggactcctccaatatcaaaccaatgaacctgatcggcgtggcaagaggcgaaaacatccccgccgtgatcgccctgaccgaccccgagggctgcccactgagccggtttaaggatagcctgggaaacccaacccacatcctgagaatcggcgagagctataaggagaagcagcggaccatccaggccaagaaggaggtggagcagcggagagccggcggctacagccggaagtacgccagcaaagccaagaatctggcagacgatatggtgagaaacaccgctagagatctgctgtactacgccgtgacccaggatgccatgctgatcttcgccaacctgagccggggcttcggccggcagggcaagcggaccttcatggccgagagacagtacacacggatggaggactggctgaccgccaagctggcctacgagggcctgagcaagacctacctgtccaagacactggcccagtacacctccaagacatgcagcaactgtgggtttaccatcaccagcgccgactacgacagggtgctggagaagctgaagaagacagcaacaggctggatgaccacaattaacggcaaggagctgaaggtggagggccagattacctactacaacagatacaagagacagaacgtagtcaaggacctgtccgtcgagctggatagactgagcgaagaatctgtgaacaacgacatctcctcctggacaaagggcagaagcggagaagctctgagcctcctgaagaaaagattctcccatagacccgtgcaggagaagttcgtgtgcctgaactgcggcttcgagacacacgcagccgagcaagccgccctgaacatcgccagatcctggctgttcctgcggagccaggagtacaagaaataccagacaaacaagacaaccggcaacaccgataagagagccttcgtcgagacctggcagtccttttaccggaagaagcttaaggaggtgtggaaacctgccgtgcggtctggcggatctggcggaggctccaccagccccaagaaaaagagaaaagtctaagctgccttctgcggggcttgccttctggccatgcccttcttctctcccttgcacctgtacctcttggtctttgaataaagcctgagtaggaaggctagcaaaaaaaaaaaaaaaaaaaaaaaaaaaaaaaaaaaaaaaaaaaaaaaaaaaaaaaaaaaaaaaaaaaaaaaaaaaaaaaa

SEQ ID NO: 2430 - RNA, 8787 nt, synthetic construct
  source 1..8787: mol_type = other RNA
aggaaataagagagaaaagaagagtaagaagaaatataagagccaccatggcccctaagaagaagcgtaaagtgagccggatgaaccacgaccaggagttcgacccccctaaggtgtaccctcccgtccccgccgagaagagaaagcccatccgggtcctgagcctgttcgatggcatcgccaccggtctgctggtgctgaaggacctgggcatccaggtggataggtacattgcctccgaggtgtgcgaggactccatcaccgtgggaatggtgcgtcatcagggcaagatcatgtacgtgggcgacgtgcggagcgtgacacagaagcatatccaggagtggggccctttcgacctggtgatcggcggcagcccttgcaatgacctgagcatcgtgaacccagcccggaagggcctgtacgagggaaccggcagactgttcttcgagttttacagactgctgcacgacgcccggcctaaggaaggcgacgaccggcccttcttttggctgttcgagaatgtggtggccatgggagtcagcgacaagcgggatattagccggttcctggagagcaaccccgtgatgatcgatgccaaggaagtgagcgccgcccaccgggccagatacttctggggcaatctgcctggcatgaacagacccctggccagcaccgtgaacgacaagctggagctgcaggagtgcctggagcacggccggatcgccaagttcagcaaggtgagaaccatcaccacccgaagcaacagcatcaaacaaggcaaggaccagcactttcctgtgttcatgaacgagaaggaggacatcctgtggtgtaccgagatggagagagtgttcgggttcccagtccactacacagatgtcagcaacatgtctagactggccagacagagactgctgggaagaagctggtccgtccctgtgatcagacacctgttcgcccctctgaaggagtacttcgcctgcgtgagcagcggcaacagcaacgccaacagccggggccccagcttctctagcggcctggtgccactgtccctgagagggagccacatgggccccatggagatctacaaaaccgtgagcgcctggaagcggcagcctgtgcgcgtgctgagcctgtttcggaatatcgataaagtcctgaaaagcctgggattcctggagagcggctctggctccggcggtggcaccctgaagtacgtggaggatgtgacaaacgtggtcagacgggatgtggagaagtggggccccttcgatctggtgtacggcagcacccaacccctgggcagctcttgtgaccggtgccctggctggtacatgtttcagttccaccggatcctgcagtacgccctgccgagacaggagtcccagcggccattcttttggattttcatggacaacttgctgctgaccgaggatgaccaggaaactaccactcggttcctgcagaccgaagccgtgaccctgcaggacgtgagaggccgggactaccagaacgccatgcgggtgtggtccaacatccctggactgaaaagcaagcacgcacctctgacccctaaagaagaggagtacctgcaggcccaggtgcggagcagaagcaagctggacgcccctaaggtggatctgctggtgaagaattgcctcctgcccctgagagagtacttcaagtatttcagccagaatagtctgcccctgggaggcagcggcggcggctctacacctgtgaccttcgaggatgtggtggtctacttcaccgccgctgagtgggtgcacctgacaaactggcaaagagatttttatcaggccgtgatgatggaaacctacgagctggtggccagcgtggctggcgacggcgttccaatggccgaggacgaggaaggcggagtggaaagacccgtgtggcagtacatccccagaggcaagcggcggagaaagacccctcagcctcgcgccgacggcggcccaagcagcggcgcccctcctcccagcggcggcaggcggcccaagcagcggcgcccctcctcccagcggcggcagcccagccggctccccaacctctaccgaggagggcacctctgagtccgccacccccgagagcggccctggcacctccaccgagcccagcgagggcagcgcacccggcagccctgccggcagccccacctccacagaggagggaaccagcaccgagcccagcgaaggcagcgccccaggcaccagcaccgagcctagtgagcaggagattaaacggatcaacaagatcagaagaagacttgtgaaagacagcaacaccaagaaggccggcaagacaggccccatgaaaaccctgctggttagagtgatgacacccgatctgagagagcggctggaaaacctgagaaagaagcctgaaaatatcccccagcccatcagcaatacatctagagccaacctgaataagctgctgaccgattacaccgaaatgaagaaggcgatcctgcatgtgtactgggaagagttccagaaggaccctgtgggcctgatgagccgggtggcccagcctgccagcaagaagatcgatcagaacaagctgaaacctgagatggacgagaagggcaacctgaccaccgccggctttgcctgctctcagtgtggccagcccctgttcgtgtacaagctggagcaggtgtctgagaagggcaaggcttacaccaactacttcggacggtgcaatgtggccgagcacgaaaagctgatcctgctggcccagctgaagcccgagaaggatagcgacgaagccgtgacatatagcctgggaaagtttgggcagagggccctggatttctacagcattcatgtgaccaaggagtccacccaccccgtgaagcccctggcccagatcgccggaaacagatacgcctccggacctgtgggaaaggccctgagcgacgcatgtatgggcacaatcgcctccttcctgtctaagtaccaggacatcatcatcgaacaccagaaggtggtgaagggcaaccagaagagactggagagcctgcgggagctggccggcaaggaaaacctggaataccctagcgtgaccctgccacctcagcctcacaccaaggagggcgttgatgcctacaacgaagtgatcgcccgggtgcgaatgtgggtgaacctgaacctgtggcagaagctgaagctaagcagagatgatgccaagcctctgctgagactgaagggattcccttcctttcctctggtcgagagacaggccaacgaagtggactggtgggacatggtgtgtaacgtgaagaagctgatcaacgagaaaaaggaggatggcaaggtgttttggcagaatctggctggctacaagagacaggaagccctgagaccatacctgagcagcgaggaagatcggaagaagggaaagaaattcgctcggtaccagctgggcgacctgctgctgcacctggaaaagaagcacggcgaggactggggaaaggtgtacgacgaggcctgggagcggattgacaagaaagtggaaggcctgagcaagcacatcaagctggaagaggaacggagaagcgaggacgcccagagcaaggccgccctgaccgactggctgcgggctaaggccagcttcgtgatcgagggcctgaaggaggccgacaaggacgagttctgcagatgcgagctgaagctgcagaagtggtacggggacctgcggggaaagcccttcgccatcgaagccgagaacagcatcctggacatcagcggcttcagcaagcagtacaactgtgccttcatctggcagaaggacggcgtgaagaagctgaacctgtacctgatcatcaactacttcaagggcggcaagctgcggttcaagaagatcaaacctgaagccttcgaagccaacagattctacaccgtgatcaacaaaaagagcggcgagatcgtgcccatggaggtgaacttcaacttcgacgaccccaacctgatcatcctgcctctggcctttggcaagagacagggcagagaattcatctggaacgacctgctgtccctggaaaccggcagcctgaagctggccaacggaagagtgatcgagaagacactgtacaacagaagaacccggcaggatgagcctgccctgttcgtggccctgaccttcgagcggcgggaggtcctggactcctccaatatcaaaccaatgaacctgatcggcgtggcaagaggcgaaaacatccccgccgtgatcgccctgaccgaccccgagggctgcccactgagccggtttaaggatagcctgggaaacccaacccacatcctgagaatcggcgagagctataaggagaagcagcggaccatccaggccaagaaggaggtggagcagcggagagccggcggctacagccggaagtacgccagcaaagccaagaatctggcagacgatatggtgagaaacaccgctagagatctgctgtactacgccgtgacccaggatgccatgctgatcttcgccaacctgagccggggcttcggccggcagggcaagcggaccttcatggccgagagacagtacacacggatggaggactggctgaccgccaagctggcctacgagggcctgagcaagacctacctgtccaagacactggcccagtacacctccaagacatgcagcaactgtgggtttaccatcaccagcgccgactacgacagggtgctggagaagctgaagaagacagcaacaggctggatgaccacaattaacggcaaggagctgaaggtggagggccagattacctactacaacagatacaagagacagaacgtagtcaaggacctgtccgtcgagctggatagactgagcgaagaatctgtgaacaacgacatctcctcctggacaaagggcagaagcggagaagctctgagcctcctgaagaaaagattctcccatagacccgtgcaggagaagttcgtgtgcctgaactgcggcttcgagacacacgcagccgagcaagccgccctgaacatcgccagatcctggctgttcctgcggagccaggagtacaagaaataccagacaaacaagacaaccggcaacaccgataagagagccttcgtcgagacctggcagtccttttaccggaagaagcttaaggaggtgtggaaacctgccgtgcggtctggcggatctggcggaggctccaccagccccaagaaaaagagaaaagtctaagctgccttctgcggggcttgccttctggccatgcccttcttctctcccttgcacctgtacctcttggtctttgaataaagcctgagtaggaaggctagcaaaaaaaaaaaaaaaaaaaaaaaaaaaaaaaaaaaaaaaaaaaaaaaaaaaaaaaaaaaaaaaaaaaaaaaaaaaaaaaagcccagccggctccccaacctctaccgaggagggcacctctgagtccgccacccccgagagcggccctggcacctccaccgagcccagcgagggcagcgcacccggcagccctgccggcagccccacctccacagaggagggaaccagcaccgagcccagcgaaggcagcgccccaggcaccagcaccgagcctagtgagcaggagattaaacggatcaacaagatcagaagaagacttgtgaaagacagcaacaccaagaaggccggcaagacaggccccatgaaaaccctgctggttagagtgatgacacccgatctgagagagcggctggaaaacctgagaaagaagcctgaaaatatcccccagcccatcagcaatacatctagagccaacctgaataagctgctgaccgattacaccgaaatgaagaaggcgatcctgcatgtgtactgggaagagttccagaaggaccctgtgggcctgatgagccgggtggcccagcctgccagcaagaagatcgatcagaacaagctgaaacctgagatggacgagaagggcaacctgaccaccgccggctttgcctgctctcagtgtggccagcccctgttcgtgtacaagctggagcaggtgtctgagaagggcaaggcttacaccaactacttcggacggtgcaatgtggccgagcacgaaaagctgatcctgctggcccagctgaagcccgagaaggatagcgacgaagccgtgacatatagcctgggaaagtttgggcagagggccctggatttctacagcattcatgtgaccaaggagtccacccaccccgtgaagcccctggcccagatcgccggaaacagatacgcctccggacctgtgggaaaggccctgagcgacgcatgtatgggcacaatcgcctccttcctgtctaagtaccaggacatcatcatcgaacaccagaaggtggtgaagggcaaccagaagagactggagagcctgcgggagctggccggcaaggaaaacctggaataccctagcgtgaccctgccacctcagcctcacaccaaggagggcgttgatgcctacaacgaagtgatcgcccgggtgcgaatgtgggtgaacctgaacctgtggcagaagctgaagctaagcagagatgatgccaagcctctgctgagactgaagggattcccttcctttcctctggtcgagagacaggccaacgaagtggactggtgggacatggtgtgtaacgtgaagaagctgatcaacgagaaaaaggaggatggcaaggtgttttggcagaatctggctggctacaagagacaggaagccctgagaccatacctgagcagcgaggaagatcggaagaagggaaagaaattcgctcggtaccagctgggcgacctgctgctgcacctggaaaagaagcacggcgaggactggggaaaggtgtacgacgaggcctgggagcggattgacaagaaagtggaaggcctgagcaagcacatcaagctggaagaggaacggagaagcgaggacgcccagagcaaggccgccctgaccgactggctgcgggctaaggccagcttcgtgatcgagggcctgaaggaggccgacaaggacgagttctgcagatgcgagctgaagctgcagaagtggtacggggacctgcggggaaagcccttcgccatcgaagccgagaacagcatcctggacatcagcggcttcagcaagcagtacaactgtgccttcatctggcagaaggacggcgtgaagaagctgaacctgtacctgatcatcaactacttcaagggcggcaagctgcggttcaagaagatcaaacctgaagccttcgaagccaacagattctacaccgtgatcaacaaaaagagcggcgagatcgtgcccatggaggtgaacttcaacttcgacgaccccaacctgatcatcctgcctctggcctttggcaagagacagggcagagaattcatctggaacgacctgctgtccctggaaaccggcagcctgaagctggccaacggaagagtgatcgagaagacactgtacaacagaagaacccggcaggatgagcctgccctgttcgtggccctgaccttcgagcggcgggaggtcctggactcctccaatatcaaaccaatgaacctgatcggcgtggcaagaggcgaaaacatccccgccgtgatcgccctgaccgaccccgagggctgcccactgagccggtttaaggatagcctgggaaacccaacccacatcctgagaatcggcgagagctataaggagaagcagcggaccatccaggccaagaaggaggtggagcagcggagagccggcggctacagccggaagtacgccagcaaagccaagaatctggcagacgatatggtgagaaacaccgctagagatctgctgtactacgccgtgacccaggatgccatgctgatcttcgccaacctgagccggggcttcggccggcagggcaagcggaccttcatggccgagagacagtacacacggatggaggactggctgaccgccaagctggcctacgagggcctgagcaagacctacctgtccaagacactggcccagtacacctccaagacatgcagcaactgtgggtttaccatcaccagcgccgactacgacagggtgctggagaagctgaagaagacagcaacaggctggatgaccacaattaacggcaaggagctgaaggtggagggccagattacctactacaacagatacaagagacagaacgtagtcaaggacctgtccgtcgagctggatagactgagcgaagaatctgtgaacaacgacatctcctcctggacaaagggcagaagcggagaagctctgagcctcctgaagaaaagattctcccatagacccgtgcaggagaagttcgtgtgcctgaactgcggcttcgagacacacgcagccgagcaagccgccctgaacatcgccagatcctggctgttcctgcggagccaggagtacaagaaataccagacaaacaagacaaccggcaacaccgataagagagccttcgtcgagacctggcagtccttttaccggaagaagcttaaggaggtgtggaaacctgccgtgcggtctggcggatctggcggaggctccaccagccccaagaaaaagagaaaagtctaagctgccttctgcggggcttgccttctggccatgcccttcttctctcccttgcacctgtacctcttggtctttgaataaagcctgagtaggaaggctagcaaaaaaaaaaaaaaaaaaaaaaaaaaaaaaaaaaaaaaaaaaaaaaaaaaaaaaaaaaaaaaaaaaaaaaaaaaaaaaaa

SEQ ID NO: 2431 - RNA, 8787 nt, synthetic construct
  source 1..8787: mol_type = other RNA
aggaaataagagagaaaagaagagtaagaagaaatataagagccaccatggcccctaagaagaagcgtaaagtgagccggatgaaccacgaccaggagttcgacccccctaaggtgtaccctcccgtccccgccgagaagagaaagcccatccgggtcctgagcctgttcgatggcatcgccaccggtctgctggtgctgaaggacctgggcatccaggtggataggtacattgcctccgaggtgtgcgaggactccatcaccgtgggaatggtgcgtcatcagggcaagatcatgtacgtgggcgacgtgcggagcgtgacacagaagcatatccaggagtggggccctttcgacctggtgatcggcggcagcccttgcaatgacctgagcatcgtgaacccagcccggaagggcctgtacgagggaaccggcagactgttcttcgagttttacagactgctgcacgacgcccggcctaaggaaggcgacgaccggcccttcttttggctgttcgagaatgtggtggccatgggagtcagcgacaagcgggatattagccggttcctggagagcaaccccgtgatgatcgatgccaaggaagtgagcgccgcccaccgggccagatacttctggggcaatctgcctggcatgaacagacccctggccagcaccgtgaacgacaagctggagctgcaggagtgcctggagcacggccggatcgccaagttcagcaaggtgagaaccatcaccacccgaagcaacagcatcaaacaaggcaaggaccagcactttcctgtgttcatgaacgagaaggaggacatcctgtggtgtaccgagatggagagagtgttcgggttcccagtccactacacagatgtcagcaacatgtctagactggccagacagagactgctgggaagaagctggtccgtccctgtgatcagacacctgttcgcccctctgaaggagtacttcgcctgcgtgagcagcggcaacagcaacgccaacagccggggccccagcttctctagcggcctggtgccactgtccctgagagggagccacatgggccccatggagatctacaaaaccgtgagcgcctggaagcggcagcctgtgcgcgtgctgagcctgtttcggaatatcgataaagtcctgaaaagcctgggattcctggagagcggctctggctccggcggtggcaccctgaagtacgtggaggatgtgacaaacgtggtcagacgggatgtggagaagtggggccccttcgatctggtgtacggcagcacccaacccctgggcagctcttgtgaccggtgccctggctggtacatgtttcagttccaccggatcctgcagtacgccctgccgagacaggagtcccagcggccattcttttggattttcatggacaacttgctgctgaccgaggatgaccaggaaactaccactcggttcctgcagaccgaagccgtgaccctgcaggacgtgagaggccgggactaccagaacgccatgcgggtgtggtccaacatccctggactgaaaagcaagcacgcacctctgacccctaaagaagaggagtacctgcaggcccaggtgcggagcagaagcaagctggacgcccctaaggtggatctgctggtgaagaattgcctcctgcccctgagagagtacttcaagtatttcagccagaatagtctgcccctgggaggcagcggcggcggccaggacgtggtgacattcaaggacgtcgccatctacttcagccctgaggaatgggtgcggctgagcgccggacagagagaactgtaccaggaggtgatgctggacaactacgagctggtgaccagcctggatagagagagcaaactgctgtataagatggaccccgaggaagaaagctgcgagggcgtgccatacagctctgccgacagcggcgcccctgatagctcctccacctctgcttgtggcggcccaagcagcggcgcccctcctcccagcggcggcaggcggcccaagcagcggcgcccctcctcccagcggcggcagcccagccggctccccaacctctaccgaggagggcacctctgagtccgccacccccgagagcggccctggcacctccaccgagcccagcgagggcagcgcacccggcagccctgccggcagccccacctccacagaggagggaaccagcaccgagcccagcgaaggcagcgccccaggcaccagcaccgagcctagtgagcaggagattaaacggatcaacaagatcagaagaagacttgtgaaagacagcaacaccaagaaggccggcaagacaggccccatgaaaaccctgctggttagagtgatgacacccgatctgagagagcggctggaaaacctgagaaagaagcctgaaaatatcccccagcccatcagcaatacatctagagccaacctgaataagctgctgaccgattacaccgaaatgaagaaggcgatcctgcatgtgtactgggaagagttccagaaggaccctgtgggcctgatgagccgggtggcccagcctgccagcaagaagatcgatcagaacaagctgaaacctgagatggacgagaagggcaacctgaccaccgccggctttgcctgctctcagtgtggccagcccctgttcgtgtacaagctggagcaggtgtctgagaagggcaaggcttacaccaactacttcggacggtgcaatgtggccgagcacgaaaagctgatcctgctggcccagctgaagcccgagaaggatagcgacgaagccgtgacatatagcctgggaaagtttgggcagagggccctggatttctacagcattcatgtgaccaaggagtccacccaccccgtgaagcccctggcccagatcgccggaaacagatacgcctccggacctgtgggaaaggccctgagcgacgcatgtatgggcacaatcgcctccttcctgtctaagtaccaggacatcatcatcgaacaccagaaggtggtgaagggcaaccagaagagactggagagcctgcgggagctggccggcaaggaaaacctggaataccctagcgtgaccctgccacctcagcctcacaccaaggagggcgttgatgcctacaacgaagtgatcgcccgggtgcgaatgtgggtgaacctgaacctgtggcagaagctgaagctaagcagagatgatgccaagcctctgctgagactgaagggattcccttcctttcctctggtcgagagacaggccaacgaagtggactggtgggacatggtgtgtaacgtgaagaagctgatcaacgagaaaaaggaggatggcaaggtgttttggcagaatctggctggctacaagagacaggaagccctgagaccatacctgagcagcgaggaagatcggaagaagggaaagaaattcgctcggtaccagctgggcgacctgctgctgcacctggaaaagaagcacggcgaggactggggaaaggtgtacgacgaggcctgggagcggattgacaagaaagtggaaggcctgagcaagcacatcaagctggaagaggaacggagaagcgaggacgcccagagcaaggccgccctgaccgactggctgcgggctaaggccagcttcgtgatcgagggcctgaaggaggccgacaaggacgagttctgcagatgcgagctgaagctgcagaagtggtacggggacctgcggggaaagcccttcgccatcgaagccgagaacagcatcctggacatcagcggcttcagcaagcagtacaactgtgccttcatctggcagaaggacggcgtgaagaagctgaacctgtacctgatcatcaactacttcaagggcggcaagctgcggttcaagaagatcaaacctgaagccttcgaagccaacagattctacaccgtgatcaacaaaaagagcggcgagatcgtgcccatggaggtgaacttcaacttcgacgaccccaacctgatcatcctgcctctggcctttggcaagagacagggcagagaattcatctggaacgacctgctgtccctggaaaccggcagcctgaagctggccaacggaagagtgatcgagaagacactgtacaacagaagaacccggcaggatgagcctgccctgttcgtggccctgaccttcgagcggcgggaggtcctggactcctccaatatcaaaccaatgaacctgatcggcgtggcaagaggcgaaaacatccccgccgtgatcgccctgaccgaccccgagggctgcccactgagccggtttaaggatagcctgggaaacccaacccacatcctgagaatcggcgagagctataaggagaagcagcggaccatccaggccaagaaggaggtggagcagcggagagccggcggctacagccggaagtacgccagcaaagccaagaatctggcagacgatatggtgagaaacaccgctagagatctgctgtactacgccgtgacccaggatgccatgctgatcttcgccaacctgagccggggcttcggccggcagggcaagcggaccttcatggccgagagacagtacacacggatggaggactggctgaccgccaagctggcctacgagggcctgagcaagacctacctgtccaagacactggcccagtacacctccaagacatgcagcaactgtgggtttaccatcaccagcgccgactacgacagggtgctggagaagctgaagaagacagcaacaggctggatgaccacaattaacggcaaggagctgaaggtggagggccagattacctactacaacagatacaagagacagaacgtagtcaaggacctgtccgtcgagctggatagactgagcgaagaatctgtgaacaacgacatctcctcctggacaaagggcagaagcggagaagctctgagcctcctgaagaaaagattctcccatagacccgtgcaggagaagttcgtgtgcctgaactgcggcttcgagacacacgcagccgagcaagccgccctgaacatcgccagatcctggctgttcctgcggagccaggagtacaagaaataccagacaaacaagacaaccggcaacaccgataagagagccttcgtcgagacctggcagtccttttaccggaagaagcttaaggaggtgtggaaacctgccgtgcggtctggcggatctggcggaggctccaccagccccaagaaaaagagaaaagtctaagctgccttctgcggggcttgccttctggccatgcccttcttctctcccttgcacctgtacctcttggtctttgaataaagcctgagtaggaaggctagcaaaaaaaaaaaaaaaaaaaaaaaaaaaaaaaaaaaaaaaaaaaaaaaaaaaaaaaaaaaaaaaaaaaaaaaaaaaaaaaagcccagccggctccccaacctctaccgaggagggcacctctgagtccgccacccccgagagcggccctggcacctccaccgagcccagcgagggcagcgcacccggcagccctgccggcagccccacctccacagaggagggaaccagcaccgagcccagcgaaggcagcgccccaggcaccagcaccgagcctagtgagcaggagattaaacggatcaacaagatcagaagaagacttgtgaaagacagcaacaccaagaaggccggcaagacaggccccatgaaaaccctgctggttagagtgatgacacccgatctgagagagcggctggaaaacctgagaaagaagcctgaaaatatcccccagcccatcagcaatacatctagagccaacctgaataagctgctgaccgattacaccgaaatgaagaaggcgatcctgcatgtgtactgggaagagttccagaaggaccctgtgggcctgatgagccgggtggcccagcctgccagcaagaagatcgatcagaacaagctgaaacctgagatggacgagaagggcaacctgaccaccgccggctttgcctgctctcagtgtggccagcccctgttcgtgtacaagctggagcaggtgtctgagaagggcaaggcttacaccaactacttcggacggtgcaatgtggccgagcacgaaaagctgatcctgctggcccagctgaagcccgagaaggatagcgacgaagccgtgacatatagcctgggaaagtttgggcagagggccctggatttctacagcattcatgtgaccaaggagtccacccaccccgtgaagcccctggcccagatcgccggaaacagatacgcctccggacctgtgggaaaggccctgagcgacgcatgtatgggcacaatcgcctccttcctgtctaagtaccaggacatcatcatcgaacaccagaaggtggtgaagggcaaccagaagagactggagagcctgcgggagctggccggcaaggaaaacctggaataccctagcgtgaccctgccacctcagcctcacaccaaggagggcgttgatgcctacaacgaagtgatcgcccgggtgcgaatgtgggtgaacctgaacctgtggcagaagctgaagctaagcagagatgatgccaagcctctgctgagactgaagggattcccttcctttcctctggtcgagagacaggccaacgaagtggactggtgggacatggtgtgtaacgtgaagaagctgatcaacgagaaaaaggaggatggcaaggtgttttggcagaatctggctggctacaagagacaggaagccctgagaccatacctgagcagcgaggaagatcggaagaagggaaagaaattcgctcggtaccagctgggcgacctgctgctgcacctggaaaagaagcacggcgaggactggggaaaggtgtacgacgaggcctgggagcggattgacaagaaagtggaaggcctgagcaagcacatcaagctggaagaggaacggagaagcgaggacgcccagagcaaggccgccctgaccgactggctgcgggctaaggccagcttcgtgatcgagggcctgaaggaggccgacaaggacgagttctgcagatgcgagctgaagctgcagaagtggtacggggacctgcggggaaagcccttcgccatcgaagccgagaacagcatcctggacatcagcggcttcagcaagcagtacaactgtgccttcatctggcagaaggacggcgtgaagaagctgaacctgtacctgatcatcaactacttcaagggcggcaagctgcggttcaagaagatcaaacctgaagccttcgaagccaacagattctacaccgtgatcaacaaaaagagcggcgagatcgtgcccatggaggtgaacttcaacttcgacgaccccaacctgatcatcctgcctctggcctttggcaagagacagggcagagaattcatctggaacgacctgctgtccctggaaaccggcagcctgaagctggccaacggaagagtgatcgagaagacactgtacaacagaagaacccggcaggatgagcctgccctgttcgtggccctgaccttcgagcggcgggaggtcctggactcctccaatatcaaaccaatgaacctgatcggcgtggcaagaggcgaaaacatccccgccgtgatcgccctgaccgaccccgagggctgcccactgagccggtttaaggatagcctgggaaacccaacccacatcctgagaatcggcgagagctataaggagaagcagcggaccatccaggccaagaaggaggtggagcagcggagagccggcggctacagccggaagtacgccagcaaagccaagaatctggcagacgatatggtgagaaacaccgctagagatctgctgtactacgccgtgacccaggatgccatgctgatcttcgccaacctgagccggggcttcggccggcagggcaagcggaccttcatggccgagagacagtacacacggatggaggactggctgaccgccaagctggcctacgagggcctgagcaagacctacctgtccaagacactggcccagtacacctccaagacatgcagcaactgtgggtttaccatcaccagcgccgactacgacagggtgctggagaagctgaagaagacagcaacaggctggatgaccacaattaacggcaaggagctgaaggtggagggccagattacctactacaacagatacaagagacagaacgtagtcaaggacctgtccgtcgagctggatagactgagcgaagaatctgtgaacaacgacatctcctcctggacaaagggcagaagcggagaagctctgagcctcctgaagaaaagattctcccatagacccgtgcaggagaagttcgtgtgcctgaactgcggcttcgagacacacgcagccgagcaagccgccctgaacatcgccagatcctggctgttcctgcggagccaggagtacaagaaataccagacaaacaagacaaccggcaacaccgataagagagccttcgtcgagacctggcagtccttttaccggaagaagcttaaggaggtgtggaaacctgccgtgcggtctggcggatctggcggaggctccaccagccccaagaaaaagagaaaagtctaagctgccttctgcggggcttgccttctggccatgcccttcttctctcccttgcacctgtacctcttggtctttgaataaagcctgagtaggaaggctagcaaaaaaaaaaaaaaaaaaaaaaaaaaaaaaaaaaaaaaaaaaaaaaaaaaaaaaaaaaaaaaaaaaaaaaaaaaaaaaaa

SEQ ID NO: 2432 - RNA, 8814 nt, synthetic construct
  source 1..8814: mol_type = other RNA
aggaaataagagagaaaagaagagtaagaagaaatataagagccaccatggcccctaagaagaagcgtaaagtgagccggatgaaccacgaccaggagttcgacccccctaaggtgtaccctcccgtccccgccgagaagagaaagcccatccgggtcctgagcctgttcgatggcatcgccaccggtctgctggtgctgaaggacctgggcatccaggtggataggtacattgcctccgaggtgtgcgaggactccatcaccgtgggaatggtgcgtcatcagggcaagatcatgtacgtgggcgacgtgcggagcgtgacacagaagcatatccaggagtggggccctttcgacctggtgatcggcggcagcccttgcaatgacctgagcatcgtgaacccagcccggaagggcctgtacgagggaaccggcagactgttcttcgagttttacagactgctgcacgacgcccggcctaaggaaggcgacgaccggcccttcttttggctgttcgagaatgtggtggccatgggagtcagcgacaagcgggatattagccggttcctggagagcaaccccgtgatgatcgatgccaaggaagtgagcgccgcccaccgggccagatacttctggggcaatctgcctggcatgaacagacccctggccagcaccgtgaacgacaagctggagctgcaggagtgcctggagcacggccggatcgccaagttcagcaaggtgagaaccatcaccacccgaagcaacagcatcaaacaaggcaaggaccagcactttcctgtgttcatgaacgagaaggaggacatcctgtggtgtaccgagatggagagagtgttcgggttcccagtccactacacagatgtcagcaacatgtctagactggccagacagagactgctgggaagaagctggtccgtccctgtgatcagacacctgttcgcccctctgaaggagtacttcgcctgcgtgagcagcggcaacagcaacgccaacagccggggccccagcttctctagcggcctggtgccactgtccctgagagggagccacatgggccccatggagatctacaaaaccgtgagcgcctggaagcggcagcctgtgcgcgtgctgagcctgtttcggaatatcgataaagtcctgaaaagcctgggattcctggagagcggctctggctccggcggtggcaccctgaagtacgtggaggatgtgacaaacgtggtcagacgggatgtggagaagtggggccccttcgatctggtgtacggcagcacccaacccctgggcagctcttgtgaccggtgccctggctggtacatgtttcagttccaccggatcctgcagtacgccctgccgagacaggagtcccagcggccattcttttggattttcatggacaacttgctgctgaccgaggatgaccaggaaactaccactcggttcctgcagaccgaagccgtgaccctgcaggacgtgagaggccgggactaccagaacgccatgcgggtgtggtccaacatccctggactgaaaagcaagcacgcacctctgacccctaaagaagaggagtacctgcaggcccaggtgcggagcagaagcaagctggacgcccctaaggtggatctgctggtgaagaattgcctcctgcccctgagagagtacttcaagtatttcagccagaatagtctgcccctgggaggcagcggcggcggcgtcgccttccgggacgtgatcgtggacttcacccaggaggaatggcagcagctgaagcctgctcaaaaggacctgtacagagatgtgatgatggaaatctactggaatctggtgtctctggacctggaaaccgagggagatatgaacgagcctgaccccgagaaagacagctgggaggatagaacaagcatcgtggttgtggaaggcctgatgcggaacggcgcccagggctacgcctgcgagaaggccggcatccagggctgtagagtgggcggcccaagcagcggcgcccctcctcccagcggcggcaggcggcccaagcagcggcgcccctcctcccagcggcggcagcccagccggctccccaacctctaccgaggagggcacctctgagtccgccacccccgagagcggccctggcacctccaccgagcccagcgagggcagcgcacccggcagccctgccggcagccccacctccacagaggagggaaccagcaccgagcccagcgaaggcagcgccccaggcaccagcaccgagcctagtgagcaggagattaaacggatcaacaagatcagaagaagacttgtgaaagacagcaacaccaagaaggccggcaagacaggccccatgaaaaccctgctggttagagtgatgacacccgatctgagagagcggctggaaaacctgagaaagaagcctgaaaatatcccccagcccatcagcaatacatctagagccaacctgaataagctgctgaccgattacaccgaaatgaagaaggcgatcctgcatgtgtactgggaagagttccagaaggaccctgtgggcctgatgagccgggtggcccagcctgccagcaagaagatcgatcagaacaagctgaaacctgagatggacgagaagggcaacctgaccaccgccggctttgcctgctctcagtgtggccagcccctgttcgtgtacaagctggagcaggtgtctgagaagggcaaggcttacaccaactacttcggacggtgcaatgtggccgagcacgaaaagctgatcctgctggcccagctgaagcccgagaaggatagcgacgaagccgtgacatatagcctgggaaagtttgggcagagggccctggatttctacagcattcatgtgaccaaggagtccacccaccccgtgaagcccctggcccagatcgccggaaacagatacgcctccggacctgtgggaaaggccctgagcgacgcatgtatgggcacaatcgcctccttcctgtctaagtaccaggacatcatcatcgaacaccagaaggtggtgaagggcaaccagaagagactggagagcctgcgggagctggccggcaaggaaaacctggaataccctagcgtgaccctgccacctcagcctcacaccaaggagggcgttgatgcctacaacgaagtgatcgcccgggtgcgaatgtgggtgaacctgaacctgtggcagaagctgaagctaagcagagatgatgccaagcctctgctgagactgaagggattcccttcctttcctctggtcgagagacaggccaacgaagtggactggtgggacatggtgtgtaacgtgaagaagctgatcaacgagaaaaaggaggatggcaaggtgttttggcagaatctggctggctacaagagacaggaagccctgagaccatacctgagcagcgaggaagatcggaagaagggaaagaaattcgctcggtaccagctgggcgacctgctgctgcacctggaaaagaagcacggcgaggactggggaaaggtgtacgacgaggcctgggagcggattgacaagaaagtggaaggcctgagcaagcacatcaagctggaagaggaacggagaagcgaggacgcccagagcaaggccgccctgaccgactggctgcgggctaaggccagcttcgtgatcgagggcctgaaggaggccgacaaggacgagttctgcagatgcgagctgaagctgcagaagtggtacggggacctgcggggaaagcccttcgccatcgaagccgagaacagcatcctggacatcagcggcttcagcaagcagtacaactgtgccttcatctggcagaaggacggcgtgaagaagctgaacctgtacctgatcatcaactacttcaagggcggcaagctgcggttcaagaagatcaaacctgaagccttcgaagccaacagattctacaccgtgatcaacaaaaagagcggcgagatcgtgcccatggaggtgaacttcaacttcgacgaccccaacctgatcatcctgcctctggcctttggcaagagacagggcagagaattcatctggaacgacctgctgtccctggaaaccggcagcctgaagctggccaacggaagagtgatcgagaagacactgtacaacagaagaacccggcaggatgagcctgccctgttcgtggccctgaccttcgagcggcgggaggtcctggactcctccaatatcaaaccaatgaacctgatcggcgtggcaagaggcgaaaacatccccgccgtgatcgccctgaccgaccccgagggctgcccactgagccggtttaaggatagcctgggaaacccaacccacatcctgagaatcggcgagagctataaggagaagcagcggaccatccaggccaagaaggaggtggagcagcggagagccggcggctacagccggaagtacgccagcaaagccaagaatctggcagacgatatggtgagaaacaccgctagagatctgctgtactacgccgtgacccaggatgccatgctgatcttcgccaacctgagccggggcttcggccggcagggcaagcggaccttcatggccgagagacagtacacacggatggaggactggctgaccgccaagctggcctacgagggcctgagcaagacctacctgtccaagacactggcccagtacacctccaagacatgcagcaactgtgggtttaccatcaccagcgccgactacgacagggtgctggagaagctgaagaagacagcaacaggctggatgaccacaattaacggcaaggagctgaaggtggagggccagattacctactacaacagatacaagagacagaacgtagtcaaggacctgtccgtcgagctggatagactgagcgaagaatctgtgaacaacgacatctcctcctggacaaagggcagaagcggagaagctctgagcctcctgaagaaaagattctcccatagacccgtgcaggagaagttcgtgtgcctgaactgcggcttcgagacacacgcagccgagcaagccgccctgaacatcgccagatcctggctgttcctgcggagccaggagtacaagaaataccagacaaacaagacaaccggcaacaccgataagagagccttcgtcgagacctggcagtccttttaccggaagaagcttaaggaggtgtggaaacctgccgtgcggtctggcggatctggcggaggctccaccagccccaagaaaaagagaaaagtctaagctgccttctgcggggcttgccttctggccatgcccttcttctctcccttgcacctgtacctcttggtctttgaataaagcctgagtaggaaggctagcaaaaaaaaaaaaaaaaaaaaaaaaaaaaaaaaaaaaaaaaaaaaaaaaaaaaaaaaaaaaaaaaaaaaaaaaaaaaaaaagcccagccggctccccaacctctaccgaggagggcacctctgagtccgccacccccgagagcggccctggcacctccaccgagcccagcgagggcagcgcacccggcagccctgccggcagccccacctccacagaggagggaaccagcaccgagcccagcgaaggcagcgccccaggcaccagcaccgagcctagtgagcaggagattaaacggatcaacaagatcagaagaagacttgtgaaagacagcaacaccaagaaggccggcaagacaggccccatgaaaaccctgctggttagagtgatgacacccgatctgagagagcggctggaaaacctgagaaagaagcctgaaaatatcccccagcccatcagcaatacatctagagccaacctgaataagctgctgaccgattacaccgaaatgaagaaggcgatcctgcatgtgtactgggaagagttccagaaggaccctgtgggcctgatgagccgggtggcccagcctgccagcaagaagatcgatcagaacaagctgaaacctgagatggacgagaagggcaacctgaccaccgccggctttgcctgctctcagtgtggccagcccctgttcgtgtacaagctggagcaggtgtctgagaagggcaaggcttacaccaactacttcggacggtgcaatgtggccgagcacgaaaagctgatcctgctggcccagctgaagcccgagaaggatagcgacgaagccgtgacatatagcctgggaaagtttgggcagagggccctggatttctacagcattcatgtgaccaaggagtccacccaccccgtgaagcccctggcccagatcgccggaaacagatacgcctccggacctgtgggaaaggccctgagcgacgcatgtatgggcacaatcgcctccttcctgtctaagtaccaggacatcatcatcgaacaccagaaggtggtgaagggcaaccagaagagactggagagcctgcgggagctggccggcaaggaaaacctggaataccctagcgtgaccctgccacctcagcctcacaccaaggagggcgttgatgcctacaacgaagtgatcgcccgggtgcgaatgtgggtgaacctgaacctgtggcagaagctgaagctaagcagagatgatgccaagcctctgctgagactgaagggattcccttcctttcctctggtcgagagacaggccaacgaagtggactggtgggacatggtgtgtaacgtgaagaagctgatcaacgagaaaaaggaggatggcaaggtgttttggcagaatctggctggctacaagagacaggaagccctgagaccatacctgagcagcgaggaagatcggaagaagggaaagaaattcgctcggtaccagctgggcgacctgctgctgcacctggaaaagaagcacggcgaggactggggaaaggtgtacgacgaggcctgggagcggattgacaagaaagtggaaggcctgagcaagcacatcaagctggaagaggaacggagaagcgaggacgcccagagcaaggccgccctgaccgactggctgcgggctaaggccagcttcgtgatcgagggcctgaaggaggccgacaaggacgagttctgcagatgcgagctgaagctgcagaagtggtacggggacctgcggggaaagcccttcgccatcgaagccgagaacagcatcctggacatcagcggcttcagcaagcagtacaactgtgccttcatctggcagaaggacggcgtgaagaagctgaacctgtacctgatcatcaactacttcaagggcggcaagctgcggttcaagaagatcaaacctgaagccttcgaagccaacagattctacaccgtgatcaacaaaaagagcggcgagatcgtgcccatggaggtgaacttcaacttcgacgaccccaacctgatcatcctgcctctggcctttggcaagagacagggcagagaattcatctggaacgacctgctgtccctggaaaccggcagcctgaagctggccaacggaagagtgatcgagaagacactgtacaacagaagaacccggcaggatgagcctgccctgttcgtggccctgaccttcgagcggcgggaggtcctggactcctccaatatcaaaccaatgaacctgatcggcgtggcaagaggcgaaaacatccccgccgtgatcgccctgaccgaccccgagggctgcccactgagccggtttaaggatagcctgggaaacccaacccacatcctgagaatcggcgagagctataaggagaagcagcggaccatccaggccaagaaggaggtggagcagcggagagccggcggctacagccggaagtacgccagcaaagccaagaatctggcagacgatatggtgagaaacaccgctagagatctgctgtactacgccgtgacccaggatgccatgctgatcttcgccaacctgagccggggcttcggccggcagggcaagcggaccttcatggccgagagacagtacacacggatggaggactggctgaccgccaagctggcctacgagggcctgagcaagacctacctgtccaagacactggcccagtacacctccaagacatgcagcaactgtgggtttaccatcaccagcgccgactacgacagggtgctggagaagctgaagaagacagcaacaggctggatgaccacaattaacggcaaggagctgaaggtggagggccagattacctactacaacagatacaagagacagaacgtagtcaaggacctgtccgtcgagctggatagactgagcgaagaatctgtgaacaacgacatctcctcctggacaaagggcagaagcggagaagctctgagcctcctgaagaaaagattctcccatagacccgtgcaggagaagttcgtgtgcctgaactgcggcttcgagacacacgcagccgagcaagccgccctgaacatcgccagatcctggctgttcctgcggagccaggagtacaagaaataccagacaaacaagacaaccggcaacaccgataagagagccttcgtcgagacctggcagtccttttaccggaagaagcttaaggaggtgtggaaacctgccgtgcggtctggcggatctggcggaggctccaccagccccaagaaaaagagaaaagtctaagctgccttctgcggggcttgccttctggccatgcccttcttctctcccttgcacctgtacctcttggtctttgaataaagcctgagtaggaaggctagcaaaaaaaaaaaaaaaaaaaaaaaaaaaaaaaaaaaaaaaaaaaaaaaaaaaaaaaaaaaaaaaaaaaaaaaaaaaaaaaa

SEQ ID NO: 2433 - RNA, 8796 nt, synthetic construct
  source 1..8796: mol_type = other RNA
aggaaataagagagaaaagaagagtaagaagaaatataagagccaccatggcccctaagaagaagcgtaaagtgagccggatgaaccacgaccaggagttcgacccccctaaggtgtaccctcccgtccccgccgagaagagaaagcccatccgggtcctgagcctgttcgatggcatcgccaccggtctgctggtgctgaaggacctgggcatccaggtggataggtacattgcctccgaggtgtgcgaggactccatcaccgtgggaatggtgcgtcatcagggcaagatcatgtacgtgggcgacgtgcggagcgtgacacagaagcatatccaggagtggggccctttcgacctggtgatcggcggcagcccttgcaatgacctgagcatcgtgaacccagcccggaagggcctgtacgagggaaccggcagactgttcttcgagttttacagactgctgcacgacgcccggcctaaggaaggcgacgaccggcccttcttttggctgttcgagaatgtggtggccatgggagtcagcgacaagcgggatattagccggttcctggagagcaaccccgtgatgatcgatgccaaggaagtgagcgccgcccaccgggccagatacttctggggcaatctgcctggcatgaacagacccctggccagcaccgtgaacgacaagctggagctgcaggagtgcctggagcacggccggatcgccaagttcagcaaggtgagaaccatcaccacccgaagcaacagcatcaaacaaggcaaggaccagcactttcctgtgttcatgaacgagaaggaggacatcctgtggtgtaccgagatggagagagtgttcgggttcccagtccactacacagatgtcagcaacatgtctagactggccagacagagactgctgggaagaagctggtccgtccctgtgatcagacacctgttcgcccctctgaaggagtacttcgcctgcgtgagcagcggcaacagcaacgccaacagccggggccccagcttctctagcggcctggtgccactgtccctgagagggagccacatgggccccatggagatctacaaaaccgtgagcgcctggaagcggcagcctgtgcgcgtgctgagcctgtttcggaatatcgataaagtcctgaaaagcctgggattcctggagagcggctctggctccggcggtggcaccctgaagtacgtggaggatgtgacaaacgtggtcagacgggatgtggagaagtggggccccttcgatctggtgtacggcagcacccaacccctgggcagctcttgtgaccggtgccctggctggtacatgtttcagttccaccggatcctgcagtacgccctgccgagacaggagtcccagcggccattcttttggattttcatggacaacttgctgctgaccgaggatgaccaggaaactaccactcggttcctgcagaccgaagccgtgaccctgcaggacgtgagaggccgggactaccagaacgccatgcgggtgtggtccaacatccctggactgaaaagcaagcacgcacctctgacccctaaagaagaggagtacctgcaggcccaggtgcggagcagaagcaagctggacgcccctaaggtggatctgctggtgaagaattgcctcctgcccctgagagagtacttcaagtatttcagccagaatagtctgcccctgggaggcagcggcggcggcgtgacctacaacgacgtgcacgtggacatcacccaggaggaatgggctctgatggaccccagccagcggaacctgtacaaggatgtgatggtcgagacatacatgaacctgaccgccatcggatataattgggagaacctggaagtggaagaaccatgtcagaaccccctgaagcacggcagacacgagagacctcatacaggcgagaaaccttacgagtacaatcagtgcggcaaggccttcgcccaacctggcggcccaagcagcggcgcccctcctcccagcggcggcaggcggcccaagcagcggcgcccctcctcccagcggcggcagcccagccggctccccaacctctaccgaggagggcacctctgagtccgccacccccgagagcggccctggcacctccaccgagcccagcgagggcagcgcacccggcagccctgccggcagccccacctccacagaggagggaaccagcaccgagcccagcgaaggcagcgccccaggcaccagcaccgagcctagtgagcaggagattaaacggatcaacaagatcagaagaagacttgtgaaagacagcaacaccaagaaggccggcaagacaggccccatgaaaaccctgctggttagagtgatgacacccgatctgagagagcggctggaaaacctgagaaagaagcctgaaaatatcccccagcccatcagcaatacatctagagccaacctgaataagctgctgaccgattacaccgaaatgaagaaggcgatcctgcatgtgtactgggaagagttccagaaggaccctgtgggcctgatgagccgggtggcccagcctgccagcaagaagatcgatcagaacaagctgaaacctgagatggacgagaagggcaacctgaccaccgccggctttgcctgctctcagtgtggccagcccctgttcgtgtacaagctggagcaggtgtctgagaagggcaaggcttacaccaactacttcggacggtgcaatgtggccgagcacgaaaagctgatcctgctggcccagctgaagcccgagaaggatagcgacgaagccgtgacatatagcctgggaaagtttgggcagagggccctggatttctacagcattcatgtgaccaaggagtccacccaccccgtgaagcccctggcccagatcgccggaaacagatacgcctccggacctgtgggaaaggccctgagcgacgcatgtatgggcacaatcgcctccttcctgtctaagtaccaggacatcatcatcgaacaccagaaggtggtgaagggcaaccagaagagactggagagcctgcgggagctggccggcaaggaaaacctggaataccctagcgtgaccctgccacctcagcctcacaccaaggagggcgttgatgcctacaacgaagtgatcgcccgggtgcgaatgtgggtgaacctgaacctgtggcagaagctgaagctaagcagagatgatgccaagcctctgctgagactgaagggattcccttcctttcctctggtcgagagacaggccaacgaagtggactggtgggacatggtgtgtaacgtgaagaagctgatcaacgagaaaaaggaggatggcaaggtgttttggcagaatctggctggctacaagagacaggaagccctgagaccatacctgagcagcgaggaagatcggaagaagggaaagaaattcgctcggtaccagctgggcgacctgctgctgcacctggaaaagaagcacggcgaggactggggaaaggtgtacgacgaggcctgggagcggattgacaagaaagtggaaggcctgagcaagcacatcaagctggaagaggaacggagaagcgaggacgcccagagcaaggccgccctgaccgactggctgcgggctaaggccagcttcgtgatcgagggcctgaaggaggccgacaaggacgagttctgcagatgcgagctgaagctgcagaagtggtacggggacctgcggggaaagcccttcgccatcgaagccgagaacagcatcctggacatcagcggcttcagcaagcagtacaactgtgccttcatctggcagaaggacggcgtgaagaagctgaacctgtacctgatcatcaactacttcaagggcggcaagctgcggttcaagaagatcaaacctgaagccttcgaagccaacagattctacaccgtgatcaacaaaaagagcggcgagatcgtgcccatggaggtgaacttcaacttcgacgaccccaacctgatcatcctgcctctggcctttggcaagagacagggcagagaattcatctggaacgacctgctgtccctggaaaccggcagcctgaagctggccaacggaagagtgatcgagaagacactgtacaacagaagaacccggcaggatgagcctgccctgttcgtggccctgaccttcgagcggcgggaggtcctggactcctccaatatcaaaccaatgaacctgatcggcgtggcaagaggcgaaaacatccccgccgtgatcgccctgaccgaccccgagggctgcccactgagccggtttaaggatagcctgggaaacccaacccacatcctgagaatcggcgagagctataaggagaagcagcggaccatccaggccaagaaggaggtggagcagcggagagccggcggctacagccggaagtacgccagcaaagccaagaatctggcagacgatatggtgagaaacaccgctagagatctgctgtactacgccgtgacccaggatgccatgctgatcttcgccaacctgagccggggcttcggccggcagggcaagcggaccttcatggccgagagacagtacacacggatggaggactggctgaccgccaagctggcctacgagggcctgagcaagacctacctgtccaagacactggcccagtacacctccaagacatgcagcaactgtgggtttaccatcaccagcgccgactacgacagggtgctggagaagctgaagaagacagcaacaggctggatgaccacaattaacggcaaggagctgaaggtggagggccagattacctactacaacagatacaagagacagaacgtagtcaaggacctgtccgtcgagctggatagactgagcgaagaatctgtgaacaacgacatctcctcctggacaaagggcagaagcggagaagctctgagcctcctgaagaaaagattctcccatagacccgtgcaggagaagttcgtgtgcctgaactgcggcttcgagacacacgcagccgagcaagccgccctgaacatcgccagatcctggctgttcctgcggagccaggagtacaagaaataccagacaaacaagacaaccggcaacaccgataagagagccttcgtcgagacctggcagtccttttaccggaagaagcttaaggaggtgtggaaacctgccgtgcggtctggcggatctggcggaggctccaccagccccaagaaaaagagaaaagtctaagctgccttctgcggggcttgccttctggccatgcccttcttctctcccttgcacctgtacctcttggtctttgaataaagcctgagtaggaaggctagcaaaaaaaaaaaaaaaaaaaaaaaaaaaaaaaaaaaaaaaaaaaaaaaaaaaaaaaaaaaaaaaaaaaaaaaaaaaaaaaagcccagccggctccccaacctctaccgaggagggcacctctgagtccgccacccccgagagcggccctggcacctccaccgagcccagcgagggcagcgcacccggcagccctgccggcagccccacctccacagaggagggaaccagcaccgagcccagcgaaggcagcgccccaggcaccagcaccgagcctagtgagcaggagattaaacggatcaacaagatcagaagaagacttgtgaaagacagcaacaccaagaaggccggcaagacaggccccatgaaaaccctgctggttagagtgatgacacccgatctgagagagcggctggaaaacctgagaaagaagcctgaaaatatcccccagcccatcagcaatacatctagagccaacctgaataagctgctgaccgattacaccgaaatgaagaaggcgatcctgcatgtgtactgggaagagttccagaaggaccctgtgggcctgatgagccgggtggcccagcctgccagcaagaagatcgatcagaacaagctgaaacctgagatggacgagaagggcaacctgaccaccgccggctttgcctgctctcagtgtggccagcccctgttcgtgtacaagctggagcaggtgtctgagaagggcaaggcttacaccaactacttcggacggtgcaatgtggccgagcacgaaaagctgatcctgctggcccagctgaagcccgagaaggatagcgacgaagccgtgacatatagcctgggaaagtttgggcagagggccctggatttctacagcattcatgtgaccaaggagtccacccaccccgtgaagcccctggcccagatcgccggaaacagatacgcctccggacctgtgggaaaggccctgagcgacgcatgtatgggcacaatcgcctccttcctgtctaagtaccaggacatcatcatcgaacaccagaaggtggtgaagggcaaccagaagagactggagagcctgcgggagctggccggcaaggaaaacctggaataccctagcgtgaccctgccacctcagcctcacaccaaggagggcgttgatgcctacaacgaagtgatcgcccgggtgcgaatgtgggtgaacctgaacctgtggcagaagctgaagctaagcagagatgatgccaagcctctgctgagactgaagggattcccttcctttcctctggtcgagagacaggccaacgaagtggactggtgggacatggtgtgtaacgtgaagaagctgatcaacgagaaaaaggaggatggcaaggtgttttggcagaatctggctggctacaagagacaggaagccctgagaccatacctgagcagcgaggaagatcggaagaagggaaagaaattcgctcggtaccagctgggcgacctgctgctgcacctggaaaagaagcacggcgaggactggggaaaggtgtacgacgaggcctgggagcggattgacaagaaagtggaaggcctgagcaagcacatcaagctggaagaggaacggagaagcgaggacgcccagagcaaggccgccctgaccgactggctgcgggctaaggccagcttcgtgatcgagggcctgaaggaggccgacaaggacgagttctgcagatgcgagctgaagctgcagaagtggtacggggacctgcggggaaagcccttcgccatcgaagccgagaacagcatcctggacatcagcggcttcagcaagcagtacaactgtgccttcatctggcagaaggacggcgtgaagaagctgaacctgtacctgatcatcaactacttcaagggcggcaagctgcggttcaagaagatcaaacctgaagccttcgaagccaacagattctacaccgtgatcaacaaaaagagcggcgagatcgtgcccatggaggtgaacttcaacttcgacgaccccaacctgatcatcctgcctctggcctttggcaagagacagggcagagaattcatctggaacgacctgctgtccctggaaaccggcagcctgaagctggccaacggaagagtgatcgagaagacactgtacaacagaagaacccggcaggatgagcctgccctgttcgtggccctgaccttcgagcggcgggaggtcctggactcctccaatatcaaaccaatgaacctgatcggcgtggcaagaggcgaaaacatccccgccgtgatcgccctgaccgaccccgagggctgcccactgagccggtttaaggatagcctgggaaacccaacccacatcctgagaatcggcgagagctataaggagaagcagcggaccatccaggccaagaaggaggtggagcagcggagagccggcggctacagccggaagtacgccagcaaagccaagaatctggcagacgatatggtgagaaacaccgctagagatctgctgtactacgccgtgacccaggatgccatgctgatcttcgccaacctgagccggggcttcggccggcagggcaagcggaccttcatggccgagagacagtacacacggatggaggactggctgaccgccaagctggcctacgagggcctgagcaagacctacctgtccaagacactggcccagtacacctccaagacatgcagcaactgtgggtttaccatcaccagcgccgactacgacagggtgctggagaagctgaagaagacagcaacaggctggatgaccacaattaacggcaaggagctgaaggtggagggccagattacctactacaacagatacaagagacagaacgtagtcaaggacctgtccgtcgagctggatagactgagcgaagaatctgtgaacaacgacatctcctcctggacaaagggcagaagcggagaagctctgagcctcctgaagaaaagattctcccatagacccgtgcaggagaagttcgtgtgcctgaactgcggcttcgagacacacgcagccgagcaagccgccctgaacatcgccagatcctggctgttcctgcggagccaggagtacaagaaataccagacaaacaagacaaccggcaacaccgataagagagccttcgtcgagacctggcagtccttttaccggaagaagcttaaggaggtgtggaaacctgccgtgcggtctggcggatctggcggaggctccaccagccccaagaaaaagagaaaagtctaagctgccttctgcggggcttgccttctggccatgcccttcttctctcccttgcacctgtacctcttggtctttgaataaagcctgagtaggaaggctagcaaaaaaaaaaaaaaaaaaaaaaaaaaaaaaaaaaaaaaaaaaaaaaaaaaaaaaaaaaaaaaaaaaaaaaaaaaaaaaaa

SEQ ID NO: 2434 - RNA, 8787 nt, synthetic construct
  source 1..8787: mol_type = other RNA
aggaaataagagagaaaagaagagtaagaagaaatataagagccaccatggcccctaagaagaagcgtaaagtgagccggatgaaccacgaccaggagttcgacccccctaaggtgtaccctcccgtccccgccgagaagagaaagcccatccgggtcctgagcctgttcgatggcatcgccaccggtctgctggtgctgaaggacctgggcatccaggtggataggtacattgcctccgaggtgtgcgaggactccatcaccgtgggaatggtgcgtcatcagggcaagatcatgtacgtgggcgacgtgcggagcgtgacacagaagcatatccaggagtggggccctttcgacctggtgatcggcggcagcccttgcaatgacctgagcatcgtgaacccagcccggaagggcctgtacgagggaaccggcagactgttcttcgagttttacagactgctgcacgacgcccggcctaaggaaggcgacgaccggcccttcttttggctgttcgagaatgtggtggccatgggagtcagcgacaagcgggatattagccggttcctggagagcaaccccgtgatgatcgatgccaaggaagtgagcgccgcccaccgggccagatacttctggggcaatctgcctggcatgaacagacccctggccagcaccgtgaacgacaagctggagctgcaggagtgcctggagcacggccggatcgccaagttcagcaaggtgagaaccatcaccacccgaagcaacagcatcaaacaaggcaaggaccagcactttcctgtgttcatgaacgagaaggaggacatcctgtggtgtaccgagatggagagagtgttcgggttcccagtccactacacagatgtcagcaacatgtctagactggccagacagagactgctgggaagaagctggtccgtccctgtgatcagacacctgttcgcccctctgaaggagtacttcgcctgcgtgagcagcggcaacagcaacgccaacagccggggccccagcttctctagcggcctggtgccactgtccctgagagggagccacatgggccccatggagatctacaaaaccgtgagcgcctggaagcggcagcctgtgcgcgtgctgagcctgtttcggaatatcgataaagtcctgaaaagcctgggattcctggagagcggctctggctccggcggtggcaccctgaagtacgtggaggatgtgacaaacgtggtcagacgggatgtggagaagtggggccccttcgatctggtgtacggcagcacccaacccctgggcagctcttgtgaccggtgccctggctggtacatgtttcagttccaccggatcctgcagtacgccctgccgagacaggagtcccagcggccattcttttggattttcatggacaacttgctgctgaccgaggatgaccaggaaactaccactcggttcctgcagaccgaagccgtgaccctgcaggacgtgagaggccgggactaccagaacgccatgcgggtgtggtccaacatccctggactgaaaagcaagcacgcacctctgacccctaaagaagaggagtacctgcaggcccaggtgcggagcagaagcaagctggacgcccctaaggtggatctgctggtgaagaattgcctcctgcccctgagagagtacttcaagtatttcagccagaatagtctgcccctgggaggcagcggcggcggctctcaggagagcgtggccttcgaggacgtggccgtctacttcaccaccaaagagtgggccatcatggtgcccgccgagagagccctgtacagagatgtgatgctggaaaactacgaggccgtggcttttgtggccgtgcctcctacaagcaagcccgctctggtgtcccacctggaacagggcaaggaaagctgcttcatccggcctccaggcgtgctgagcagaagcgactggcgggccggaggcggcccaagcagcggcgcccctcctcccagcggcggcaggcggcccaagcagcggcgcccctcctcccagcggcggcagcccagccggctccccaacctctaccgaggagggcacctctgagtccgccacccccgagagcggccctggcacctccaccgagcccagcgagggcagcgcacccggcagccctgccggcagccccacctccacagaggagggaaccagcaccgagcccagcgaaggcagcgccccaggcaccagcaccgagcctagtgagcaggagattaaacggatcaacaagatcagaagaagacttgtgaaagacagcaacaccaagaaggccggcaagacaggccccatgaaaaccctgctggttagagtgatgacacccgatctgagagagcggctggaaaacctgagaaagaagcctgaaaatatcccccagcccatcagcaatacatctagagccaacctgaataagctgctgaccgattacaccgaaatgaagaaggcgatcctgcatgtgtactgggaagagttccagaaggaccctgtgggcctgatgagccgggtggcccagcctgccagcaagaagatcgatcagaacaagctgaaacctgagatggacgagaagggcaacctgaccaccgccggctttgcctgctctcagtgtggccagcccctgttcgtgtacaagctggagcaggtgtctgagaagggcaaggcttacaccaactacttcggacggtgcaatgtggccgagcacgaaaagctgatcctgctggcccagctgaagcccgagaaggatagcgacgaagccgtgacatatagcctgggaaagtttgggcagagggccctggatttctacagcattcatgtgaccaaggagtccacccaccccgtgaagcccctggcccagatcgccggaaacagatacgcctccggacctgtgggaaaggccctgagcgacgcatgtatgggcacaatcgcctccttcctgtctaagtaccaggacatcatcatcgaacaccagaaggtggtgaagggcaaccagaagagactggagagcctgcgggagctggccggcaaggaaaacctggaataccctagcgtgaccctgccacctcagcctcacaccaaggagggcgttgatgcctacaacgaagtgatcgcccgggtgcgaatgtgggtgaacctgaacctgtggcagaagctgaagctaagcagagatgatgccaagcctctgctgagactgaagggattcccttcctttcctctggtcgagagacaggccaacgaagtggactggtgggacatggtgtgtaacgtgaagaagctgatcaacgagaaaaaggaggatggcaaggtgttttggcagaatctggctggctacaagagacaggaagccctgagaccatacctgagcagcgaggaagatcggaagaagggaaagaaattcgctcggtaccagctgggcgacctgctgctgcacctggaaaagaagcacggcgaggactggggaaaggtgtacgacgaggcctgggagcggattgacaagaaagtggaaggcctgagcaagcacatcaagctggaagaggaacggagaagcgaggacgcccagagcaaggccgccctgaccgactggctgcgggctaaggccagcttcgtgatcgagggcctgaaggaggccgacaaggacgagttctgcagatgcgagctgaagctgcagaagtggtacggggacctgcggggaaagcccttcgccatcgaagccgagaacagcatcctggacatcagcggcttcagcaagcagtacaactgtgccttcatctggcagaaggacggcgtgaagaagctgaacctgtacctgatcatcaactacttcaagggcggcaagctgcggttcaagaagatcaaacctgaagccttcgaagccaacagattctacaccgtgatcaacaaaaagagcggcgagatcgtgcccatggaggtgaacttcaacttcgacgaccccaacctgatcatcctgcctctggcctttggcaagagacagggcagagaattcatctggaacgacctgctgtccctggaaaccggcagcctgaagctggccaacggaagagtgatcgagaagacactgtacaacagaagaacccggcaggatgagcctgccctgttcgtggccctgaccttcgagcggcgggaggtcctggactcctccaatatcaaaccaatgaacctgatcggcgtggcaagaggcgaaaacatccccgccgtgatcgccctgaccgaccccgagggctgcccactgagccggtttaaggatagcctgggaaacccaacccacatcctgagaatcggcgagagctataaggagaagcagcggaccatccaggccaagaaggaggtggagcagcggagagccggcggctacagccggaagtacgccagcaaagccaagaatctggcagacgatatggtgagaaacaccgctagagatctgctgtactacgccgtgacccaggatgccatgctgatcttcgccaacctgagccggggcttcggccggcagggcaagcggaccttcatggccgagagacagtacacacggatggaggactggctgaccgccaagctggcctacgagggcctgagcaagacctacctgtccaagacactggcccagtacacctccaagacatgcagcaactgtgggtttaccatcaccagcgccgactacgacagggtgctggagaagctgaagaagacagcaacaggctggatgaccacaattaacggcaaggagctgaaggtggagggccagattacctactacaacagatacaagagacagaacgtagtcaaggacctgtccgtcgagctggatagactgagcgaagaatctgtgaacaacgacatctcctcctggacaaagggcagaagcggagaagctctgagcctcctgaagaaaagattctcccatagacccgtgcaggagaagttcgtgtgcctgaactgcggcttcgagacacacgcagccgagcaagccgccctgaacatcgccagatcctggctgttcctgcggagccaggagtacaagaaataccagacaaacaagacaaccggcaacaccgataagagagccttcgtcgagacctggcagtccttttaccggaagaagcttaaggaggtgtggaaacctgccgtgcggtctggcggatctggcggaggctccaccagccccaagaaaaagagaaaagtctaagctgccttctgcggggcttgccttctggccatgcccttcttctctcccttgcacctgtacctcttggtctttgaataaagcctgagtaggaaggctagcaaaaaaaaaaaaaaaaaaaaaaaaaaaaaaaaaaaaaaaaaaaaaaaaaaaaaaaaaaaaaaaaaaaaaaaaaaaaaaaagcccagccggctccccaacctctaccgaggagggcacctctgagtccgccacccccgagagcggccctggcacctccaccgagcccagcgagggcagcgcacccggcagccctgccggcagccccacctccacagaggagggaaccagcaccgagcccagcgaaggcagcgccccaggcaccagcaccgagcctagtgagcaggagattaaacggatcaacaagatcagaagaagacttgtgaaagacagcaacaccaagaaggccggcaagacaggccccatgaaaaccctgctggttagagtgatgacacccgatctgagagagcggctggaaaacctgagaaagaagcctgaaaatatcccccagcccatcagcaatacatctagagccaacctgaataagctgctgaccgattacaccgaaatgaagaaggcgatcctgcatgtgtactgggaagagttccagaaggaccctgtgggcctgatgagccgggtggcccagcctgccagcaagaagatcgatcagaacaagctgaaacctgagatggacgagaagggcaacctgaccaccgccggctttgcctgctctcagtgtggccagcccctgttcgtgtacaagctggagcaggtgtctgagaagggcaaggcttacaccaactacttcggacggtgcaatgtggccgagcacgaaaagctgatcctgctggcccagctgaagcccgagaaggatagcgacgaagccgtgacatatagcctgggaaagtttgggcagagggccctggatttctacagcattcatgtgaccaaggagtccacccaccccgtgaagcccctggcccagatcgccggaaacagatacgcctccggacctgtgggaaaggccctgagcgacgcatgtatgggcacaatcgcctccttcctgtctaagtaccaggacatcatcatcgaacaccagaaggtggtgaagggcaaccagaagagactggagagcctgcgggagctggccggcaaggaaaacctggaataccctagcgtgaccctgccacctcagcctcacaccaaggagggcgttgatgcctacaacgaagtgatcgcccgggtgcgaatgtgggtgaacctgaacctgtggcagaagctgaagctaagcagagatgatgccaagcctctgctgagactgaagggattcccttcctttcctctggtcgagagacaggccaacgaagtggactggtgggacatggtgtgtaacgtgaagaagctgatcaacgagaaaaaggaggatggcaaggtgttttggcagaatctggctggctacaagagacaggaagccctgagaccatacctgagcagcgaggaagatcggaagaagggaaagaaattcgctcggtaccagctgggcgacctgctgctgcacctggaaaagaagcacggcgaggactggggaaaggtgtacgacgaggcctgggagcggattgacaagaaagtggaaggcctgagcaagcacatcaagctggaagaggaacggagaagcgaggacgcccagagcaaggccgccctgaccgactggctgcgggctaaggccagcttcgtgatcgagggcctgaaggaggccgacaaggacgagttctgcagatgcgagctgaagctgcagaagtggtacggggacctgcggggaaagcccttcgccatcgaagccgagaacagcatcctggacatcagcggcttcagcaagcagtacaactgtgccttcatctggcagaaggacggcgtgaagaagctgaacctgtacctgatcatcaactacttcaagggcggcaagctgcggttcaagaagatcaaacctgaagccttcgaagccaacagattctacaccgtgatcaacaaaaagagcggcgagatcgtgcccatggaggtgaacttcaacttcgacgaccccaacctgatcatcctgcctctggcctttggcaagagacagggcagagaattcatctggaacgacctgctgtccctggaaaccggcagcctgaagctggccaacggaagagtgatcgagaagacactgtacaacagaagaacccggcaggatgagcctgccctgttcgtggccctgaccttcgagcggcgggaggtcctggactcctccaatatcaaaccaatgaacctgatcggcgtggcaagaggcgaaaacatccccgccgtgatcgccctgaccgaccccgagggctgcccactgagccggtttaaggatagcctgggaaacccaacccacatcctgagaatcggcgagagctataaggagaagcagcggaccatccaggccaagaaggaggtggagcagcggagagccggcggctacagccggaagtacgccagcaaagccaagaatctggcagacgatatggtgagaaacaccgctagagatctgctgtactacgccgtgacccaggatgccatgctgatcttcgccaacctgagccggggcttcggccggcagggcaagcggaccttcatggccgagagacagtacacacggatggaggactggctgaccgccaagctggcctacgagggcctgagcaagacctacctgtccaagacactggcccagtacacctccaagacatgcagcaactgtgggtttaccatcaccagcgccgactacgacagggtgctggagaagctgaagaagacagcaacaggctggatgaccacaattaacggcaaggagctgaaggtggagggccagattacctactacaacagatacaagagacagaacgtagtcaaggacctgtccgtcgagctggatagactgagcgaagaatctgtgaacaacgacatctcctcctggacaaagggcagaagcggagaagctctgagcctcctgaagaaaagattctcccatagacccgtgcaggagaagttcgtgtgcctgaactgcggcttcgagacacacgcagccgagcaagccgccctgaacatcgccagatcctggctgttcctgcggagccaggagtacaagaaataccagacaaacaagacaaccggcaacaccgataagagagccttcgtcgagacctggcagtccttttaccggaagaagcttaaggaggtgtggaaacctgccgtgcggtctggcggatctggcggaggctccaccagccccaagaaaaagagaaaagtctaagctgccttctgcggggcttgccttctggccatgcccttcttctctcccttgcacctgtacctcttggtctttgaataaagcctgagtaggaaggctagcaaaaaaaaaaaaaaaaaaaaaaaaaaaaaaaaaaaaaaaaaaaaaaaaaaaaaaaaaaaaaaaaaaaaaaaaaaaaaaaa

SEQ ID NO: 2435 - RNA, 8787 nt, synthetic construct
  source 1..8787: mol_type = other RNA
aggaaataagagagaaaagaagagtaagaagaaatataagagccaccatggcccctaagaagaagcgtaaagtgagccggatgaaccacgaccaggagttcgacccccctaaggtgtaccctcccgtccccgccgagaagagaaagcccatccgggtcctgagcctgttcgatggcatcgccaccggtctgctggtgctgaaggacctgggcatccaggtggataggtacattgcctccgaggtgtgcgaggactccatcaccgtgggaatggtgcgtcatcagggcaagatcatgtacgtgggcgacgtgcggagcgtgacacagaagcatatccaggagtggggccctttcgacctggtgatcggcggcagcccttgcaatgacctgagcatcgtgaacccagcccggaagggcctgtacgagggaaccggcagactgttcttcgagttttacagactgctgcacgacgcccggcctaaggaaggcgacgaccggcccttcttttggctgttcgagaatgtggtggccatgggagtcagcgacaagcgggatattagccggttcctggagagcaaccccgtgatgatcgatgccaaggaagtgagcgccgcccaccgggccagatacttctggggcaatctgcctggcatgaacagacccctggccagcaccgtgaacgacaagctggagctgcaggagtgcctggagcacggccggatcgccaagttcagcaaggtgagaaccatcaccacccgaagcaacagcatcaaacaaggcaaggaccagcactttcctgtgttcatgaacgagaaggaggacatcctgtggtgtaccgagatggagagagtgttcgggttcccagtccactacacagatgtcagcaacatgtctagactggccagacagagactgctgggaagaagctggtccgtccctgtgatcagacacctgttcgcccctctgaaggagtacttcgcctgcgtgagcagcggcaacagcaacgccaacagccggggccccagcttctctagcggcctggtgccactgtccctgagagggagccacatgggccccatggagatctacaaaaccgtgagcgcctggaagcggcagcctgtgcgcgtgctgagcctgtttcggaatatcgataaagtcctgaaaagcctgggattcctggagagcggctctggctccggcggtggcaccctgaagtacgtggaggatgtgacaaacgtggtcagacgggatgtggagaagtggggccccttcgatctggtgtacggcagcacccaacccctgggcagctcttgtgaccggtgccctggctggtacatgtttcagttccaccggatcctgcagtacgccctgccgagacaggagtcccagcggccattcttttggattttcatggacaacttgctgctgaccgaggatgaccaggaaactaccactcggttcctgcagaccgaagccgtgaccctgcaggacgtgagaggccgggactaccagaacgccatgcgggtgtggtccaacatccctggactgaaaagcaagcacgcacctctgacccctaaagaagaggagtacctgcaggcccaggtgcggagcagaagcaagctggacgcccctaaggtggatctgctggtgaagaattgcctcctgcccctgagagagtacttcaagtatttcagccagaatagtctgcccctgggaggcagcggcggcggctctaaagcccctatcacattcggcgacctggccatctacttcagccaggaggaatgggagtggctgagccccatccagaaggacctgtacgaggacgtgatgctggaaaactacagaaatctggtgtccctgggcctcagctttagacgccccaacgtgatcaccctgctggaaaagggcaaggccccatggatggtcgagcctgctagacggcggagaggacctgatagcggcagcaaggtgggcggcccaagcagcggcgcccctcctcccagcggcggcaggcggcccaagcagcggcgcccctcctcccagcggcggcagcccagccggctccccaacctctaccgaggagggcacctctgagtccgccacccccgagagcggccctggcacctccaccgagcccagcgagggcagcgcacccggcagccctgccggcagccccacctccacagaggagggaaccagcaccgagcccagcgaaggcagcgccccaggcaccagcaccgagcctagtgagcaggagattaaacggatcaacaagatcagaagaagacttgtgaaagacagcaacaccaagaaggccggcaagacaggccccatgaaaaccctgctggttagagtgatgacacccgatctgagagagcggctggaaaacctgagaaagaagcctgaaaatatcccccagcccatcagcaatacatctagagccaacctgaataagctgctgaccgattacaccgaaatgaagaaggcgatcctgcatgtgtactgggaagagttccagaaggaccctgtgggcctgatgagccgggtggcccagcctgccagcaagaagatcgatcagaacaagctgaaacctgagatggacgagaagggcaacctgaccaccgccggctttgcctgctctcagtgtggccagcccctgttcgtgtacaagctggagcaggtgtctgagaagggcaaggcttacaccaactacttcggacggtgcaatgtggccgagcacgaaaagctgatcctgctggcccagctgaagcccgagaaggatagcgacgaagccgtgacatatagcctgggaaagtttgggcagagggccctggatttctacagcattcatgtgaccaaggagtccacccaccccgtgaagcccctggcccagatcgccggaaacagatacgcctccggacctgtgggaaaggccctgagcgacgcatgtatgggcacaatcgcctccttcctgtctaagtaccaggacatcatcatcgaacaccagaaggtggtgaagggcaaccagaagagactggagagcctgcgggagctggccggcaaggaaaacctggaataccctagcgtgaccctgccacctcagcctcacaccaaggagggcgttgatgcctacaacgaagtgatcgcccgggtgcgaatgtgggtgaacctgaacctgtggcagaagctgaagctaagcagagatgatgccaagcctctgctgagactgaagggattcccttcctttcctctggtcgagagacaggccaacgaagtggactggtgggacatggtgtgtaacgtgaagaagctgatcaacgagaaaaaggaggatggcaaggtgttttggcagaatctggctggctacaagagacaggaagccctgagaccatacctgagcagcgaggaagatcggaagaagggaaagaaattcgctcggtaccagctgggcgacctgctgctgcacctggaaaagaagcacggcgaggactggggaaaggtgtacgacgaggcctgggagcggattgacaagaaagtggaaggcctgagcaagcacatcaagctggaagaggaacggagaagcgaggacgcccagagcaaggccgccctgaccgactggctgcgggctaaggccagcttcgtgatcgagggcctgaaggaggccgacaaggacgagttctgcagatgcgagctgaagctgcagaagtggtacggggacctgcggggaaagcccttcgccatcgaagccgagaacagcatcctggacatcagcggcttcagcaagcagtacaactgtgccttcatctggcagaaggacggcgtgaagaagctgaacctgtacctgatcatcaactacttcaagggcggcaagctgcggttcaagaagatcaaacctgaagccttcgaagccaacagattctacaccgtgatcaacaaaaagagcggcgagatcgtgcccatggaggtgaacttcaacttcgacgaccccaacctgatcatcctgcctctggcctttggcaagagacagggcagagaattcatctggaacgacctgctgtccctggaaaccggcagcctgaagctggccaacggaagagtgatcgagaagacactgtacaacagaagaacccggcaggatgagcctgccctgttcgtggccctgaccttcgagcggcgggaggtcctggactcctccaatatcaaaccaatgaacctgatcggcgtggcaagaggcgaaaacatccccgccgtgatcgccctgaccgaccccgagggctgcccactgagccggtttaaggatagcctgggaaacccaacccacatcctgagaatcggcgagagctataaggagaagcagcggaccatccaggccaagaaggaggtggagcagcggagagccggcggctacagccggaagtacgccagcaaagccaagaatctggcagacgatatggtgagaaacaccgctagagatctgctgtactacgccgtgacccaggatgccatgctgatcttcgccaacctgagccggggcttcggccggcagggcaagcggaccttcatggccgagagacagtacacacggatggaggactggctgaccgccaagctggcctacgagggcctgagcaagacctacctgtccaagacactggcccagtacacctccaagacatgcagcaactgtgggtttaccatcaccagcgccgactacgacagggtgctggagaagctgaagaagacagcaacaggctggatgaccacaattaacggcaaggagctgaaggtggagggccagattacctactacaacagatacaagagacagaacgtagtcaaggacctgtccgtcgagctggatagactgagcgaagaatctgtgaacaacgacatctcctcctggacaaagggcagaagcggagaagctctgagcctcctgaagaaaagattctcccatagacccgtgcaggagaagttcgtgtgcctgaactgcggcttcgagacacacgcagccgagcaagccgccctgaacatcgccagatcctggctgttcctgcggagccaggagtacaagaaataccagacaaacaagacaaccggcaacaccgataagagagccttcgtcgagacctggcagtccttttaccggaagaagcttaaggaggtgtggaaacctgccgtgcggtctggcggatctggcggaggctccaccagccccaagaaaaagagaaaagtctaagctgccttctgcggggcttgccttctggccatgcccttcttctctcccttgcacctgtacctcttggtctttgaataaagcctgagtaggaaggctagcaaaaaaaaaaaaaaaaaaaaaaaaaaaaaaaaaaaaaaaaaaaaaaaaaaaaaaaaaaaaaaaaaaaaaaaaaaaaaaaagcccagccggctccccaacctctaccgaggagggcacctctgagtccgccacccccgagagcggccctggcacctccaccgagcccagcgagggcagcgcacccggcagccctgccggcagccccacctccacagaggagggaaccagcaccgagcccagcgaaggcagcgccccaggcaccagcaccgagcctagtgagcaggagattaaacggatcaacaagatcagaagaagacttgtgaaagacagcaacaccaagaaggccggcaagacaggccccatgaaaaccctgctggttagagtgatgacacccgatctgagagagcggctggaaaacctgagaaagaagcctgaaaatatcccccagcccatcagcaatacatctagagccaacctgaataagctgctgaccgattacaccgaaatgaagaaggcgatcctgcatgtgtactgggaagagttccagaaggaccctgtgggcctgatgagccgggtggcccagcctgccagcaagaagatcgatcagaacaagctgaaacctgagatggacgagaagggcaacctgaccaccgccggctttgcctgctctcagtgtggccagcccctgttcgtgtacaagctggagcaggtgtctgagaagggcaaggcttacaccaactacttcggacggtgcaatgtggccgagcacgaaaagctgatcctgctggcccagctgaagcccgagaaggatagcgacgaagccgtgacatatagcctgggaaagtttgggcagagggccctggatttctacagcattcatgtgaccaaggagtccacccaccccgtgaagcccctggcccagatcgccggaaacagatacgcctccggacctgtgggaaaggccctgagcgacgcatgtatgggcacaatcgcctccttcctgtctaagtaccaggacatcatcatcgaacaccagaaggtggtgaagggcaaccagaagagactggagagcctgcgggagctggccggcaaggaaaacctggaataccctagcgtgaccctgccacctcagcctcacaccaaggagggcgttgatgcctacaacgaagtgatcgcccgggtgcgaatgtgggtgaacctgaacctgtggcagaagctgaagctaagcagagatgatgccaagcctctgctgagactgaagggattcccttcctttcctctggtcgagagacaggccaacgaagtggactggtgggacatggtgtgtaacgtgaagaagctgatcaacgagaaaaaggaggatggcaaggtgttttggcagaatctggctggctacaagagacaggaagccctgagaccatacctgagcagcgaggaagatcggaagaagggaaagaaattcgctcggtaccagctgggcgacctgctgctgcacctggaaaagaagcacggcgaggactggggaaaggtgtacgacgaggcctgggagcggattgacaagaaagtggaaggcctgagcaagcacatcaagctggaagaggaacggagaagcgaggacgcccagagcaaggccgccctgaccgactggctgcgggctaaggccagcttcgtgatcgagggcctgaaggaggccgacaaggacgagttctgcagatgcgagctgaagctgcagaagtggtacggggacctgcggggaaagcccttcgccatcgaagccgagaacagcatcctggacatcagcggcttcagcaagcagtacaactgtgccttcatctggcagaaggacggcgtgaagaagctgaacctgtacctgatcatcaactacttcaagggcggcaagctgcggttcaagaagatcaaacctgaagccttcgaagccaacagattctacaccgtgatcaacaaaaagagcggcgagatcgtgcccatggaggtgaacttcaacttcgacgaccccaacctgatcatcctgcctctggcctttggcaagagacagggcagagaattcatctggaacgacctgctgtccctggaaaccggcagcctgaagctggccaacggaagagtgatcgagaagacactgtacaacagaagaacccggcaggatgagcctgccctgttcgtggccctgaccttcgagcggcgggaggtcctggactcctccaatatcaaaccaatgaacctgatcggcgtggcaagaggcgaaaacatccccgccgtgatcgccctgaccgaccccgagggctgcccactgagccggtttaaggatagcctgggaaacccaacccacatcctgagaatcggcgagagctataaggagaagcagcggaccatccaggccaagaaggaggtggagcagcggagagccggcggctacagccggaagtacgccagcaaagccaagaatctggcagacgatatggtgagaaacaccgctagagatctgctgtactacgccgtgacccaggatgccatgctgatcttcgccaacctgagccggggcttcggccggcagggcaagcggaccttcatggccgagagacagtacacacggatggaggactggctgaccgccaagctggcctacgagggcctgagcaagacctacctgtccaagacactggcccagtacacctccaagacatgcagcaactgtgggtttaccatcaccagcgccgactacgacagggtgctggagaagctgaagaagacagcaacaggctggatgaccacaattaacggcaaggagctgaaggtggagggccagattacctactacaacagatacaagagacagaacgtagtcaaggacctgtccgtcgagctggatagactgagcgaagaatctgtgaacaacgacatctcctcctggacaaagggcagaagcggagaagctctgagcctcctgaagaaaagattctcccatagacccgtgcaggagaagttcgtgtgcctgaactgcggcttcgagacacacgcagccgagcaagccgccctgaacatcgccagatcctggctgttcctgcggagccaggagtacaagaaataccagacaaacaagacaaccggcaacaccgataagagagccttcgtcgagacctggcagtccttttaccggaagaagcttaaggaggtgtggaaacctgccgtgcggtctggcggatctggcggaggctccaccagccccaagaaaaagagaaaagtctaagctgccttctgcggggcttgccttctggccatgcccttcttctctcccttgcacctgtacctcttggtctttgaataaagcctgagtaggaaggctagcaaaaaaaaaaaaaaaaaaaaaaaaaaaaaaaaaaaaaaaaaaaaaaaaaaaaaaaaaaaaaaaaaaaaaaaaaaaaaaaa

SEQ ID NO: 2436 - RNA, 8787 nt, synthetic construct
  source 1..8787: mol_type = other RNA
aggaaataagagagaaaagaagagtaagaagaaatataagagccaccatggcccctaagaagaagcgtaaagtgagccggatgaaccacgaccaggagttcgacccccctaaggtgtaccctcccgtccccgccgagaagagaaagcccatccgggtcctgagcctgttcgatggcatcgccaccggtctgctggtgctgaaggacctgggcatccaggtggataggtacattgcctccgaggtgtgcgaggactccatcaccgtgggaatggtgcgtcatcagggcaagatcatgtacgtgggcgacgtgcggagcgtgacacagaagcatatccaggagtggggccctttcgacctggtgatcggcggcagcccttgcaatgacctgagcatcgtgaacccagcccggaagggcctgtacgagggaaccggcagactgttcttcgagttttacagactgctgcacgacgcccggcctaaggaaggcgacgaccggcccttcttttggctgttcgagaatgtggtggccatgggagtcagcgacaagcgggatattagccggttcctggagagcaaccccgtgatgatcgatgccaaggaagtgagcgccgcccaccgggccagatacttctggggcaatctgcctggcatgaacagacccctggccagcaccgtgaacgacaagctggagctgcaggagtgcctggagcacggccggatcgccaagttcagcaaggtgagaaccatcaccacccgaagcaacagcatcaaacaaggcaaggaccagcactttcctgtgttcatgaacgagaaggaggacatcctgtggtgtaccgagatggagagagtgttcgggttcccagtccactacacagatgtcagcaacatgtctagactggccagacagagactgctgggaagaagctggtccgtccctgtgatcagacacctgttcgcccctctgaaggagtacttcgcctgcgtgagcagcggcaacagcaacgccaacagccggggccccagcttctctagcggcctggtgccactgtccctgagagggagccacatgggccccatggagatctacaaaaccgtgagcgcctggaagcggcagcctgtgcgcgtgctgagcctgtttcggaatatcgataaagtcctgaaaagcctgggattcctggagagcggctctggctccggcggtggcaccctgaagtacgtggaggatgtgacaaacgtggtcagacgggatgtggagaagtggggccccttcgatctggtgtacggcagcacccaacccctgggcagctcttgtgaccggtgccctggctggtacatgtttcagttccaccggatcctgcagtacgccctgccgagacaggagtcccagcggccattcttttggattttcatggacaacttgctgctgaccgaggatgaccaggaaactaccactcggttcctgcagaccgaagccgtgaccctgcaggacgtgagaggccgggactaccagaacgccatgcgggtgtggtccaacatccctggactgaaaagcaagcacgcacctctgacccctaaagaagaggagtacctgcaggcccaggtgcggagcagaagcaagctggacgcccctaaggtggatctgctggtgaagaattgcctcctgcccctgagagagtacttcaagtatttcagccagaatagtctgcccctgggaggcagcggcggcggcgagatgggcctgctgacattcagagacatcgctatcgagttcagcctggaggaatggcaatgtctggactgcgcccagagaaatctgtacagagatgtgatgctggaaaactaccggaacctggtgtctctgggcatcgccgtgtccaagcccgacctgatcacctgcctcgagcagaacaaggaaagccagaacatcaagcggaacaaaatggtcgccaagcaccctgtgatgcacagccacggcggcccaagcagcggcgcccctcctcccagcggcggcaggcggcccaagcagcggcgcccctcctcccagcggcggcagcccagccggctccccaacctctaccgaggagggcacctctgagtccgccacccccgagagcggccctggcacctccaccgagcccagcgagggcagcgcacccggcagccctgccggcagccccacctccacagaggagggaaccagcaccgagcccagcgaaggcagcgccccaggcaccagcaccgagcctagtgagcaggagattaaacggatcaacaagatcagaagaagacttgtgaaagacagcaacaccaagaaggccggcaagacaggccccatgaaaaccctgctggttagagtgatgacacccgatctgagagagcggctggaaaacctgagaaagaagcctgaaaatatcccccagcccatcagcaatacatctagagccaacctgaataagctgctgaccgattacaccgaaatgaagaaggcgatcctgcatgtgtactgggaagagttccagaaggaccctgtgggcctgatgagccgggtggcccagcctgccagcaagaagatcgatcagaacaagctgaaacctgagatggacgagaagggcaacctgaccaccgccggctttgcctgctctcagtgtggccagcccctgttcgtgtacaagctggagcaggtgtctgagaagggcaaggcttacaccaactacttcggacggtgcaatgtggccgagcacgaaaagctgatcctgctggcccagctgaagcccgagaaggatagcgacgaagccgtgacatatagcctgggaaagtttgggcagagggccctggatttctacagcattcatgtgaccaaggagtccacccaccccgtgaagcccctggcccagatcgccggaaacagatacgcctccggacctgtgggaaaggccctgagcgacgcatgtatgggcacaatcgcctccttcctgtctaagtaccaggacatcatcatcgaacaccagaaggtggtgaagggcaaccagaagagactggagagcctgcgggagctggccggcaaggaaaacctggaataccctagcgtgaccctgccacctcagcctcacaccaaggagggcgttgatgcctacaacgaagtgatcgcccgggtgcgaatgtgggtgaacctgaacctgtggcagaagctgaagctaagcagagatgatgccaagcctctgctgagactgaagggattcccttcctttcctctggtcgagagacaggccaacgaagtggactggtgggacatggtgtgtaacgtgaagaagctgatcaacgagaaaaaggaggatggcaaggtgttttggcagaatctggctggctacaagagacaggaagccctgagaccatacctgagcagcgaggaagatcggaagaagggaaagaaattcgctcggtaccagctgggcgacctgctgctgcacctggaaaagaagcacggcgaggactggggaaaggtgtacgacgaggcctgggagcggattgacaagaaagtggaaggcctgagcaagcacatcaagctggaagaggaacggagaagcgaggacgcccagagcaaggccgccctgaccgactggctgcgggctaaggccagcttcgtgatcgagggcctgaaggaggccgacaaggacgagttctgcagatgcgagctgaagctgcagaagtggtacggggacctgcggggaaagcccttcgccatcgaagccgagaacagcatcctggacatcagcggcttcagcaagcagtacaactgtgccttcatctggcagaaggacggcgtgaagaagctgaacctgtacctgatcatcaactacttcaagggcggcaagctgcggttcaagaagatcaaacctgaagccttcgaagccaacagattctacaccgtgatcaacaaaaagagcggcgagatcgtgcccatggaggtgaacttcaacttcgacgaccccaacctgatcatcctgcctctggcctttggcaagagacagggcagagaattcatctggaacgacctgctgtccctggaaaccggcagcctgaagctggccaacggaagagtgatcgagaagacactgtacaacagaagaacccggcaggatgagcctgccctgttcgtggccctgaccttcgagcggcgggaggtcctggactcctccaatatcaaaccaatgaacctgatcggcgtggcaagaggcgaaaacatccccgccgtgatcgccctgaccgaccccgagggctgcccactgagccggtttaaggatagcctgggaaacccaacccacatcctgagaatcggcgagagctataaggagaagcagcggaccatccaggccaagaaggaggtggagcagcggagagccggcggctacagccggaagtacgccagcaaagccaagaatctggcagacgatatggtgagaaacaccgctagagatctgctgtactacgccgtgacccaggatgccatgctgatcttcgccaacctgagccggggcttcggccggcagggcaagcggaccttcatggccgagagacagtacacacggatggaggactggctgaccgccaagctggcctacgagggcctgagcaagacctacctgtccaagacactggcccagtacacctccaagacatgcagcaactgtgggtttaccatcaccagcgccgactacgacagggtgctggagaagctgaagaagacagcaacaggctggatgaccacaattaacggcaaggagctgaaggtggagggccagattacctactacaacagatacaagagacagaacgtagtcaaggacctgtccgtcgagctggatagactgagcgaagaatctgtgaacaacgacatctcctcctggacaaagggcagaagcggagaagctctgagcctcctgaagaaaagattctcccatagacccgtgcaggagaagttcgtgtgcctgaactgcggcttcgagacacacgcagccgagcaagccgccctgaacatcgccagatcctggctgttcctgcggagccaggagtacaagaaataccagacaaacaagacaaccggcaacaccgataagagagccttcgtcgagacctggcagtccttttaccggaagaagcttaaggaggtgtggaaacctgccgtgcggtctggcggatctggcggaggctccaccagccccaagaaaaagagaaaagtctaagctgccttctgcggggcttgccttctggccatgcccttcttctctcccttgcacctgtacctcttggtctttgaataaagcctgagtaggaaggctagcaaaaaaaaaaaaaaaaaaaaaaaaaaaaaaaaaaaaaaaaaaaaaaaaaaaaaaaaaaaaaaaaaaaaaaaaaaaaaaaagcccagccggctccccaacctctaccgaggagggcacctctgagtccgccacccccgagagcggccctggcacctccaccgagcccagcgagggcagcgcacccggcagccctgccggcagccccacctccacagaggagggaaccagcaccgagcccagcgaaggcagcgccccaggcaccagcaccgagcctagtgagcaggagattaaacggatcaacaagatcagaagaagacttgtgaaagacagcaacaccaagaaggccggcaagacaggccccatgaaaaccctgctggttagagtgatgacacccgatctgagagagcggctggaaaacctgagaaagaagcctgaaaatatcccccagcccatcagcaatacatctagagccaacctgaataagctgctgaccgattacaccgaaatgaagaaggcgatcctgcatgtgtactgggaagagttccagaaggaccctgtgggcctgatgagccgggtggcccagcctgccagcaagaagatcgatcagaacaagctgaaacctgagatggacgagaagggcaacctgaccaccgccggctttgcctgctctcagtgtggccagcccctgttcgtgtacaagctggagcaggtgtctgagaagggcaaggcttacaccaactacttcggacggtgcaatgtggccgagcacgaaaagctgatcctgctggcccagctgaagcccgagaaggatagcgacgaagccgtgacatatagcctgggaaagtttgggcagagggccctggatttctacagcattcatgtgaccaaggagtccacccaccccgtgaagcccctggcccagatcgccggaaacagatacgcctccggacctgtgggaaaggccctgagcgacgcatgtatgggcacaatcgcctccttcctgtctaagtaccaggacatcatcatcgaacaccagaaggtggtgaagggcaaccagaagagactggagagcctgcgggagctggccggcaaggaaaacctggaataccctagcgtgaccctgccacctcagcctcacaccaaggagggcgttgatgcctacaacgaagtgatcgcccgggtgcgaatgtgggtgaacctgaacctgtggcagaagctgaagctaagcagagatgatgccaagcctctgctgagactgaagggattcccttcctttcctctggtcgagagacaggccaacgaagtggactggtgggacatggtgtgtaacgtgaagaagctgatcaacgagaaaaaggaggatggcaaggtgttttggcagaatctggctggctacaagagacaggaagccctgagaccatacctgagcagcgaggaagatcggaagaagggaaagaaattcgctcggtaccagctgggcgacctgctgctgcacctggaaaagaagcacggcgaggactggggaaaggtgtacgacgaggcctgggagcggattgacaagaaagtggaaggcctgagcaagcacatcaagctggaagaggaacggagaagcgaggacgcccagagcaaggccgccctgaccgactggctgcgggctaaggccagcttcgtgatcgagggcctgaaggaggccgacaaggacgagttctgcagatgcgagctgaagctgcagaagtggtacggggacctgcggggaaagcccttcgccatcgaagccgagaacagcatcctggacatcagcggcttcagcaagcagtacaactgtgccttcatctggcagaaggacggcgtgaagaagctgaacctgtacctgatcatcaactacttcaagggcggcaagctgcggttcaagaagatcaaacctgaagccttcgaagccaacagattctacaccgtgatcaacaaaaagagcggcgagatcgtgcccatggaggtgaacttcaacttcgacgaccccaacctgatcatcctgcctctggcctttggcaagagacagggcagagaattcatctggaacgacctgctgtccctggaaaccggcagcctgaagctggccaacggaagagtgatcgagaagacactgtacaacagaagaacccggcaggatgagcctgccctgttcgtggccctgaccttcgagcggcgggaggtcctggactcctccaatatcaaaccaatgaacctgatcggcgtggcaagaggcgaaaacatccccgccgtgatcgccctgaccgaccccgagggctgcccactgagccggtttaaggatagcctgggaaacccaacccacatcctgagaatcggcgagagctataaggagaagcagcggaccatccaggccaagaaggaggtggagcagcggagagccggcggctacagccggaagtacgccagcaaagccaagaatctggcagacgatatggtgagaaacaccgctagagatctgctgtactacgccgtgacccaggatgccatgctgatcttcgccaacctgagccggggcttcggccggcagggcaagcggaccttcatggccgagagacagtacacacggatggaggactggctgaccgccaagctggcctacgagggcctgagcaagacctacctgtccaagacactggcccagtacacctccaagacatgcagcaactgtgggtttaccatcaccagcgccgactacgacagggtgctggagaagctgaagaagacagcaacaggctggatgaccacaattaacggcaaggagctgaaggtggagggccagattacctactacaacagatacaagagacagaacgtagtcaaggacctgtccgtcgagctggatagactgagcgaagaatctgtgaacaacgacatctcctcctggacaaagggcagaagcggagaagctctgagcctcctgaagaaaagattctcccatagacccgtgcaggagaagttcgtgtgcctgaactgcggcttcgagacacacgcagccgagcaagccgccctgaacatcgccagatcctggctgttcctgcggagccaggagtacaagaaataccagacaaacaagacaaccggcaacaccgataagagagccttcgtcgagacctggcagtccttttaccggaagaagcttaaggaggtgtggaaacctgccgtgcggtctggcggatctggcggaggctccaccagccccaagaaaaagagaaaagtctaagctgccttctgcggggcttgccttctggccatgcccttcttctctcccttgcacctgtacctcttggtctttgaataaagcctgagtaggaaggctagcaaaaaaaaaaaaaaaaaaaaaaaaaaaaaaaaaaaaaaaaaaaaaaaaaaaaaaaaaaaaaaaaaaaaaaaaaaaaaaaa

SEQ ID NO: 2437 - RNA, 8787 nt, synthetic construct
  source 1..8787: mol_type = other RNA
aggaaataagagagaaaagaagagtaagaagaaatataagagccaccatggcccctaagaagaagcgtaaagtgagccggatgaaccacgaccaggagttcgacccccctaaggtgtaccctcccgtccccgccgagaagagaaagcccatccgggtcctgagcctgttcgatggcatcgccaccggtctgctggtgctgaaggacctgggcatccaggtggataggtacattgcctccgaggtgtgcgaggactccatcaccgtgggaatggtgcgtcatcagggcaagatcatgtacgtgggcgacgtgcggagcgtgacacagaagcatatccaggagtggggccctttcgacctggtgatcggcggcagcccttgcaatgacctgagcatcgtgaacccagcccggaagggcctgtacgagggaaccggcagactgttcttcgagttttacagactgctgcacgacgcccggcctaaggaaggcgacgaccggcccttcttttggctgttcgagaatgtggtggccatgggagtcagcgacaagcgggatattagccggttcctggagagcaaccccgtgatgatcgatgccaaggaagtgagcgccgcccaccgggccagatacttctggggcaatctgcctggcatgaacagacccctggccagcaccgtgaacgacaagctggagctgcaggagtgcctggagcacggccggatcgccaagttcagcaaggtgagaaccatcaccacccgaagcaacagcatcaaacaaggcaaggaccagcactttcctgtgttcatgaacgagaaggaggacatcctgtggtgtaccgagatggagagagtgttcgggttcccagtccactacacagatgtcagcaacatgtctagactggccagacagagactgctgggaagaagctggtccgtccctgtgatcagacacctgttcgcccctctgaaggagtacttcgcctgcgtgagcagcggcaacagcaacgccaacagccggggccccagcttctctagcggcctggtgccactgtccctgagagggagccacatgggccccatggagatctacaaaaccgtgagcgcctggaagcggcagcctgtgcgcgtgctgagcctgtttcggaatatcgataaagtcctgaaaagcctgggattcctggagagcggctctggctccggcggtggcaccctgaagtacgtggaggatgtgacaaacgtggtcagacgggatgtggagaagtggggccccttcgatctggtgtacggcagcacccaacccctgggcagctcttgtgaccggtgccctggctggtacatgtttcagttccaccggatcctgcagtacgccctgccgagacaggagtcccagcggccattcttttggattttcatggacaacttgctgctgaccgaggatgaccaggaaactaccactcggttcctgcagaccgaagccgtgaccctgcaggacgtgagaggccgggactaccagaacgccatgcgggtgtggtccaacatccctggactgaaaagcaagcacgcacctctgacccctaaagaagaggagtacctgcaggcccaggtgcggagcagaagcaagctggacgcccctaaggtggatctgctggtgaagaattgcctcctgcccctgagagagtacttcaagtatttcagccagaatagtctgcccctgggaggcagcggcggcggcctgctgaccttcgaggacgtcgccgtgtccttcagcgaggaagaatgggagctgctcgatcctcctcagaaaaccctgtacaacgacgtgatgcaagagaactacgagacagtgatctctctgggcctgaagctgaagaacgacaccggaaatgatcagcccatcagcatcagcgccctggaaatgcaggccagcggcagcaaggtgctgcggaaggccagaatgaaagtggctcagaagacaggcggcccaagcagcggcgcccctcctcccagcggcggcaggcggcccaagcagcggcgcccctcctcccagcggcggcagcccagccggctccccaacctctaccgaggagggcacctctgagtccgccacccccgagagcggccctggcacctccaccgagcccagcgagggcagcgcacccggcagccctgccggcagccccacctccacagaggagggaaccagcaccgagcccagcgaaggcagcgccccaggcaccagcaccgagcctagtgagcaggagattaaacggatcaacaagatcagaagaagacttgtgaaagacagcaacaccaagaaggccggcaagacaggccccatgaaaaccctgctggttagagtgatgacacccgatctgagagagcggctggaaaacctgagaaagaagcctgaaaatatcccccagcccatcagcaatacatctagagccaacctgaataagctgctgaccgattacaccgaaatgaagaaggcgatcctgcatgtgtactgggaagagttccagaaggaccctgtgggcctgatgagccgggtggcccagcctgccagcaagaagatcgatcagaacaagctgaaacctgagatggacgagaagggcaacctgaccaccgccggctttgcctgctctcagtgtggccagcccctgttcgtgtacaagctggagcaggtgtctgagaagggcaaggcttacaccaactacttcggacggtgcaatgtggccgagcacgaaaagctgatcctgctggcccagctgaagcccgagaaggatagcgacgaagccgtgacatatagcctgggaaagtttgggcagagggccctggatttctacagcattcatgtgaccaaggagtccacccaccccgtgaagcccctggcccagatcgccggaaacagatacgcctccggacctgtgggaaaggccctgagcgacgcatgtatgggcacaatcgcctccttcctgtctaagtaccaggacatcatcatcgaacaccagaaggtggtgaagggcaaccagaagagactggagagcctgcgggagctggccggcaaggaaaacctggaataccctagcgtgaccctgccacctcagcctcacaccaaggagggcgttgatgcctacaacgaagtgatcgcccgggtgcgaatgtgggtgaacctgaacctgtggcagaagctgaagctaagcagagatgatgccaagcctctgctgagactgaagggattcccttcctttcctctggtcgagagacaggccaacgaagtggactggtgggacatggtgtgtaacgtgaagaagctgatcaacgagaaaaaggaggatggcaaggtgttttggcagaatctggctggctacaagagacaggaagccctgagaccatacctgagcagcgaggaagatcggaagaagggaaagaaattcgctcggtaccagctgggcgacctgctgctgcacctggaaaagaagcacggcgaggactggggaaaggtgtacgacgaggcctgggagcggattgacaagaaagtggaaggcctgagcaagcacatcaagctggaagaggaacggagaagcgaggacgcccagagcaaggccgccctgaccgactggctgcgggctaaggccagcttcgtgatcgagggcctgaaggaggccgacaaggacgagttctgcagatgcgagctgaagctgcagaagtggtacggggacctgcggggaaagcccttcgccatcgaagccgagaacagcatcctggacatcagcggcttcagcaagcagtacaactgtgccttcatctggcagaaggacggcgtgaagaagctgaacctgtacctgatcatcaactacttcaagggcggcaagctgcggttcaagaagatcaaacctgaagccttcgaagccaacagattctacaccgtgatcaacaaaaagagcggcgagatcgtgcccatggaggtgaacttcaacttcgacgaccccaacctgatcatcctgcctctggcctttggcaagagacagggcagagaattcatctggaacgacctgctgtccctggaaaccggcagcctgaagctggccaacggaagagtgatcgagaagacactgtacaacagaagaacccggcaggatgagcctgccctgttcgtggccctgaccttcgagcggcgggaggtcctggactcctccaatatcaaaccaatgaacctgatcggcgtggcaagaggcgaaaacatccccgccgtgatcgccctgaccgaccccgagggctgcccactgagccggtttaaggatagcctgggaaacccaacccacatcctgagaatcggcgagagctataaggagaagcagcggaccatccaggccaagaaggaggtggagcagcggagagccggcggctacagccggaagtacgccagcaaagccaagaatctggcagacgatatggtgagaaacaccgctagagatctgctgtactacgccgtgacccaggatgccatgctgatcttcgccaacctgagccggggcttcggccggcagggcaagcggaccttcatggccgagagacagtacacacggatggaggactggctgaccgccaagctggcctacgagggcctgagcaagacctacctgtccaagacactggcccagtacacctccaagacatgcagcaactgtgggtttaccatcaccagcgccgactacgacagggtgctggagaagctgaagaagacagcaacaggctggatgaccacaattaacggcaaggagctgaaggtggagggccagattacctactacaacagatacaagagacagaacgtagtcaaggacctgtccgtcgagctggatagactgagcgaagaatctgtgaacaacgacatctcctcctggacaaagggcagaagcggagaagctctgagcctcctgaagaaaagattctcccatagacccgtgcaggagaagttcgtgtgcctgaactgcggcttcgagacacacgcagccgagcaagccgccctgaacatcgccagatcctggctgttcctgcggagccaggagtacaagaaataccagacaaacaagacaaccggcaacaccgataagagagccttcgtcgagacctggcagtccttttaccggaagaagcttaaggaggtgtggaaacctgccgtgcggtctggcggatctggcggaggctccaccagccccaagaaaaagagaaaagtctaagctgccttctgcggggcttgccttctggccatgcccttcttctctcccttgcacctgtacctcttggtctttgaataaagcctgagtaggaaggctagcaaaaaaaaaaaaaaaaaaaaaaaaaaaaaaaaaaaaaaaaaaaaaaaaaaaaaaaaaaaaaaaaaaaaaaaaaaaaaaaagcccagccggctccccaacctctaccgaggagggcacctctgagtccgccacccccgagagcggccctggcacctccaccgagcccagcgagggcagcgcacccggcagccctgccggcagccccacctccacagaggagggaaccagcaccgagcccagcgaaggcagcgccccaggcaccagcaccgagcctagtgagcaggagattaaacggatcaacaagatcagaagaagacttgtgaaagacagcaacaccaagaaggccggcaagacaggccccatgaaaaccctgctggttagagtgatgacacccgatctgagagagcggctggaaaacctgagaaagaagcctgaaaatatcccccagcccatcagcaatacatctagagccaacctgaataagctgctgaccgattacaccgaaatgaagaaggcgatcctgcatgtgtactgggaagagttccagaaggaccctgtgggcctgatgagccgggtggcccagcctgccagcaagaagatcgatcagaacaagctgaaacctgagatggacgagaagggcaacctgaccaccgccggctttgcctgctctcagtgtggccagcccctgttcgtgtacaagctggagcaggtgtctgagaagggcaaggcttacaccaactacttcggacggtgcaatgtggccgagcacgaaaagctgatcctgctggcccagctgaagcccgagaaggatagcgacgaagccgtgacatatagcctgggaaagtttgggcagagggccctggatttctacagcattcatgtgaccaaggagtccacccaccccgtgaagcccctggcccagatcgccggaaacagatacgcctccggacctgtgggaaaggccctgagcgacgcatgtatgggcacaatcgcctccttcctgtctaagtaccaggacatcatcatcgaacaccagaaggtggtgaagggcaaccagaagagactggagagcctgcgggagctggccggcaaggaaaacctggaataccctagcgtgaccctgccacctcagcctcacaccaaggagggcgttgatgcctacaacgaagtgatcgcccgggtgcgaatgtgggtgaacctgaacctgtggcagaagctgaagctaagcagagatgatgccaagcctctgctgagactgaagggattcccttcctttcctctggtcgagagacaggccaacgaagtggactggtgggacatggtgtgtaacgtgaagaagctgatcaacgagaaaaaggaggatggcaaggtgttttggcagaatctggctggctacaagagacaggaagccctgagaccatacctgagcagcgaggaagatcggaagaagggaaagaaattcgctcggtaccagctgggcgacctgctgctgcacctggaaaagaagcacggcgaggactggggaaaggtgtacgacgaggcctgggagcggattgacaagaaagtggaaggcctgagcaagcacatcaagctggaagaggaacggagaagcgaggacgcccagagcaaggccgccctgaccgactggctgcgggctaaggccagcttcgtgatcgagggcctgaaggaggccgacaaggacgagttctgcagatgcgagctgaagctgcagaagtggtacggggacctgcggggaaagcccttcgccatcgaagccgagaacagcatcctggacatcagcggcttcagcaagcagtacaactgtgccttcatctggcagaaggacggcgtgaagaagctgaacctgtacctgatcatcaactacttcaagggcggcaagctgcggttcaagaagatcaaacctgaagccttcgaagccaacagattctacaccgtgatcaacaaaaagagcggcgagatcgtgcccatggaggtgaacttcaacttcgacgaccccaacctgatcatcctgcctctggcctttggcaagagacagggcagagaattcatctggaacgacctgctgtccctggaaaccggcagcctgaagctggccaacggaagagtgatcgagaagacactgtacaacagaagaacccggcaggatgagcctgccctgttcgtggccctgaccttcgagcggcgggaggtcctggactcctccaatatcaaaccaatgaacctgatcggcgtggcaagaggcgaaaacatccccgccgtgatcgccctgaccgaccccgagggctgcccactgagccggtttaaggatagcctgggaaacccaacccacatcctgagaatcggcgagagctataaggagaagcagcggaccatccaggccaagaaggaggtggagcagcggagagccggcggctacagccggaagtacgccagcaaagccaagaatctggcagacgatatggtgagaaacaccgctagagatctgctgtactacgccgtgacccaggatgccatgctgatcttcgccaacctgagccggggcttcggccggcagggcaagcggaccttcatggccgagagacagtacacacggatggaggactggctgaccgccaagctggcctacgagggcctgagcaagacctacctgtccaagacactggcccagtacacctccaagacatgcagcaactgtgggtttaccatcaccagcgccgactacgacagggtgctggagaagctgaagaagacagcaacaggctggatgaccacaattaacggcaaggagctgaaggtggagggccagattacctactacaacagatacaagagacagaacgtagtcaaggacctgtccgtcgagctggatagactgagcgaagaatctgtgaacaacgacatctcctcctggacaaagggcagaagcggagaagctctgagcctcctgaagaaaagattctcccatagacccgtgcaggagaagttcgtgtgcctgaactgcggcttcgagacacacgcagccgagcaagccgccctgaacatcgccagatcctggctgttcctgcggagccaggagtacaagaaataccagacaaacaagacaaccggcaacaccgataagagagccttcgtcgagacctggcagtccttttaccggaagaagcttaaggaggtgtggaaacctgccgtgcggtctggcggatctggcggaggctccaccagccccaagaaaaagagaaaagtctaagctgccttctgcggggcttgccttctggccatgcccttcttctctcccttgcacctgtacctcttggtctttgaataaagcctgagtaggaaggctagcaaaaaaaaaaaaaaaaaaaaaaaaaaaaaaaaaaaaaaaaaaaaaaaaaaaaaaaaaaaaaaaaaaaaaaaaaaaaaaaa

SEQ ID NO: 2438 - RNA, 5785 nt, synthetic construct
  source 1..5785: mol_type = other RNA
aggaaataagagagaaaagaagagtaagaagaaatataagagccaccatggcccctaagaagaagcgtaaagtgagccggatggaacgcctcgtctacgaggtgcggcagaagtgcagaaacatcgaggacatctgcatctcctgcggatctctgaacgtgaccctggagcacccactgttcatcggcggcatgtgccagaactgtaaaaactgttttctggagtgtgcctatcaatacgacgatgacggctaccagagctactgcaccatctgttgcggcggaagagaggtgctgatgtgtggaaataacaactgctgccggtgcttctgcgtggaatgcgtggacctgctggtgggccccggcgccgcccaggccgctattaaggaagatccttggaactgctacatgtgcggccacaagggcacatacggcctgctgagacggagagaggactggcctagcagactgcagatgttcttcgccaataaccacgaccaggagttcgacccccctaaggtgtaccctcccgtccccgccgagaagagaaagcccatccgggtcctgagcctgttcgatggcatcgccaccggtctgctggtgctgaaggacctgggcatccaggtggataggtacattgcctccgaggtgtgcgaggactccatcaccgtgggaatggtgcgtcatcagggcaagatcatgtacgtgggcgacgtgcggagcgtgacacagaagcatatccaggagtggggccctttcgacctggtgatcggcggcagcccttgcaatgacctgagcatcgtgaacccagcccggaagggcctgtacgagggaaccggcagactgttcttcgagttttacagactgctgcacgacgcccggcctaaggaaggcgacgaccggcccttcttttggctgttcgagaatgtggtggccatgggagtcagcgacaagcgggatattagccggttcctggagagcaaccccgtgatgatcgatgccaaggaagtgagcgccgcccaccgggccagatacttctggggcaatctgcctggcatgaacagacccctggccagcaccgtgaacgacaagctggagctgcaggagtgcctggagcacggccggatcgccaagttcagcaaggtgagaaccatcaccacccgaagcaacagcatcaaacaaggcaaggaccagcactttcctgtgttcatgaacgagaaggaggacatcctgtggtgtaccgagatggagagagtgttcgggttcccagtccactacacagatgtcagcaacatgtctagactggccagacagagactgctgggaagaagctggtccgtccctgtgatcagacacctgttcgcccctctgaaggagtacttcgcctgcgtgagcagcggcaacagcaacgccaacagccggggccccagcttctctagcggcctggtgccactgtccctgagagggagccacatgggccccatggagatctacaaaaccgtgagcgcctggaagcggcagcctgtgcgcgtgctgagcctgtttcggaatatcgataaagtcctgaaaagcctgggattcctggagagcggctctggctccggcggtggcaccctgaagtacgtggaggatgtgacaaacgtggtcagacgggatgtggagaagtggggccccttcgatctggtgtacggcagcacccaacccctgggcagctcttgtgaccggtgccctggctggtacatgtttcagttccaccggatcctgcagtacgccctgccgagacaggagtcccagcggccattcttttggattttcatggacaacttgctgctgaccgaggatgaccaggaaactaccactcggttcctgcagaccgaagccgtgaccctgcaggacgtgagaggccgggactaccagaacgccatgcgggtgtggtccaacatccctggactgaaaagcaagcacgcacctctgacccctaaagaagaggagtacctgcaggcccaggtgcggagcagaagcaagctggacgcccctaaggtggatctgctggtgaagaattgcctcctgcccctgagagagtacttcaagtatttcagccagaatagtctgcccctgggaggcagcggcggcggcgccctggtgacatttgaggacgtcgccgtgcggttcacccaggaggaatgggctctgctggatccttctcagaaaatcctgtaccgggacgtgatgagagagacataccggaatctgacctccgtgggcatcaactgggaatgttgggaccttgaagcctgcttcagaagcctgggaagaaacctgagagtgcaggtggtgaagagaaagtgcgagctgaccaacagcggcccctgcgccgagggcggcccaagcagcggcgcccctcctcccagcggcggcagcccagccggctccccaacctctaccgaggagggcacctctgagtccgccacccccgagagcggccctggcacctccaccgagcccagcgagggcagcgcacccggcagccctgccggcagccccacctccacagaggagggaaccagcaccgagcccagcgaaggcagcgccccaggcaccagcaccgagcctagtgagcaggagattaaacggatcaacaagatcagaagaagacttgtgaaagacagcaacaccaagaaggccggcaagacaggccccatgaaaaccctgctggttagagtgatgacacccgatctgagagagcggctggaaaacctgagaaagaagcctgaaaatatcccccagcccatcagcaatacatctagagccaacctgaataagctgctgaccgattacaccgaaatgaagaaggcgatcctgcatgtgtactgggaagagttccagaaggaccctgtgggcctgatgagccgggtggcccagcctgccagcaagaagatcgatcagaacaagctgaaacctgagatggacgagaagggcaacctgaccaccgccggctttgcctgctctcagtgtggccagcccctgttcgtgtacaagctggagcaggtgtctgagaagggcaaggcttacaccaactacttcggacggtgcaatgtggccgagcacgaaaagctgatcctgctggcccagctgaagcccgagaaggatagcgacgaagccgtgacatatagcctgggaaagtttgggcagagggccctggatttctacagcattcatgtgaccaaggagtccacccaccccgtgaagcccctggcccagatcgccggaaacagatacgcctccggacctgtgggaaaggccctgagcgacgcatgtatgggcacaatcgcctccttcctgtctaagtaccaggacatcatcatcgaacaccagaaggtggtgaagggcaaccagaagagactggagagcctgcgggagctggccggcaaggaaaacctggaataccctagcgtgaccctgccacctcagcctcacaccaaggagggcgttgatgcctacaacgaagtgatcgcccgggtgcgaatgtgggtgaacctgaacctgtggcagaagctgaagctaagcagagatgatgccaagcctctgctgagactgaagggattcccttcctttcctctggtcgagagacaggccaacgaagtggactggtgggacatggtgtgtaacgtgaagaagctgatcaacgagaaaaaggaggatggcaaggtgttttggcagaatctggctggctacaagagacaggaagccctgagaccatacctgagcagcgaggaagatcggaagaagggaaagaaattcgctcggtaccagctgggcgacctgctgctgcacctggaaaagaagcacggcgaggactggggaaaggtgtacgacgaggcctgggagcggattgacaagaaagtggaaggcctgagcaagcacatcaagctggaagaggaacggagaagcgaggacgcccagagcaaggccgccctgaccgactggctgcgggctaaggccagcttcgtgatcgagggcctgaaggaggccgacaaggacgagttctgcagatgcgagctgaagctgcagaagtggtacggggacctgcggggaaagcccttcgccatcgaagccgagaacagcatcctggacatcagcggcttcagcaagcagtacaactgtgccttcatctggcagaaggacggcgtgaagaagctgaacctgtacctgatcatcaactacttcaagggcggcaagctgcggttcaagaagatcaaacctgaagccttcgaagccaacagattctacaccgtgatcaacaaaaagagcggcgagatcgtgcccatggaggtgaacttcaacttcgacgaccccaacctgatcatcctgcctctggcctttggcaagagacagggcagagaattcatctggaacgacctgctgtccctggaaaccggcagcctgaagctggccaacggaagagtgatcgagaagacactgtacaacagaagaacccggcaggatgagcctgccctgttcgtggccctgaccttcgagcggcgggaggtcctggactcctccaatatcaaaccaatgaacctgatcggcgtggcaagaggcgaaaacatccccgccgtgatcgccctgaccgaccccgagggctgcccactgagccggtttaaggatagcctgggaaacccaacccacatcctgagaatcggcgagagctataaggagaagcagcggaccatccaggccaagaaggaggtggagcagcggagagccggcggctacagccggaagtacgccagcaaagccaagaatctggcagacgatatggtgagaaacaccgctagagatctgctgtactacgccgtgacccaggatgccatgctgatcttcgccaacctgagccggggcttcggccggcagggcaagcggaccttcatggccgagagacagtacacacggatggaggactggctgaccgccaagctggcctacgagggcctgagcaagacctacctgtccaagacactggcccagtacacctccaagacatgcagcaactgtgggtttaccatcaccagcgccgactacgacagggtgctggagaagctgaagaagacagcaacaggctggatgaccacaattaacggcaaggagctgaaggtggagggccagattacctactacaacagatacaagagacagaacgtagtcaaggacctgtccgtcgagctggatagactgagcgaagaatctgtgaacaacgacatctcctcctggacaaagggcagaagcggagaagctctgagcctcctgaagaaaagattctcccatagacccgtgcaggagaagttcgtgtgcctgaactgcggcttcgagacacacgcagccgagcaagccgccctgaacatcgccagatcctggctgttcctgcggagccaggagtacaagaaataccagacaaacaagacaaccggcaacaccgataagagagccttcgtcgagacctggcagtccttttaccggaagaagcttaaggaggtgtggaaacctgccgtgcggtctggcggatctggcggaggctccaccagccccaagaaaaagagaaaagtctaagctgccttctgcggggcttgccttctggccatgcccttcttctctcccttgcacctgtacctcttggtctttgaataaagcctgagtaggaaggctagcaaaaaaaaaaaaaaaaaaaaaaaaaaaaaaaaaaaaaaaaaaaaaaaaaaaaaaaaaaaaaaaaaaaaaaaaaaaaaaaa

SEQ ID NO: 2439 - RNA, 5785 nt, synthetic construct
  source 1..5785: mol_type = other RNA
aggaaataagagagaaaagaagagtaagaagaaatataagagccaccatggcccctaagaagaagcgtaaagtgagccggatggaacgcctcgtctacgaggtgcggcagaagtgcagaaacatcgaggacatctgcatctcctgcggatctctgaacgtgaccctggagcacccactgttcatcggcggcatgtgccagaactgtaaaaactgttttctggagtgtgcctatcaatacgacgatgacggctaccagagctactgcaccatctgttgcggcggaagagaggtgctgatgtgtggaaataacaactgctgccggtgcttctgcgtggaatgcgtggacctgctggtgggccccggcgccgcccaggccgctattaaggaagatccttggaactgctacatgtgcggccacaagggcacatacggcctgctgagacggagagaggactggcctagcagactgcagatgttcttcgccaataaccacgaccaggagttcgacccccctaaggtgtaccctcccgtccccgccgagaagagaaagcccatccgggtcctgagcctgttcgatggcatcgccaccggtctgctggtgctgaaggacctgggcatccaggtggataggtacattgcctccgaggtgtgcgaggactccatcaccgtgggaatggtgcgtcatcagggcaagatcatgtacgtgggcgacgtgcggagcgtgacacagaagcatatccaggagtggggccctttcgacctggtgatcggcggcagcccttgcaatgacctgagcatcgtgaacccagcccggaagggcctgtacgagggaaccggcagactgttcttcgagttttacagactgctgcacgacgcccggcctaaggaaggcgacgaccggcccttcttttggctgttcgagaatgtggtggccatgggagtcagcgacaagcgggatattagccggttcctggagagcaaccccgtgatgatcgatgccaaggaagtgagcgccgcccaccgggccagatacttctggggcaatctgcctggcatgaacagacccctggccagcaccgtgaacgacaagctggagctgcaggagtgcctggagcacggccggatcgccaagttcagcaaggtgagaaccatcaccacccgaagcaacagcatcaaacaaggcaaggaccagcactttcctgtgttcatgaacgagaaggaggacatcctgtggtgtaccgagatggagagagtgttcgggttcccagtccactacacagatgtcagcaacatgtctagactggccagacagagactgctgggaagaagctggtccgtccctgtgatcagacacctgttcgcccctctgaaggagtacttcgcctgcgtgagcagcggcaacagcaacgccaacagccggggccccagcttctctagcggcctggtgccactgtccctgagagggagccacatgggccccatggagatctacaaaaccgtgagcgcctggaagcggcagcctgtgcgcgtgctgagcctgtttcggaatatcgataaagtcctgaaaagcctgggattcctggagagcggctctggctccggcggtggcaccctgaagtacgtggaggatgtgacaaacgtggtcagacgggatgtggagaagtggggccccttcgatctggtgtacggcagcacccaacccctgggcagctcttgtgaccggtgccctggctggtacatgtttcagttccaccggatcctgcagtacgccctgccgagacaggagtcccagcggccattcttttggattttcatggacaacttgctgctgaccgaggatgaccaggaaactaccactcggttcctgcagaccgaagccgtgaccctgcaggacgtgagaggccgggactaccagaacgccatgcgggtgtggtccaacatccctggactgaaaagcaagcacgcacctctgacccctaaagaagaggagtacctgcaggcccaggtgcggagcagaagcaagctggacgcccctaaggtggatctgctggtgaagaattgcctcctgcccctgagagagtacttcaagtatttcagccagaatagtctgcccctgggaggcagcggcggcggctctacacctgtgaccttcgaggatgtggtggtctacttcaccgccgctgagtgggtgcacctgacaaactggcaaagagatttttatcaggccgtgatgatggaaacctacgagctggtggccagcgtggctggcgacggcgttccaatggccgaggacgaggaaggcggagtggaaagacccgtgtggcagtacatccccagaggcaagcggcggagaaagacccctcagcctcgcgccgacggcggcccaagcagcggcgcccctcctcccagcggcggcagcccagccggctccccaacctctaccgaggagggcacctctgagtccgccacccccgagagcggccctggcacctccaccgagcccagcgagggcagcgcacccggcagccctgccggcagccccacctccacagaggagggaaccagcaccgagcccagcgaaggcagcgccccaggcaccagcaccgagcctagtgagcaggagattaaacggatcaacaagatcagaagaagacttgtgaaagacagcaacaccaagaaggccggcaagacaggccccatgaaaaccctgctggttagagtgatgacacccgatctgagagagcggctggaaaacctgagaaagaagcctgaaaatatcccccagcccatcagcaatacatctagagccaacctgaataagctgctgaccgattacaccgaaatgaagaaggcgatcctgcatgtgtactgggaagagttccagaaggaccctgtgggcctgatgagccgggtggcccagcctgccagcaagaagatcgatcagaacaagctgaaacctgagatggacgagaagggcaacctgaccaccgccggctttgcctgctctcagtgtggccagcccctgttcgtgtacaagctggagcaggtgtctgagaagggcaaggcttacaccaactacttcggacggtgcaatgtggccgagcacgaaaagctgatcctgctggcccagctgaagcccgagaaggatagcgacgaagccgtgacatatagcctgggaaagtttgggcagagggccctggatttctacagcattcatgtgaccaaggagtccacccaccccgtgaagcccctggcccagatcgccggaaacagatacgcctccggacctgtgggaaaggccctgagcgacgcatgtatgggcacaatcgcctccttcctgtctaagtaccaggacatcatcatcgaacaccagaaggtggtgaagggcaaccagaagagactggagagcctgcgggagctggccggcaaggaaaacctggaataccctagcgtgaccctgccacctcagcctcacaccaaggagggcgttgatgcctacaacgaagtgatcgcccgggtgcgaatgtgggtgaacctgaacctgtggcagaagctgaagctaagcagagatgatgccaagcctctgctgagactgaagggattcccttcctttcctctggtcgagagacaggccaacgaagtggactggtgggacatggtgtgtaacgtgaagaagctgatcaacgagaaaaaggaggatggcaaggtgttttggcagaatctggctggctacaagagacaggaagccctgagaccatacctgagcagcgaggaagatcggaagaagggaaagaaattcgctcggtaccagctgggcgacctgctgctgcacctggaaaagaagcacggcgaggactggggaaaggtgtacgacgaggcctgggagcggattgacaagaaagtggaaggcctgagcaagcacatcaagctggaagaggaacggagaagcgaggacgcccagagcaaggccgccctgaccgactggctgcgggctaaggccagcttcgtgatcgagggcctgaaggaggccgacaaggacgagttctgcagatgcgagctgaagctgcagaagtggtacggggacctgcggggaaagcccttcgccatcgaagccgagaacagcatcctggacatcagcggcttcagcaagcagtacaactgtgccttcatctggcagaaggacggcgtgaagaagctgaacctgtacctgatcatcaactacttcaagggcggcaagctgcggttcaagaagatcaaacctgaagccttcgaagccaacagattctacaccgtgatcaacaaaaagagcggcgagatcgtgcccatggaggtgaacttcaacttcgacgaccccaacctgatcatcctgcctctggcctttggcaagagacagggcagagaattcatctggaacgacctgctgtccctggaaaccggcagcctgaagctggccaacggaagagtgatcgagaagacactgtacaacagaagaacccggcaggatgagcctgccctgttcgtggccctgaccttcgagcggcgggaggtcctggactcctccaatatcaaaccaatgaacctgatcggcgtggcaagaggcgaaaacatccccgccgtgatcgccctgaccgaccccgagggctgcccactgagccggtttaaggatagcctgggaaacccaacccacatcctgagaatcggcgagagctataaggagaagcagcggaccatccaggccaagaaggaggtggagcagcggagagccggcggctacagccggaagtacgccagcaaagccaagaatctggcagacgatatggtgagaaacaccgctagagatctgctgtactacgccgtgacccaggatgccatgctgatcttcgccaacctgagccggggcttcggccggcagggcaagcggaccttcatggccgagagacagtacacacggatggaggactggctgaccgccaagctggcctacgagggcctgagcaagacctacctgtccaagacactggcccagtacacctccaagacatgcagcaactgtgggtttaccatcaccagcgccgactacgacagggtgctggagaagctgaagaagacagcaacaggctggatgaccacaattaacggcaaggagctgaaggtggagggccagattacctactacaacagatacaagagacagaacgtagtcaaggacctgtccgtcgagctggatagactgagcgaagaatctgtgaacaacgacatctcctcctggacaaagggcagaagcggagaagctctgagcctcctgaagaaaagattctcccatagacccgtgcaggagaagttcgtgtgcctgaactgcggcttcgagacacacgcagccgagcaagccgccctgaacatcgccagatcctggctgttcctgcggagccaggagtacaagaaataccagacaaacaagacaaccggcaacaccgataagagagccttcgtcgagacctggcagtccttttaccggaagaagcttaaggaggtgtggaaacctgccgtgcggtctggcggatctggcggaggctccaccagccccaagaaaaagagaaaagtctaagctgccttctgcggggcttgccttctggccatgcccttcttctctcccttgcacctgtacctcttggtctttgaataaagcctgagtaggaaggctagcaaaaaaaaaaaaaaaaaaaaaaaaaaaaaaaaaaaaaaaaaaaaaaaaaaaaaaaaaaaaaaaaaaaaaaaaaaaaaaaa

SEQ ID NO: 2440 - RNA, 5785 nt, synthetic construct
  source 1..5785: mol_type = other RNA
aggaaataagagagaaaagaagagtaagaagaaatataagagccaccatggcccctaagaagaagcgtaaagtgagccggatggaacgcctcgtctacgaggtgcggcagaagtgcagaaacatcgaggacatctgcatctcctgcggatctctgaacgtgaccctggagcacccactgttcatcggcggcatgtgccagaactgtaaaaactgttttctggagtgtgcctatcaatacgacgatgacggctaccagagctactgcaccatctgttgcggcggaagagaggtgctgatgtgtggaaataacaactgctgccggtgcttctgcgtggaatgcgtggacctgctggtgggccccggcgccgcccaggccgctattaaggaagatccttggaactgctacatgtgcggccacaagggcacatacggcctgctgagacggagagaggactggcctagcagactgcagatgttcttcgccaataaccacgaccaggagttcgacccccctaaggtgtaccctcccgtccccgccgagaagagaaagcccatccgggtcctgagcctgttcgatggcatcgccaccggtctgctggtgctgaaggacctgggcatccaggtggataggtacattgcctccgaggtgtgcgaggactccatcaccgtgggaatggtgcgtcatcagggcaagatcatgtacgtgggcgacgtgcggagcgtgacacagaagcatatccaggagtggggccctttcgacctggtgatcggcggcagcccttgcaatgacctgagcatcgtgaacccagcccggaagggcctgtacgagggaaccggcagactgttcttcgagttttacagactgctgcacgacgcccggcctaaggaaggcgacgaccggcccttcttttggctgttcgagaatgtggtggccatgggagtcagcgacaagcgggatattagccggttcctggagagcaaccccgtgatgatcgatgccaaggaagtgagcgccgcccaccgggccagatacttctggggcaatctgcctggcatgaacagacccctggccagcaccgtgaacgacaagctggagctgcaggagtgcctggagcacggccggatcgccaagttcagcaaggtgagaaccatcaccacccgaagcaacagcatcaaacaaggcaaggaccagcactttcctgtgttcatgaacgagaaggaggacatcctgtggtgtaccgagatggagagagtgttcgggttcccagtccactacacagatgtcagcaacatgtctagactggccagacagagactgctgggaagaagctggtccgtccctgtgatcagacacctgttcgcccctctgaaggagtacttcgcctgcgtgagcagcggcaacagcaacgccaacagccggggccccagcttctctagcggcctggtgccactgtccctgagagggagccacatgggccccatggagatctacaaaaccgtgagcgcctggaagcggcagcctgtgcgcgtgctgagcctgtttcggaatatcgataaagtcctgaaaagcctgggattcctggagagcggctctggctccggcggtggcaccctgaagtacgtggaggatgtgacaaacgtggtcagacgggatgtggagaagtggggccccttcgatctggtgtacggcagcacccaacccctgggcagctcttgtgaccggtgccctggctggtacatgtttcagttccaccggatcctgcagtacgccctgccgagacaggagtcccagcggccattcttttggattttcatggacaacttgctgctgaccgaggatgaccaggaaactaccactcggttcctgcagaccgaagccgtgaccctgcaggacgtgagaggccgggactaccagaacgccatgcgggtgtggtccaacatccctggactgaaaagcaagcacgcacctctgacccctaaagaagaggagtacctgcaggcccaggtgcggagcagaagcaagctggacgcccctaaggtggatctgctggtgaagaattgcctcctgcccctgagagagtacttcaagtatttcagccagaatagtctgcccctgggaggcagcggcggcggccaggacgtggtgacattcaaggacgtcgccatctacttcagccctgaggaatgggtgcggctgagcgccggacagagagaactgtaccaggaggtgatgctggacaactacgagctggtgaccagcctggatagagagagcaaactgctgtataagatggaccccgaggaagaaagctgcgagggcgtgccatacagctctgccgacagcggcgcccctgatagctcctccacctctgcttgtggcggcccaagcagcggcgcccctcctcccagcggcggcagcccagccggctccccaacctctaccgaggagggcacctctgagtccgccacccccgagagcggccctggcacctccaccgagcccagcgagggcagcgcacccggcagccctgccggcagccccacctccacagaggagggaaccagcaccgagcccagcgaaggcagcgccccaggcaccagcaccgagcctagtgagcaggagattaaacggatcaacaagatcagaagaagacttgtgaaagacagcaacaccaagaaggccggcaagacaggccccatgaaaaccctgctggttagagtgatgacacccgatctgagagagcggctggaaaacctgagaaagaagcctgaaaatatcccccagcccatcagcaatacatctagagccaacctgaataagctgctgaccgattacaccgaaatgaagaaggcgatcctgcatgtgtactgggaagagttccagaaggaccctgtgggcctgatgagccgggtggcccagcctgccagcaagaagatcgatcagaacaagctgaaacctgagatggacgagaagggcaacctgaccaccgccggctttgcctgctctcagtgtggccagcccctgttcgtgtacaagctggagcaggtgtctgagaagggcaaggcttacaccaactacttcggacggtgcaatgtggccgagcacgaaaagctgatcctgctggcccagctgaagcccgagaaggatagcgacgaagccgtgacatatagcctgggaaagtttgggcagagggccctggatttctacagcattcatgtgaccaaggagtccacccaccccgtgaagcccctggcccagatcgccggaaacagatacgcctccggacctgtgggaaaggccctgagcgacgcatgtatgggcacaatcgcctccttcctgtctaagtaccaggacatcatcatcgaacaccagaaggtggtgaagggcaaccagaagagactggagagcctgcgggagctggccggcaaggaaaacctggaataccctagcgtgaccctgccacctcagcctcacaccaaggagggcgttgatgcctacaacgaagtgatcgcccgggtgcgaatgtgggtgaacctgaacctgtggcagaagctgaagctaagcagagatgatgccaagcctctgctgagactgaagggattcccttcctttcctctggtcgagagacaggccaacgaagtggactggtgggacatggtgtgtaacgtgaagaagctgatcaacgagaaaaaggaggatggcaaggtgttttggcagaatctggctggctacaagagacaggaagccctgagaccatacctgagcagcgaggaagatcggaagaagggaaagaaattcgctcggtaccagctgggcgacctgctgctgcacctggaaaagaagcacggcgaggactggggaaaggtgtacgacgaggcctgggagcggattgacaagaaagtggaaggcctgagcaagcacatcaagctggaagaggaacggagaagcgaggacgcccagagcaaggccgccctgaccgactggctgcgggctaaggccagcttcgtgatcgagggcctgaaggaggccgacaaggacgagttctgcagatgcgagctgaagctgcagaagtggtacggggacctgcggggaaagcccttcgccatcgaagccgagaacagcatcctggacatcagcggcttcagcaagcagtacaactgtgccttcatctggcagaaggacggcgtgaagaagctgaacctgtacctgatcatcaactacttcaagggcggcaagctgcggttcaagaagatcaaacctgaagccttcgaagccaacagattctacaccgtgatcaacaaaaagagcggcgagatcgtgcccatggaggtgaacttcaacttcgacgaccccaacctgatcatcctgcctctggcctttggcaagagacagggcagagaattcatctggaacgacctgctgtccctggaaaccggcagcctgaagctggccaacggaagagtgatcgagaagacactgtacaacagaagaacccggcaggatgagcctgccctgttcgtggccctgaccttcgagcggcgggaggtcctggactcctccaatatcaaaccaatgaacctgatcggcgtggcaagaggcgaaaacatccccgccgtgatcgccctgaccgaccccgagggctgcccactgagccggtttaaggatagcctgggaaacccaacccacatcctgagaatcggcgagagctataaggagaagcagcggaccatccaggccaagaaggaggtggagcagcggagagccggcggctacagccggaagtacgccagcaaagccaagaatctggcagacgatatggtgagaaacaccgctagagatctgctgtactacgccgtgacccaggatgccatgctgatcttcgccaacctgagccggggcttcggccggcagggcaagcggaccttcatggccgagagacagtacacacggatggaggactggctgaccgccaagctggcctacgagggcctgagcaagacctacctgtccaagacactggcccagtacacctccaagacatgcagcaactgtgggtttaccatcaccagcgccgactacgacagggtgctggagaagctgaagaagacagcaacaggctggatgaccacaattaacggcaaggagctgaaggtggagggccagattacctactacaacagatacaagagacagaacgtagtcaaggacctgtccgtcgagctggatagactgagcgaagaatctgtgaacaacgacatctcctcctggacaaagggcagaagcggagaagctctgagcctcctgaagaaaagattctcccatagacccgtgcaggagaagttcgtgtgcctgaactgcggcttcgagacacacgcagccgagcaagccgccctgaacatcgccagatcctggctgttcctgcggagccaggagtacaagaaataccagacaaacaagacaaccggcaacaccgataagagagccttcgtcgagacctggcagtccttttaccggaagaagcttaaggaggtgtggaaacctgccgtgcggtctggcggatctggcggaggctccaccagccccaagaaaaagagaaaagtctaagctgccttctgcggggcttgccttctggccatgcccttcttctctcccttgcacctgtacctcttggtctttgaataaagcctgagtaggaaggctagcaaaaaaaaaaaaaaaaaaaaaaaaaaaaaaaaaaaaaaaaaaaaaaaaaaaaaaaaaaaaaaaaaaaaaaaaaaaaaaaa

SEQ ID NO: 2441 - RNA, 5812 nt, synthetic construct
  source 1..5812: mol_type = other RNA
aggaaataagagagaaaagaagagtaagaagaaatataagagccaccatggcccctaagaagaagcgtaaagtgagccggatggaacgcctcgtctacgaggtgcggcagaagtgcagaaacatcgaggacatctgcatctcctgcggatctctgaacgtgaccctggagcacccactgttcatcggcggcatgtgccagaactgtaaaaactgttttctggagtgtgcctatcaatacgacgatgacggctaccagagctactgcaccatctgttgcggcggaagagaggtgctgatgtgtggaaataacaactgctgccggtgcttctgcgtggaatgcgtggacctgctggtgggccccggcgccgcccaggccgctattaaggaagatccttggaactgctacatgtgcggccacaagggcacatacggcctgctgagacggagagaggactggcctagcagactgcagatgttcttcgccaataaccacgaccaggagttcgacccccctaaggtgtaccctcccgtccccgccgagaagagaaagcccatccgggtcctgagcctgttcgatggcatcgccaccggtctgctggtgctgaaggacctgggcatccaggtggataggtacattgcctccgaggtgtgcgaggactccatcaccgtgggaatggtgcgtcatcagggcaagatcatgtacgtgggcgacgtgcggagcgtgacacagaagcatatccaggagtggggccctttcgacctggtgatcggcggcagcccttgcaatgacctgagcatcgtgaacccagcccggaagggcctgtacgagggaaccggcagactgttcttcgagttttacagactgctgcacgacgcccggcctaaggaaggcgacgaccggcccttcttttggctgttcgagaatgtggtggccatgggagtcagcgacaagcgggatattagccggttcctggagagcaaccccgtgatgatcgatgccaaggaagtgagcgccgcccaccgggccagatacttctggggcaatctgcctggcatgaacagacccctggccagcaccgtgaacgacaagctggagctgcaggagtgcctggagcacggccggatcgccaagttcagcaaggtgagaaccatcaccacccgaagcaacagcatcaaacaaggcaaggaccagcactttcctgtgttcatgaacgagaaggaggacatcctgtggtgtaccgagatggagagagtgttcgggttcccagtccactacacagatgtcagcaacatgtctagactggccagacagagactgctgggaagaagctggtccgtccctgtgatcagacacctgttcgcccctctgaaggagtacttcgcctgcgtgagcagcggcaacagcaacgccaacagccggggccccagcttctctagcggcctggtgccactgtccctgagagggagccacatgggccccatggagatctacaaaaccgtgagcgcctggaagcggcagcctgtgcgcgtgctgagcctgtttcggaatatcgataaagtcctgaaaagcctgggattcctggagagcggctctggctccggcggtggcaccctgaagtacgtggaggatgtgacaaacgtggtcagacgggatgtggagaagtggggccccttcgatctggtgtacggcagcacccaacccctgggcagctcttgtgaccggtgccctggctggtacatgtttcagttccaccggatcctgcagtacgccctgccgagacaggagtcccagcggccattcttttggattttcatggacaacttgctgctgaccgaggatgaccaggaaactaccactcggttcctgcagaccgaagccgtgaccctgcaggacgtgagaggccgggactaccagaacgccatgcgggtgtggtccaacatccctggactgaaaagcaagcacgcacctctgacccctaaagaagaggagtacctgcaggcccaggtgcggagcagaagcaagctggacgcccctaaggtggatctgctggtgaagaattgcctcctgcccctgagagagtacttcaagtatttcagccagaatagtctgcccctgggaggcagcggcggcggcgtcgccttccgggacgtgatcgtggacttcacccaggaggaatggcagcagctgaagcctgctcaaaaggacctgtacagagatgtgatgatggaaatctactggaatctggtgtctctggacctggaaaccgagggagatatgaacgagcctgaccccgagaaagacagctgggaggatagaacaagcatcgtggttgtggaaggcctgatgcggaacggcgcccagggctacgcctgcgagaaggccggcatccagggctgtagagtgggcggcccaagcagcggcgcccctcctcccagcggcggcagcccagccggctccccaacctctaccgaggagggcacctctgagtccgccacccccgagagcggccctggcacctccaccgagcccagcgagggcagcgcacccggcagccctgccggcagccccacctccacagaggagggaaccagcaccgagcccagcgaaggcagcgccccaggcaccagcaccgagcctagtgagcaggagattaaacggatcaacaagatcagaagaagacttgtgaaagacagcaacaccaagaaggccggcaagacaggccccatgaaaaccctgctggttagagtgatgacacccgatctgagagagcggctggaaaacctgagaaagaagcctgaaaatatcccccagcccatcagcaatacatctagagccaacctgaataagctgctgaccgattacaccgaaatgaagaaggcgatcctgcatgtgtactgggaagagttccagaaggaccctgtgggcctgatgagccgggtggcccagcctgccagcaagaagatcgatcagaacaagctgaaacctgagatggacgagaagggcaacctgaccaccgccggctttgcctgctctcagtgtggccagcccctgttcgtgtacaagctggagcaggtgtctgagaagggcaaggcttacaccaactacttcggacggtgcaatgtggccgagcacgaaaagctgatcctgctggcccagctgaagcccgagaaggatagcgacgaagccgtgacatatagcctgggaaagtttgggcagagggccctggatttctacagcattcatgtgaccaaggagtccacccaccccgtgaagcccctggcccagatcgccggaaacagatacgcctccggacctgtgggaaaggccctgagcgacgcatgtatgggcacaatcgcctccttcctgtctaagtaccaggacatcatcatcgaacaccagaaggtggtgaagggcaaccagaagagactggagagcctgcgggagctggccggcaaggaaaacctggaataccctagcgtgaccctgccacctcagcctcacaccaaggagggcgttgatgcctacaacgaagtgatcgcccgggtgcgaatgtgggtgaacctgaacctgtggcagaagctgaagctaagcagagatgatgccaagcctctgctgagactgaagggattcccttcctttcctctggtcgagagacaggccaacgaagtggactggtgggacatggtgtgtaacgtgaagaagctgatcaacgagaaaaaggaggatggcaaggtgttttggcagaatctggctggctacaagagacaggaagccctgagaccatacctgagcagcgaggaagatcggaagaagggaaagaaattcgctcggtaccagctgggcgacctgctgctgcacctggaaaagaagcacggcgaggactggggaaaggtgtacgacgaggcctgggagcggattgacaagaaagtggaaggcctgagcaagcacatcaagctggaagaggaacggagaagcgaggacgcccagagcaaggccgccctgaccgactggctgcgggctaaggccagcttcgtgatcgagggcctgaaggaggccgacaaggacgagttctgcagatgcgagctgaagctgcagaagtggtacggggacctgcggggaaagcccttcgccatcgaagccgagaacagcatcctggacatcagcggcttcagcaagcagtacaactgtgccttcatctggcagaaggacggcgtgaagaagctgaacctgtacctgatcatcaactacttcaagggcggcaagctgcggttcaagaagatcaaacctgaagccttcgaagccaacagattctacaccgtgatcaacaaaaagagcggcgagatcgtgcccatggaggtgaacttcaacttcgacgaccccaacctgatcatcctgcctctggcctttggcaagagacagggcagagaattcatctggaacgacctgctgtccctggaaaccggcagcctgaagctggccaacggaagagtgatcgagaagacactgtacaacagaagaacccggcaggatgagcctgccctgttcgtggccctgaccttcgagcggcgggaggtcctggactcctccaatatcaaaccaatgaacctgatcggcgtggcaagaggcgaaaacatccccgccgtgatcgccctgaccgaccccgagggctgcccactgagccggtttaaggatagcctgggaaacccaacccacatcctgagaatcggcgagagctataaggagaagcagcggaccatccaggccaagaaggaggtggagcagcggagagccggcggctacagccggaagtacgccagcaaagccaagaatctggcagacgatatggtgagaaacaccgctagagatctgctgtactacgccgtgacccaggatgccatgctgatcttcgccaacctgagccggggcttcggccggcagggcaagcggaccttcatggccgagagacagtacacacggatggaggactggctgaccgccaagctggcctacgagggcctgagcaagacctacctgtccaagacactggcccagtacacctccaagacatgcagcaactgtgggtttaccatcaccagcgccgactacgacagggtgctggagaagctgaagaagacagcaacaggctggatgaccacaattaacggcaaggagctgaaggtggagggccagattacctactacaacagatacaagagacagaacgtagtcaaggacctgtccgtcgagctggatagactgagcgaagaatctgtgaacaacgacatctcctcctggacaaagggcagaagcggagaagctctgagcctcctgaagaaaagattctcccatagacccgtgcaggagaagttcgtgtgcctgaactgcggcttcgagacacacgcagccgagcaagccgccctgaacatcgccagatcctggctgttcctgcggagccaggagtacaagaaataccagacaaacaagacaaccggcaacaccgataagagagccttcgtcgagacctggcagtccttttaccggaagaagcttaaggaggtgtggaaacctgccgtgcggtctggcggatctggcggaggctccaccagccccaagaaaaagagaaaagtctaagctgccttctgcggggcttgccttctggccatgcccttcttctctcccttgcacctgtacctcttggtctttgaataaagcctgagtaggaaggctagcaaaaaaaaaaaaaaaaaaaaaaaaaaaaaaaaaaaaaaaaaaaaaaaaaaaaaaaaaaaaaaaaaaaaaaaaaaaaaaaa

SEQ ID NO: 2442 - RNA, 5794 nt, synthetic construct
  source 1..5794: mol_type = other RNA
aggaaataagagagaaaagaagagtaagaagaaatataagagccaccatggcccctaagaagaagcgtaaagtgagccggatggaacgcctcgtctacgaggtgcggcagaagtgcagaaacatcgaggacatctgcatctcctgcggatctctgaacgtgaccctggagcacccactgttcatcggcggcatgtgccagaactgtaaaaactgttttctggagtgtgcctatcaatacgacgatgacggctaccagagctactgcaccatctgttgcggcggaagagaggtgctgatgtgtggaaataacaactgctgccggtgcttctgcgtggaatgcgtggacctgctggtgggccccggcgccgcccaggccgctattaaggaagatccttggaactgctacatgtgcggccacaagggcacatacggcctgctgagacggagagaggactggcctagcagactgcagatgttcttcgccaataaccacgaccaggagttcgacccccctaaggtgtaccctcccgtccccgccgagaagagaaagcccatccgggtcctgagcctgttcgatggcatcgccaccggtctgctggtgctgaaggacctgggcatccaggtggataggtacattgcctccgaggtgtgcgaggactccatcaccgtgggaatggtgcgtcatcagggcaagatcatgtacgtgggcgacgtgcggagcgtgacacagaagcatatccaggagtggggccctttcgacctggtgatcggcggcagcccttgcaatgacctgagcatcgtgaacccagcccggaagggcctgtacgagggaaccggcagactgttcttcgagttttacagactgctgcacgacgcccggcctaaggaaggcgacgaccggcccttcttttggctgttcgagaatgtggtggccatgggagtcagcgacaagcgggatattagccggttcctggagagcaaccccgtgatgatcgatgccaaggaagtgagcgccgcccaccgggccagatacttctggggcaatctgcctggcatgaacagacccctggccagcaccgtgaacgacaagctggagctgcaggagtgcctggagcacggccggatcgccaagttcagcaaggtgagaaccatcaccacccgaagcaacagcatcaaacaaggcaaggaccagcactttcctgtgttcatgaacgagaaggaggacatcctgtggtgtaccgagatggagagagtgttcgggttcccagtccactacacagatgtcagcaacatgtctagactggccagacagagactgctgggaagaagctggtccgtccctgtgatcagacacctgttcgcccctctgaaggagtacttcgcctgcgtgagcagcggcaacagcaacgccaacagccggggccccagcttctctagcggcctggtgccactgtccctgagagggagccacatgggccccatggagatctacaaaaccgtgagcgcctggaagcggcagcctgtgcgcgtgctgagcctgtttcggaatatcgataaagtcctgaaaagcctgggattcctggagagcggctctggctccggcggtggcaccctgaagtacgtggaggatgtgacaaacgtggtcagacgggatgtggagaagtggggccccttcgatctggtgtacggcagcacccaacccctgggcagctcttgtgaccggtgccctggctggtacatgtttcagttccaccggatcctgcagtacgccctgccgagacaggagtcccagcggccattcttttggattttcatggacaacttgctgctgaccgaggatgaccaggaaactaccactcggttcctgcagaccgaagccgtgaccctgcaggacgtgagaggccgggactaccagaacgccatgcgggtgtggtccaacatccctggactgaaaagcaagcacgcacctctgacccctaaagaagaggagtacctgcaggcccaggtgcggagcagaagcaagctggacgcccctaaggtggatctgctggtgaagaattgcctcctgcccctgagagagtacttcaagtatttcagccagaatagtctgcccctgggaggcagcggcggcggcgtgacctacaacgacgtgcacgtggacatcacccaggaggaatgggctctgatggaccccagccagcggaacctgtacaaggatgtgatggtcgagacatacatgaacctgaccgccatcggatataattgggagaacctggaagtggaagaaccatgtcagaaccccctgaagcacggcagacacgagagacctcatacaggcgagaaaccttacgagtacaatcagtgcggcaaggccttcgcccaacctggcggcccaagcagcggcgcccctcctcccagcggcggcagcccagccggctccccaacctctaccgaggagggcacctctgagtccgccacccccgagagcggccctggcacctccaccgagcccagcgagggcagcgcacccggcagccctgccggcagccccacctccacagaggagggaaccagcaccgagcccagcgaaggcagcgccccaggcaccagcaccgagcctagtgagcaggagattaaacggatcaacaagatcagaagaagacttgtgaaagacagcaacaccaagaaggccggcaagacaggccccatgaaaaccctgctggttagagtgatgacacccgatctgagagagcggctggaaaacctgagaaagaagcctgaaaatatcccccagcccatcagcaatacatctagagccaacctgaataagctgctgaccgattacaccgaaatgaagaaggcgatcctgcatgtgtactgggaagagttccagaaggaccctgtgggcctgatgagccgggtggcccagcctgccagcaagaagatcgatcagaacaagctgaaacctgagatggacgagaagggcaacctgaccaccgccggctttgcctgctctcagtgtggccagcccctgttcgtgtacaagctggagcaggtgtctgagaagggcaaggcttacaccaactacttcggacggtgcaatgtggccgagcacgaaaagctgatcctgctggcccagctgaagcccgagaaggatagcgacgaagccgtgacatatagcctgggaaagtttgggcagagggccctggatttctacagcattcatgtgaccaaggagtccacccaccccgtgaagcccctggcccagatcgccggaaacagatacgcctccggacctgtgggaaaggccctgagcgacgcatgtatgggcacaatcgcctccttcctgtctaagtaccaggacatcatcatcgaacaccagaaggtggtgaagggcaaccagaagagactggagagcctgcgggagctggccggcaaggaaaacctggaataccctagcgtgaccctgccacctcagcctcacaccaaggagggcgttgatgcctacaacgaagtgatcgcccgggtgcgaatgtgggtgaacctgaacctgtggcagaagctgaagctaagcagagatgatgccaagcctctgctgagactgaagggattcccttcctttcctctggtcgagagacaggccaacgaagtggactggtgggacatggtgtgtaacgtgaagaagctgatcaacgagaaaaaggaggatggcaaggtgttttggcagaatctggctggctacaagagacaggaagccctgagaccatacctgagcagcgaggaagatcggaagaagggaaagaaattcgctcggtaccagctgggcgacctgctgctgcacctggaaaagaagcacggcgaggactggggaaaggtgtacgacgaggcctgggagcggattgacaagaaagtggaaggcctgagcaagcacatcaagctggaagaggaacggagaagcgaggacgcccagagcaaggccgccctgaccgactggctgcgggctaaggccagcttcgtgatcgagggcctgaaggaggccgacaaggacgagttctgcagatgcgagctgaagctgcagaagtggtacggggacctgcggggaaagcccttcgccatcgaagccgagaacagcatcctggacatcagcggcttcagcaagcagtacaactgtgccttcatctggcagaaggacggcgtgaagaagctgaacctgtacctgatcatcaactacttcaagggcggcaagctgcggttcaagaagatcaaacctgaagccttcgaagccaacagattctacaccgtgatcaacaaaaagagcggcgagatcgtgcccatggaggtgaacttcaacttcgacgaccccaacctgatcatcctgcctctggcctttggcaagagacagggcagagaattcatctggaacgacctgctgtccctggaaaccggcagcctgaagctggccaacggaagagtgatcgagaagacactgtacaacagaagaacccggcaggatgagcctgccctgttcgtggccctgaccttcgagcggcgggaggtcctggactcctccaatatcaaaccaatgaacctgatcggcgtggcaagaggcgaaaacatccccgccgtgatcgccctgaccgaccccgagggctgcccactgagccggtttaaggatagcctgggaaacccaacccacatcctgagaatcggcgagagctataaggagaagcagcggaccatccaggccaagaaggaggtggagcagcggagagccggcggctacagccggaagtacgccagcaaagccaagaatctggcagacgatatggtgagaaacaccgctagagatctgctgtactacgccgtgacccaggatgccatgctgatcttcgccaacctgagccggggcttcggccggcagggcaagcggaccttcatggccgagagacagtacacacggatggaggactggctgaccgccaagctggcctacgagggcctgagcaagacctacctgtccaagacactggcccagtacacctccaagacatgcagcaactgtgggtttaccatcaccagcgccgactacgacagggtgctggagaagctgaagaagacagcaacaggctggatgaccacaattaacggcaaggagctgaaggtggagggccagattacctactacaacagatacaagagacagaacgtagtcaaggacctgtccgtcgagctggatagactgagcgaagaatctgtgaacaacgacatctcctcctggacaaagggcagaagcggagaagctctgagcctcctgaagaaaagattctcccatagacccgtgcaggagaagttcgtgtgcctgaactgcggcttcgagacacacgcagccgagcaagccgccctgaacatcgccagatcctggctgttcctgcggagccaggagtacaagaaataccagacaaacaagacaaccggcaacaccgataagagagccttcgtcgagacctggcagtccttttaccggaagaagcttaaggaggtgtggaaacctgccgtgcggtctggcggatctggcggaggctccaccagccccaagaaaaagagaaaagtctaagctgccttctgcggggcttgccttctggccatgcccttcttctctcccttgcacctgtacctcttggtctttgaataaagcctgagtaggaaggctagcaaaaaaaaaaaaaaaaaaaaaaaaaaaaaaaaaaaaaaaaaaaaaaaaaaaaaaaaaaaaaaaaaaaaaaaaaaaaaaaa

SEQ ID NO: 2443 - RNA, 5785 nt, synthetic construct
  source 1..5785: mol_type = other RNA
aggaaataagagagaaaagaagagtaagaagaaatataagagccaccatggcccctaagaagaagcgtaaagtgagccggatggaacgcctcgtctacgaggtgcggcagaagtgcagaaacatcgaggacatctgcatctcctgcggatctctgaacgtgaccctggagcacccactgttcatcggcggcatgtgccagaactgtaaaaactgttttctggagtgtgcctatcaatacgacgatgacggctaccagagctactgcaccatctgttgcggcggaagagaggtgctgatgtgtggaaataacaactgctgccggtgcttctgcgtggaatgcgtggacctgctggtgggccccggcgccgcccaggccgctattaaggaagatccttggaactgctacatgtgcggccacaagggcacatacggcctgctgagacggagagaggactggcctagcagactgcagatgttcttcgccaataaccacgaccaggagttcgacccccctaaggtgtaccctcccgtccccgccgagaagagaaagcccatccgggtcctgagcctgttcgatggcatcgccaccggtctgctggtgctgaaggacctgggcatccaggtggataggtacattgcctccgaggtgtgcgaggactccatcaccgtgggaatggtgcgtcatcagggcaagatcatgtacgtgggcgacgtgcggagcgtgacacagaagcatatccaggagtggggccctttcgacctggtgatcggcggcagcccttgcaatgacctgagcatcgtgaacccagcccggaagggcctgtacgagggaaccggcagactgttcttcgagttttacagactgctgcacgacgcccggcctaaggaaggcgacgaccggcccttcttttggctgttcgagaatgtggtggccatgggagtcagcgacaagcgggatattagccggttcctggagagcaaccccgtgatgatcgatgccaaggaagtgagcgccgcccaccgggccagatacttctggggcaatctgcctggcatgaacagacccctggccagcaccgtgaacgacaagctggagctgcaggagtgcctggagcacggccggatcgccaagttcagcaaggtgagaaccatcaccacccgaagcaacagcatcaaacaaggcaaggaccagcactttcctgtgttcatgaacgagaaggaggacatcctgtggtgtaccgagatggagagagtgttcgggttcccagtccactacacagatgtcagcaacatgtctagactggccagacagagactgctgggaagaagctggtccgtccctgtgatcagacacctgttcgcccctctgaaggagtacttcgcctgcgtgagcagcggcaacagcaacgccaacagccggggccccagcttctctagcggcctggtgccactgtccctgagagggagccacatgggccccatggagatctacaaaaccgtgagcgcctggaagcggcagcctgtgcgcgtgctgagcctgtttcggaatatcgataaagtcctgaaaagcctgggattcctggagagcggctctggctccggcggtggcaccctgaagtacgtggaggatgtgacaaacgtggtcagacgggatgtggagaagtggggccccttcgatctggtgtacggcagcacccaacccctgggcagctcttgtgaccggtgccctggctggtacatgtttcagttccaccggatcctgcagtacgccctgccgagacaggagtcccagcggccattcttttggattttcatggacaacttgctgctgaccgaggatgaccaggaaactaccactcggttcctgcagaccgaagccgtgaccctgcaggacgtgagaggccgggactaccagaacgccatgcgggtgtggtccaacatccctggactgaaaagcaagcacgcacctctgacccctaaagaagaggagtacctgcaggcccaggtgcggagcagaagcaagctggacgcccctaaggtggatctgctggtgaagaattgcctcctgcccctgagagagtacttcaagtatttcagccagaatagtctgcccctgggaggcagcggcggcggctctcaggagagcgtggccttcgaggacgtggccgtctacttcaccaccaaagagtgggccatcatggtgcccgccgagagagccctgtacagagatgtgatgctggaaaactacgaggccgtggcttttgtggccgtgcctcctacaagcaagcccgctctggtgtcccacctggaacagggcaaggaaagctgcttcatccggcctccaggcgtgctgagcagaagcgactggcgggccggaggcggcccaagcagcggcgcccctcctcccagcggcggcagcccagccggctccccaacctctaccgaggagggcacctctgagtccgccacccccgagagcggccctggcacctccaccgagcccagcgagggcagcgcacccggcagccctgccggcagccccacctccacagaggagggaaccagcaccgagcccagcgaaggcagcgccccaggcaccagcaccgagcctagtgagcaggagattaaacggatcaacaagatcagaagaagacttgtgaaagacagcaacaccaagaaggccggcaagacaggccccatgaaaaccctgctggttagagtgatgacacccgatctgagagagcggctggaaaacctgagaaagaagcctgaaaatatcccccagcccatcagcaatacatctagagccaacctgaataagctgctgaccgattacaccgaaatgaagaaggcgatcctgcatgtgtactgggaagagttccagaaggaccctgtgggcctgatgagccgggtggcccagcctgccagcaagaagatcgatcagaacaagctgaaacctgagatggacgagaagggcaacctgaccaccgccggctttgcctgctctcagtgtggccagcccctgttcgtgtacaagctggagcaggtgtctgagaagggcaaggcttacaccaactacttcggacggtgcaatgtggccgagcacgaaaagctgatcctgctggcccagctgaagcccgagaaggatagcgacgaagccgtgacatatagcctgggaaagtttgggcagagggccctggatttctacagcattcatgtgaccaaggagtccacccaccccgtgaagcccctggcccagatcgccggaaacagatacgcctccggacctgtgggaaaggccctgagcgacgcatgtatgggcacaatcgcctccttcctgtctaagtaccaggacatcatcatcgaacaccagaaggtggtgaagggcaaccagaagagactggagagcctgcgggagctggccggcaaggaaaacctggaataccctagcgtgaccctgccacctcagcctcacaccaaggagggcgttgatgcctacaacgaagtgatcgcccgggtgcgaatgtgggtgaacctgaacctgtggcagaagctgaagctaagcagagatgatgccaagcctctgctgagactgaagggattcccttcctttcctctggtcgagagacaggccaacgaagtggactggtgggacatggtgtgtaacgtgaagaagctgatcaacgagaaaaaggaggatggcaaggtgttttggcagaatctggctggctacaagagacaggaagccctgagaccatacctgagcagcgaggaagatcggaagaagggaaagaaattcgctcggtaccagctgggcgacctgctgctgcacctggaaaagaagcacggcgaggactggggaaaggtgtacgacgaggcctgggagcggattgacaagaaagtggaaggcctgagcaagcacatcaagctggaagaggaacggagaagcgaggacgcccagagcaaggccgccctgaccgactggctgcgggctaaggccagcttcgtgatcgagggcctgaaggaggccgacaaggacgagttctgcagatgcgagctgaagctgcagaagtggtacggggacctgcggggaaagcccttcgccatcgaagccgagaacagcatcctggacatcagcggcttcagcaagcagtacaactgtgccttcatctggcagaaggacggcgtgaagaagctgaacctgtacctgatcatcaactacttcaagggcggcaagctgcggttcaagaagatcaaacctgaagccttcgaagccaacagattctacaccgtgatcaacaaaaagagcggcgagatcgtgcccatggaggtgaacttcaacttcgacgaccccaacctgatcatcctgcctctggcctttggcaagagacagggcagagaattcatctggaacgacctgctgtccctggaaaccggcagcctgaagctggccaacggaagagtgatcgagaagacactgtacaacagaagaacccggcaggatgagcctgccctgttcgtggccctgaccttcgagcggcgggaggtcctggactcctccaatatcaaaccaatgaacctgatcggcgtggcaagaggcgaaaacatccccgccgtgatcgccctgaccgaccccgagggctgcccactgagccggtttaaggatagcctgggaaacccaacccacatcctgagaatcggcgagagctataaggagaagcagcggaccatccaggccaagaaggaggtggagcagcggagagccggcggctacagccggaagtacgccagcaaagccaagaatctggcagacgatatggtgagaaacaccgctagagatctgctgtactacgccgtgacccaggatgccatgctgatcttcgccaacctgagccggggcttcggccggcagggcaagcggaccttcatggccgagagacagtacacacggatggaggactggctgaccgccaagctggcctacgagggcctgagcaagacctacctgtccaagacactggcccagtacacctccaagacatgcagcaactgtgggtttaccatcaccagcgccgactacgacagggtgctggagaagctgaagaagacagcaacaggctggatgaccacaattaacggcaaggagctgaaggtggagggccagattacctactacaacagatacaagagacagaacgtagtcaaggacctgtccgtcgagctggatagactgagcgaagaatctgtgaacaacgacatctcctcctggacaaagggcagaagcggagaagctctgagcctcctgaagaaaagattctcccatagacccgtgcaggagaagttcgtgtgcctgaactgcggcttcgagacacacgcagccgagcaagccgccctgaacatcgccagatcctggctgttcctgcggagccaggagtacaagaaataccagacaaacaagacaaccggcaacaccgataagagagccttcgtcgagacctggcagtccttttaccggaagaagcttaaggaggtgtggaaacctgccgtgcggtctggcggatctggcggaggctccaccagccccaagaaaaagagaaaagtctaagctgccttctgcggggcttgccttctggccatgcccttcttctctcccttgcacctgtacctcttggtctttgaataaagcctgagtaggaaggctagcaaaaaaaaaaaaaaaaaaaaaaaaaaaaaaaaaaaaaaaaaaaaaaaaaaaaaaaaaaaaaaaaaaaaaaaaaaaaaaaa

SEQ ID NO: 2444 - RNA, 5785 nt, synthetic construct
  source 1..5785: mol_type = other RNA
aggaaataagagagaaaagaagagtaagaagaaatataagagccaccatggcccctaagaagaagcgtaaagtgagccggatggaacgcctcgtctacgaggtgcggcagaagtgcagaaacatcgaggacatctgcatctcctgcggatctctgaacgtgaccctggagcacccactgttcatcggcggcatgtgccagaactgtaaaaactgttttctggagtgtgcctatcaatacgacgatgacggctaccagagctactgcaccatctgttgcggcggaagagaggtgctgatgtgtggaaataacaactgctgccggtgcttctgcgtggaatgcgtggacctgctggtgggccccggcgccgcccaggccgctattaaggaagatccttggaactgctacatgtgcggccacaagggcacatacggcctgctgagacggagagaggactggcctagcagactgcagatgttcttcgccaataaccacgaccaggagttcgacccccctaaggtgtaccctcccgtccccgccgagaagagaaagcccatccgggtcctgagcctgttcgatggcatcgccaccggtctgctggtgctgaaggacctgggcatccaggtggataggtacattgcctccgaggtgtgcgaggactccatcaccgtgggaatggtgcgtcatcagggcaagatcatgtacgtgggcgacgtgcggagcgtgacacagaagcatatccaggagtggggccctttcgacctggtgatcggcggcagcccttgcaatgacctgagcatcgtgaacccagcccggaagggcctgtacgagggaaccggcagactgttcttcgagttttacagactgctgcacgacgcccggcctaaggaaggcgacgaccggcccttcttttggctgttcgagaatgtggtggccatgggagtcagcgacaagcgggatattagccggttcctggagagcaaccccgtgatgatcgatgccaaggaagtgagcgccgcccaccgggccagatacttctggggcaatctgcctggcatgaacagacccctggccagcaccgtgaacgacaagctggagctgcaggagtgcctggagcacggccggatcgccaagttcagcaaggtgagaaccatcaccacccgaagcaacagcatcaaacaaggcaaggaccagcactttcctgtgttcatgaacgagaaggaggacatcctgtggtgtaccgagatggagagagtgttcgggttcccagtccactacacagatgtcagcaacatgtctagactggccagacagagactgctgggaagaagctggtccgtccctgtgatcagacacctgttcgcccctctgaaggagtacttcgcctgcgtgagcagcggcaacagcaacgccaacagccggggccccagcttctctagcggcctggtgccactgtccctgagagggagccacatgggccccatggagatctacaaaaccgtgagcgcctggaagcggcagcctgtgcgcgtgctgagcctgtttcggaatatcgataaagtcctgaaaagcctgggattcctggagagcggctctggctccggcggtggcaccctgaagtacgtggaggatgtgacaaacgtggtcagacgggatgtggagaagtggggccccttcgatctggtgtacggcagcacccaacccctgggcagctcttgtgaccggtgccctggctggtacatgtttcagttccaccggatcctgcagtacgccctgccgagacaggagtcccagcggccattcttttggattttcatggacaacttgctgctgaccgaggatgaccaggaaactaccactcggttcctgcagaccgaagccgtgaccctgcaggacgtgagaggccgggactaccagaacgccatgcgggtgtggtccaacatccctggactgaaaagcaagcacgcacctctgacccctaaagaagaggagtacctgcaggcccaggtgcggagcagaagcaagctggacgcccctaaggtggatctgctggtgaagaattgcctcctgcccctgagagagtacttcaagtatttcagccagaatagtctgcccctgggaggcagcggcggcggctctaaagcccctatcacattcggcgacctggccatctacttcagccaggaggaatgggagtggctgagccccatccagaaggacctgtacgaggacgtgatgctggaaaactacagaaatctggtgtccctgggcctcagctttagacgccccaacgtgatcaccctgctggaaaagggcaaggccccatggatggtcgagcctgctagacggcggagaggacctgatagcggcagcaaggtgggcggcccaagcagcggcgcccctcctcccagcggcggcagcccagccggctccccaacctctaccgaggagggcacctctgagtccgccacccccgagagcggccctggcacctccaccgagcccagcgagggcagcgcacccggcagccctgccggcagccccacctccacagaggagggaaccagcaccgagcccagcgaaggcagcgccccaggcaccagcaccgagcctagtgagcaggagattaaacggatcaacaagatcagaagaagacttgtgaaagacagcaacaccaagaaggccggcaagacaggccccatgaaaaccctgctggttagagtgatgacacccgatctgagagagcggctggaaaacctgagaaagaagcctgaaaatatcccccagcccatcagcaatacatctagagccaacctgaataagctgctgaccgattacaccgaaatgaagaaggcgatcctgcatgtgtactgggaagagttccagaaggaccctgtgggcctgatgagccgggtggcccagcctgccagcaagaagatcgatcagaacaagctgaaacctgagatggacgagaagggcaacctgaccaccgccggctttgcctgctctcagtgtggccagcccctgttcgtgtacaagctggagcaggtgtctgagaagggcaaggcttacaccaactacttcggacggtgcaatgtggccgagcacgaaaagctgatcctgctggcccagctgaagcccgagaaggatagcgacgaagccgtgacatatagcctgggaaagtttgggcagagggccctggatttctacagcattcatgtgaccaaggagtccacccaccccgtgaagcccctggcccagatcgccggaaacagatacgcctccggacctgtgggaaaggccctgagcgacgcatgtatgggcacaatcgcctccttcctgtctaagtaccaggacatcatcatcgaacaccagaaggtggtgaagggcaaccagaagagactggagagcctgcgggagctggccggcaaggaaaacctggaataccctagcgtgaccctgccacctcagcctcacaccaaggagggcgttgatgcctacaacgaagtgatcgcccgggtgcgaatgtgggtgaacctgaacctgtggcagaagctgaagctaagcagagatgatgccaagcctctgctgagactgaagggattcccttcctttcctctggtcgagagacaggccaacgaagtggactggtgggacatggtgtgtaacgtgaagaagctgatcaacgagaaaaaggaggatggcaaggtgttttggcagaatctggctggctacaagagacaggaagccctgagaccatacctgagcagcgaggaagatcggaagaagggaaagaaattcgctcggtaccagctgggcgacctgctgctgcacctggaaaagaagcacggcgaggactggggaaaggtgtacgacgaggcctgggagcggattgacaagaaagtggaaggcctgagcaagcacatcaagctggaagaggaacggagaagcgaggacgcccagagcaaggccgccctgaccgactggctgcgggctaaggccagcttcgtgatcgagggcctgaaggaggccgacaaggacgagttctgcagatgcgagctgaagctgcagaagtggtacggggacctgcggggaaagcccttcgccatcgaagccgagaacagcatcctggacatcagcggcttcagcaagcagtacaactgtgccttcatctggcagaaggacggcgtgaagaagctgaacctgtacctgatcatcaactacttcaagggcggcaagctgcggttcaagaagatcaaacctgaagccttcgaagccaacagattctacaccgtgatcaacaaaaagagcggcgagatcgtgcccatggaggtgaacttcaacttcgacgaccccaacctgatcatcctgcctctggcctttggcaagagacagggcagagaattcatctggaacgacctgctgtccctggaaaccggcagcctgaagctggccaacggaagagtgatcgagaagacactgtacaacagaagaacccggcaggatgagcctgccctgttcgtggccctgaccttcgagcggcgggaggtcctggactcctccaatatcaaaccaatgaacctgatcggcgtggcaagaggcgaaaacatccccgccgtgatcgccctgaccgaccccgagggctgcccactgagccggtttaaggatagcctgggaaacccaacccacatcctgagaatcggcgagagctataaggagaagcagcggaccatccaggccaagaaggaggtggagcagcggagagccggcggctacagccggaagtacgccagcaaagccaagaatctggcagacgatatggtgagaaacaccgctagagatctgctgtactacgccgtgacccaggatgccatgctgatcttcgccaacctgagccggggcttcggccggcagggcaagcggaccttcatggccgagagacagtacacacggatggaggactggctgaccgccaagctggcctacgagggcctgagcaagacctacctgtccaagacactggcccagtacacctccaagacatgcagcaactgtgggtttaccatcaccagcgccgactacgacagggtgctggagaagctgaagaagacagcaacaggctggatgaccacaattaacggcaaggagctgaaggtggagggccagattacctactacaacagatacaagagacagaacgtagtcaaggacctgtccgtcgagctggatagactgagcgaagaatctgtgaacaacgacatctcctcctggacaaagggcagaagcggagaagctctgagcctcctgaagaaaagattctcccatagacccgtgcaggagaagttcgtgtgcctgaactgcggcttcgagacacacgcagccgagcaagccgccctgaacatcgccagatcctggctgttcctgcggagccaggagtacaagaaataccagacaaacaagacaaccggcaacaccgataagagagccttcgtcgagacctggcagtccttttaccggaagaagcttaaggaggtgtggaaacctgccgtgcggtctggcggatctggcggaggctccaccagccccaagaaaaagagaaaagtctaagctgccttctgcggggcttgccttctggccatgcccttcttctctcccttgcacctgtacctcttggtctttgaataaagcctgagtaggaaggctagcaaaaaaaaaaaaaaaaaaaaaaaaaaaaaaaaaaaaaaaaaaaaaaaaaaaaaaaaaaaaaaaaaaaaaaaaaaaaaaaa

SEQ ID NO: 2445 - RNA, 5785 nt, synthetic construct
  source 1..5785: mol_type = other RNA
aggaaataagagagaaaagaagagtaagaagaaatataagagccaccatggcccctaagaagaagcgtaaagtgagccggatggaacgcctcgtctacgaggtgcggcagaagtgcagaaacatcgaggacatctgcatctcctgcggatctctgaacgtgaccctggagcacccactgttcatcggcggcatgtgccagaactgtaaaaactgttttctggagtgtgcctatcaatacgacgatgacggctaccagagctactgcaccatctgttgcggcggaagagaggtgctgatgtgtggaaataacaactgctgccggtgcttctgcgtggaatgcgtggacctgctggtgggccccggcgccgcccaggccgctattaaggaagatccttggaactgctacatgtgcggccacaagggcacatacggcctgctgagacggagagaggactggcctagcagactgcagatgttcttcgccaataaccacgaccaggagttcgacccccctaaggtgtaccctcccgtccccgccgagaagagaaagcccatccgggtcctgagcctgttcgatggcatcgccaccggtctgctggtgctgaaggacctgggcatccaggtggataggtacattgcctccgaggtgtgcgaggactccatcaccgtgggaatggtgcgtcatcagggcaagatcatgtacgtgggcgacgtgcggagcgtgacacagaagcatatccaggagtggggccctttcgacctggtgatcggcggcagcccttgcaatgacctgagcatcgtgaacccagcccggaagggcctgtacgagggaaccggcagactgttcttcgagttttacagactgctgcacgacgcccggcctaaggaaggcgacgaccggcccttcttttggctgttcgagaatgtggtggccatgggagtcagcgacaagcgggatattagccggttcctggagagcaaccccgtgatgatcgatgccaaggaagtgagcgccgcccaccgggccagatacttctggggcaatctgcctggcatgaacagacccctggccagcaccgtgaacgacaagctggagctgcaggagtgcctggagcacggccggatcgccaagttcagcaaggtgagaaccatcaccacccgaagcaacagcatcaaacaaggcaaggaccagcactttcctgtgttcatgaacgagaaggaggacatcctgtggtgtaccgagatggagagagtgttcgggttcccagtccactacacagatgtcagcaacatgtctagactggccagacagagactgctgggaagaagctggtccgtccctgtgatcagacacctgttcgcccctctgaaggagtacttcgcctgcgtgagcagcggcaacagcaacgccaacagccggggccccagcttctctagcggcctggtgccactgtccctgagagggagccacatgggccccatggagatctacaaaaccgtgagcgcctggaagcggcagcctgtgcgcgtgctgagcctgtttcggaatatcgataaagtcctgaaaagcctgggattcctggagagcggctctggctccggcggtggcaccctgaagtacgtggaggatgtgacaaacgtggtcagacgggatgtggagaagtggggccccttcgatctggtgtacggcagcacccaacccctgggcagctcttgtgaccggtgccctggctggtacatgtttcagttccaccggatcctgcagtacgccctgccgagacaggagtcccagcggccattcttttggattttcatggacaacttgctgctgaccgaggatgaccaggaaactaccactcggttcctgcagaccgaagccgtgaccctgcaggacgtgagaggccgggactaccagaacgccatgcgggtgtggtccaacatccctggactgaaaagcaagcacgcacctctgacccctaaagaagaggagtacctgcaggcccaggtgcggagcagaagcaagctggacgcccctaaggtggatctgctggtgaagaattgcctcctgcccctgagagagtacttcaagtatttcagccagaatagtctgcccctgggaggcagcggcggcggcgagatgggcctgctgacattcagagacatcgctatcgagttcagcctggaggaatggcaatgtctggactgcgcccagagaaatctgtacagagatgtgatgctggaaaactaccggaacctggtgtctctgggcatcgccgtgtccaagcccgacctgatcacctgcctcgagcagaacaaggaaagccagaacatcaagcggaacaaaatggtcgccaagcaccctgtgatgcacagccacggcggcccaagcagcggcgcccctcctcccagcggcggcagcccagccggctccccaacctctaccgaggagggcacctctgagtccgccacccccgagagcggccctggcacctccaccgagcccagcgagggcagcgcacccggcagccctgccggcagccccacctccacagaggagggaaccagcaccgagcccagcgaaggcagcgccccaggcaccagcaccgagcctagtgagcaggagattaaacggatcaacaagatcagaagaagacttgtgaaagacagcaacaccaagaaggccggcaagacaggccccatgaaaaccctgctggttagagtgatgacacccgatctgagagagcggctggaaaacctgagaaagaagcctgaaaatatcccccagcccatcagcaatacatctagagccaacctgaataagctgctgaccgattacaccgaaatgaagaaggcgatcctgcatgtgtactgggaagagttccagaaggaccctgtgggcctgatgagccgggtggcccagcctgccagcaagaagatcgatcagaacaagctgaaacctgagatggacgagaagggcaacctgaccaccgccggctttgcctgctctcagtgtggccagcccctgttcgtgtacaagctggagcaggtgtctgagaagggcaaggcttacaccaactacttcggacggtgcaatgtggccgagcacgaaaagctgatcctgctggcccagctgaagcccgagaaggatagcgacgaagccgtgacatatagcctgggaaagtttgggcagagggccctggatttctacagcattcatgtgaccaaggagtccacccaccccgtgaagcccctggcccagatcgccggaaacagatacgcctccggacctgtgggaaaggccctgagcgacgcatgtatgggcacaatcgcctccttcctgtctaagtaccaggacatcatcatcgaacaccagaaggtggtgaagggcaaccagaagagactggagagcctgcgggagctggccggcaaggaaaacctggaataccctagcgtgaccctgccacctcagcctcacaccaaggagggcgttgatgcctacaacgaagtgatcgcccgggtgcgaatgtgggtgaacctgaacctgtggcagaagctgaagctaagcagagatgatgccaagcctctgctgagactgaagggattcccttcctttcctctggtcgagagacaggccaacgaagtggactggtgggacatggtgtgtaacgtgaagaagctgatcaacgagaaaaaggaggatggcaaggtgttttggcagaatctggctggctacaagagacaggaagccctgagaccatacctgagcagcgaggaagatcggaagaagggaaagaaattcgctcggtaccagctgggcgacctgctgctgcacctggaaaagaagcacggcgaggactggggaaaggtgtacgacgaggcctgggagcggattgacaagaaagtggaaggcctgagcaagcacatcaagctggaagaggaacggagaagcgaggacgcccagagcaaggccgccctgaccgactggctgcgggctaaggccagcttcgtgatcgagggcctgaaggaggccgacaaggacgagttctgcagatgcgagctgaagctgcagaagtggtacggggacctgcggggaaagcccttcgccatcgaagccgagaacagcatcctggacatcagcggcttcagcaagcagtacaactgtgccttcatctggcagaaggacggcgtgaagaagctgaacctgtacctgatcatcaactacttcaagggcggcaagctgcggttcaagaagatcaaacctgaagccttcgaagccaacagattctacaccgtgatcaacaaaaagagcggcgagatcgtgcccatggaggtgaacttcaacttcgacgaccccaacctgatcatcctgcctctggcctttggcaagagacagggcagagaattcatctggaacgacctgctgtccctggaaaccggcagcctgaagctggccaacggaagagtgatcgagaagacactgtacaacagaagaacccggcaggatgagcctgccctgttcgtggccctgaccttcgagcggcgggaggtcctggactcctccaatatcaaaccaatgaacctgatcggcgtggcaagaggcgaaaacatccccgccgtgatcgccctgaccgaccccgagggctgcccactgagccggtttaaggatagcctgggaaacccaacccacatcctgagaatcggcgagagctataaggagaagcagcggaccatccaggccaagaaggaggtggagcagcggagagccggcggctacagccggaagtacgccagcaaagccaagaatctggcagacgatatggtgagaaacaccgctagagatctgctgtactacgccgtgacccaggatgccatgctgatcttcgccaacctgagccggggcttcggccggcagggcaagcggaccttcatggccgagagacagtacacacggatggaggactggctgaccgccaagctggcctacgagggcctgagcaagacctacctgtccaagacactggcccagtacacctccaagacatgcagcaactgtgggtttaccatcaccagcgccgactacgacagggtgctggagaagctgaagaagacagcaacaggctggatgaccacaattaacggcaaggagctgaaggtggagggccagattacctactacaacagatacaagagacagaacgtagtcaaggacctgtccgtcgagctggatagactgagcgaagaatctgtgaacaacgacatctcctcctggacaaagggcagaagcggagaagctctgagcctcctgaagaaaagattctcccatagacccgtgcaggagaagttcgtgtgcctgaactgcggcttcgagacacacgcagccgagcaagccgccctgaacatcgccagatcctggctgttcctgcggagccaggagtacaagaaataccagacaaacaagacaaccggcaacaccgataagagagccttcgtcgagacctggcagtccttttaccggaagaagcttaaggaggtgtggaaacctgccgtgcggtctggcggatctggcggaggctccaccagccccaagaaaaagagaaaagtctaagctgccttctgcggggcttgccttctggccatgcccttcttctctcccttgcacctgtacctcttggtctttgaataaagcctgagtaggaaggctagcaaaaaaaaaaaaaaaaaaaaaaaaaaaaaaaaaaaaaaaaaaaaaaaaaaaaaaaaaaaaaaaaaaaaaaaaaaaaaaaa

SEQ ID NO: 2446 - RNA, 5785 nt, synthetic construct
  source 1..5785: mol_type = other RNA
aggaaataagagagaaaagaagagtaagaagaaatataagagccaccatggcccctaagaagaagcgtaaagtgagccggatggaacgcctcgtctacgaggtgcggcagaagtgcagaaacatcgaggacatctgcatctcctgcggatctctgaacgtgaccctggagcacccactgttcatcggcggcatgtgccagaactgtaaaaactgttttctggagtgtgcctatcaatacgacgatgacggctaccagagctactgcaccatctgttgcggcggaagagaggtgctgatgtgtggaaataacaactgctgccggtgcttctgcgtggaatgcgtggacctgctggtgggccccggcgccgcccaggccgctattaaggaagatccttggaactgctacatgtgcggccacaagggcacatacggcctgctgagacggagagaggactggcctagcagactgcagatgttcttcgccaataaccacgaccaggagttcgacccccctaaggtgtaccctcccgtccccgccgagaagagaaagcccatccgggtcctgagcctgttcgatggcatcgccaccggtctgctggtgctgaaggacctgggcatccaggtggataggtacattgcctccgaggtgtgcgaggactccatcaccgtgggaatggtgcgtcatcagggcaagatcatgtacgtgggcgacgtgcggagcgtgacacagaagcatatccaggagtggggccctttcgacctggtgatcggcggcagcccttgcaatgacctgagcatcgtgaacccagcccggaagggcctgtacgagggaaccggcagactgttcttcgagttttacagactgctgcacgacgcccggcctaaggaaggcgacgaccggcccttcttttggctgttcgagaatgtggtggccatgggagtcagcgacaagcgggatattagccggttcctggagagcaaccccgtgatgatcgatgccaaggaagtgagcgccgcccaccgggccagatacttctggggcaatctgcctggcatgaacagacccctggccagcaccgtgaacgacaagctggagctgcaggagtgcctggagcacggccggatcgccaagttcagcaaggtgagaaccatcaccacccgaagcaacagcatcaaacaaggcaaggaccagcactttcctgtgttcatgaacgagaaggaggacatcctgtggtgtaccgagatggagagagtgttcgggttcccagtccactacacagatgtcagcaacatgtctagactggccagacagagactgctgggaagaagctggtccgtccctgtgatcagacacctgttcgcccctctgaaggagtacttcgcctgcgtgagcagcggcaacagcaacgccaacagccggggccccagcttctctagcggcctggtgccactgtccctgagagggagccacatgggccccatggagatctacaaaaccgtgagcgcctggaagcggcagcctgtgcgcgtgctgagcctgtttcggaatatcgataaagtcctgaaaagcctgggattcctggagagcggctctggctccggcggtggcaccctgaagtacgtggaggatgtgacaaacgtggtcagacgggatgtggagaagtggggccccttcgatctggtgtacggcagcacccaacccctgggcagctcttgtgaccggtgccctggctggtacatgtttcagttccaccggatcctgcagtacgccctgccgagacaggagtcccagcggccattcttttggattttcatggacaacttgctgctgaccgaggatgaccaggaaactaccactcggttcctgcagaccgaagccgtgaccctgcaggacgtgagaggccgggactaccagaacgccatgcgggtgtggtccaacatccctggactgaaaagcaagcacgcacctctgacccctaaagaagaggagtacctgcaggcccaggtgcggagcagaagcaagctggacgcccctaaggtggatctgctggtgaagaattgcctcctgcccctgagagagtacttcaagtatttcagccagaatagtctgcccctgggaggcagcggcggcggcctgctgaccttcgaggacgtcgccgtgtccttcagcgaggaagaatgggagctgctcgatcctcctcagaaaaccctgtacaacgacgtgatgcaagagaactacgagacagtgatctctctgggcctgaagctgaagaacgacaccggaaatgatcagcccatcagcatcagcgccctggaaatgcaggccagcggcagcaaggtgctgcggaaggccagaatgaaagtggctcagaagacaggcggcccaagcagcggcgcccctcctcccagcggcggcagcccagccggctccccaacctctaccgaggagggcacctctgagtccgccacccccgagagcggccctggcacctccaccgagcccagcgagggcagcgcacccggcagccctgccggcagccccacctccacagaggagggaaccagcaccgagcccagcgaaggcagcgccccaggcaccagcaccgagcctagtgagcaggagattaaacggatcaacaagatcagaagaagacttgtgaaagacagcaacaccaagaaggccggcaagacaggccccatgaaaaccctgctggttagagtgatgacacccgatctgagagagcggctggaaaacctgagaaagaagcctgaaaatatcccccagcccatcagcaatacatctagagccaacctgaataagctgctgaccgattacaccgaaatgaagaaggcgatcctgcatgtgtactgggaagagttccagaaggaccctgtgggcctgatgagccgggtggcccagcctgccagcaagaagatcgatcagaacaagctgaaacctgagatggacgagaagggcaacctgaccaccgccggctttgcctgctctcagtgtggccagcccctgttcgtgtacaagctggagcaggtgtctgagaagggcaaggcttacaccaactacttcggacggtgcaatgtggccgagcacgaaaagctgatcctgctggcccagctgaagcccgagaaggatagcgacgaagccgtgacatatagcctgggaaagtttgggcagagggccctggatttctacagcattcatgtgaccaaggagtccacccaccccgtgaagcccctggcccagatcgccggaaacagatacgcctccggacctgtgggaaaggccctgagcgacgcatgtatgggcacaatcgcctccttcctgtctaagtaccaggacatcatcatcgaacaccagaaggtggtgaagggcaaccagaagagactggagagcctgcgggagctggccggcaaggaaaacctggaataccctagcgtgaccctgccacctcagcctcacaccaaggagggcgttgatgcctacaacgaagtgatcgcccgggtgcgaatgtgggtgaacctgaacctgtggcagaagctgaagctaagcagagatgatgccaagcctctgctgagactgaagggattcccttcctttcctctggtcgagagacaggccaacgaagtggactggtgggacatggtgtgtaacgtgaagaagctgatcaacgagaaaaaggaggatggcaaggtgttttggcagaatctggctggctacaagagacaggaagccctgagaccatacctgagcagcgaggaagatcggaagaagggaaagaaattcgctcggtaccagctgggcgacctgctgctgcacctggaaaagaagcacggcgaggactggggaaaggtgtacgacgaggcctgggagcggattgacaagaaagtggaaggcctgagcaagcacatcaagctggaagaggaacggagaagcgaggacgcccagagcaaggccgccctgaccgactggctgcgggctaaggccagcttcgtgatcgagggcctgaaggaggccgacaaggacgagttctgcagatgcgagctgaagctgcagaagtggtacggggacctgcggggaaagcccttcgccatcgaagccgagaacagcatcctggacatcagcggcttcagcaagcagtacaactgtgccttcatctggcagaaggacggcgtgaagaagctgaacctgtacctgatcatcaactacttcaagggcggcaagctgcggttcaagaagatcaaacctgaagccttcgaagccaacagattctacaccgtgatcaacaaaaagagcggcgagatcgtgcccatggaggtgaacttcaacttcgacgaccccaacctgatcatcctgcctctggcctttggcaagagacagggcagagaattcatctggaacgacctgctgtccctggaaaccggcagcctgaagctggccaacggaagagtgatcgagaagacactgtacaacagaagaacccggcaggatgagcctgccctgttcgtggccctgaccttcgagcggcgggaggtcctggactcctccaatatcaaaccaatgaacctgatcggcgtggcaagaggcgaaaacatccccgccgtgatcgccctgaccgaccccgagggctgcccactgagccggtttaaggatagcctgggaaacccaacccacatcctgagaatcggcgagagctataaggagaagcagcggaccatccaggccaagaaggaggtggagcagcggagagccggcggctacagccggaagtacgccagcaaagccaagaatctggcagacgatatggtgagaaacaccgctagagatctgctgtactacgccgtgacccaggatgccatgctgatcttcgccaacctgagccggggcttcggccggcagggcaagcggaccttcatggccgagagacagtacacacggatggaggactggctgaccgccaagctggcctacgagggcctgagcaagacctacctgtccaagacactggcccagtacacctccaagacatgcagcaactgtgggtttaccatcaccagcgccgactacgacagggtgctggagaagctgaagaagacagcaacaggctggatgaccacaattaacggcaaggagctgaaggtggagggccagattacctactacaacagatacaagagacagaacgtagtcaaggacctgtccgtcgagctggatagactgagcgaagaatctgtgaacaacgacatctcctcctggacaaagggcagaagcggagaagctctgagcctcctgaagaaaagattctcccatagacccgtgcaggagaagttcgtgtgcctgaactgcggcttcgagacacacgcagccgagcaagccgccctgaacatcgccagatcctggctgttcctgcggagccaggagtacaagaaataccagacaaacaagacaaccggcaacaccgataagagagccttcgtcgagacctggcagtccttttaccggaagaagcttaaggaggtgtggaaacctgccgtgcggtctggcggatctggcggaggctccaccagccccaagaaaaagagaaaagtctaagctgccttctgcggggcttgccttctggccatgcccttcttctctcccttgcacctgtacctcttggtctttgaataaagcctgagtaggaaggctagcaaaaaaaaaaaaaaaaaaaaaaaaaaaaaaaaaaaaaaaaaaaaaaaaaaaaaaaaaaaaaaaaaaaaaaaaaaaaaaaa

SEQ ID NO: 2447 - RNA, 5684 nt, synthetic construct
  source 1..5684: mol_type = other RNA
aggaaataagagagaaaagaagagtaagaagaaatataagagccaccgccaccatggcccctaagaagaagcgtaaagtgagccggaaccacgaccaggagttcgacccccctaaggtgtaccctcccgtccccgccgagaagagaaagcccatccgggtcctgagcctgttcgatggcatcgccaccggtctgctggtgctgaaggacctgggcatccaggtggataggtacattgcctccgaggtgtgcgaggactccatcaccgtgggaatggtgcgtcatcagggcaagatcatgtacgtgggcgacgtgcggagcgtgacacagaagcatatccaggagtggggccctttcgacctggtgatcggcggcagcccttgcaatgacctgagcatcgtgaacccagcccggaagggcctgtacgagggaaccggcagactgttcttcgagttttacagactgctgcacgacgcccggcctaaggaaggcgacgaccggcccttcttttggctgttcgagaatgtggtggccatgggagtcagcgacaagcgggatattagccggttcctggagagcaaccccgtgatgatcgatgccaaggaagtgagcgccgcccaccgggccagatacttctggggcaatctgcctggcatgaacagacccctggccagcaccgtgaacgacaagctggagctgcaggagtgcctggagcacggccggatcgccaagttcagcaaggtgagaaccatcaccacccgaagcaacagcatcaaacaaggcaaggaccagcactttcctgtgttcatgaacgagaaggaggacatcctgtggtgtaccgagatggagagagtgttcgggttcccagtccactacacagatgtcagcaacatgtctagactggccagacagagactgctgggaagaagctggtccgtccctgtgatcagacacctgttcgcccctctgaaggagtacttcgcctgcgtgagcagcggcaacagcaacgccaacagccggggccccagcttctctagcggcctggtgccactgtccctgagagggagccacatgggccccatggagatctacaaaaccgtgagcgcctggaagcggcagcctgtgcgcgtgctgagcctgtttcggaatatcgataaagtcctgaaaagcctgggattcctggagagcggctctggctccggcggtggcaccctgaagtacgtggaggatgtgacaaacgtggtcagacgggatgtggagaagtggggccccttcgatctggtgtacggcagcacccaacccctgggcagctcttgtgaccggtgccctggctggtacatgtttcagttccaccggatcctgcagtacgccctgccgagacaggagtcccagcggccattcttttggattttcatggacaacttgctgctgaccgaggatgaccaggaaactaccactcggttcctgcagaccgaagccgtgaccctgcaggacgtgagaggccgggactaccagaacgccatgcgggtgtggtccaacatccctggactgaaaagcaagcacgcacctctgacccctaaagaagaggagtacctgcaggcccaggtgcggagcagaagcaagctggacgcccctaaggtggatctgctggtgaagaattgcctcctgcccctgagagagtacttcaagtatttcagccagaatagtctgcccctgggaggcagcggcggcggcgccctggtgacatttgaggacgtcgccgtgcggttcacccaggaggaatgggctctgctggatccttctcagaaaatcctgtaccgggacgtgatgagagagacataccggaatctgacctccgtgggcatcaactgggaatgttgggaccttgaagcctgcttcagaagcctgggaagaaacctgagagtgcaggtggtgaagagaaagtgcgagctgaccaacagcggcccctgcgccgagggcggcccaagcagcggcgcccctcctcccagcggcggcagcccagccggctccccaacctctaccgaggagggcacctctgagtccgccacccccgagagcggccctggcacctccaccgagcccagcgagggcagcgcacccggcagccctgccggcagccccacctccacagaggagggaaccagcaccgagcccagcgaaggcagcgccccaggcaccagcaccgagcctagtgagcaggagattaaacggatcaacaagatcagaagaagacttgtgaaagacagcaacaccaagaaggccggcaagacaggccccatgaaaaccctgctggttagagtgatgacacccgatctgagagagcggctggaaaacctgagaaagaagcctgaaaatatcccccagcccatcagcaatacatctagagccaacctgaataagctgctgaccgattacaccgaaatgaagaaggcgatcctgcatgtgtactgggaagagttccagaaggaccctgtgggcctgatgagccgggtggcccagcctgccagcaagaagatcgatcagaacaagctgaaacctgagatggacgagaagggcaacctgaccaccgccggctttgcctgctctcagtgtggccagcccctgttcgtgtacaagctggagcaggtgtctgagaagggcaaggcttacaccaactacttcggacggtgcaatgtggccgagcacgaaaagctgatcctgctggcccagctgaagcccgagaaggatagcgacgaagccgtgacatatagcctgggaaagtttgggcagagggccctggatttctacagcattcatgtgaccaaggagtccacccaccccgtgaagcccctggcccagatcgccggaaacagatacgcctccggacctgtgggaaaggccctgagcgacgcatgtatgggcacaatcgcctccttcctgtctaagtaccaggacatcatcatcgaacaccagaaggtggtgaagggcaaccagaagagactggagagcctgcgggagctggccggcaaggaaaacctggaataccctagcgtgaccctgccacctcagcctcacaccaaggagggcgttgatgcctacaacgaagtgatcgcccgggtgcgaatgtgggtgaacctgaacctgtggcagaagctgaagctaagcagagatgatgccaagcctctgctgagactgaagggattcccttcctttcctctggtcgagagacaggccaacgaagtggactggtgggacatggtgtgtaacgtgaagaagctgatcaacgagaaaaaggaggatggcaaggtgttttggcagaatctggctggctacaagagacaggaagccctgagaccatacctgagcagcgaggaagatcggaagaagggaaagaaattcgctcggtaccagctgggcgacctgctgctgcacctggaaaagaagcacggcgaggactggggaaaggtgtacgacgaggcctgggagcggattgacaagaaagtggaaggcctgagcaagcacatcaagctggaagaggaacggagaagcgaggacgcccagagcaaggccgccctgaccgactggctgcgggctaaggccagcttcgtgatcgagggcctgaaggaggccgacaaggacgagttctgcagatgcgagctgaagctgcagaagtggtacggggacctgcggggaaagcccttcgccatcgaagccgagaacagcatcctggacatcagcggcttcagcaagcagtacaactgtgccttcatctggcagaaggacggcgtgaagaagctgaacctgtacctgatcatcaactacttcaagggcggcaagctgcggttcaagaagatcaaacctgaagccttcgaagccaacagattctacaccgtgatcaacaaaaagagcggcgagatcgtgcccatggaggtgaacttcaacttcgacgaccccaacctgatcatcctgcctctggcctttggcaagagacagggcagagaattcatctggaacgacctgctgtccctggaaaccggcagcctgaagctggccaacggaagagtgatcgagaagacactgtacaacagaagaacccggcaggatgagcctgccctgttcgtggccctgaccttcgagcggcgggaggtcctggactcctccaatatcaaaccaatgaacctgatcggcgtggcaagaggcgaaaacatccccgccgtgatcgccctgaccgaccccgagggctgcccactgagccggtttaaggatagcctgggaaacccaacccacatcctgagaatcggcgagagctataaggagaagcagcggaccatccaggccaagaaggaggtggagcagcggagagccggcggctacagccggaagtacgccagcaaagccaagaatctggcagacgatatggtgagaaacaccgctagagatctgctgtactacgccgtgacccaggatgccatgctgatcttcgccaacctgagccggggcttcggccggcagggcaagcggaccttcatggccgagagacagtacacacggatggaggactggctgaccgccaagctggcctacgagggcctgagcaagacctacctgtccaagacactggcccagtacacctccaagacatgcagcaactgtgggtttaccatcaccagcgccgactacgacagggtgctggagaagctgaagaagacagcaacaggctggatgaccacaattaacggcaaggagctgaaggtggagggccagattacctactacaacagatacaagagacagaacgtagtcaaggacctgtccgtcgagctggatagactgagcgaagaatctgtgaacaacgacatctcctcctggacaaagggcagaagcggagaagctctgagcctcctgaagaaaagattctcccatagacccgtgcaggagaagttcgtgtgcctgaactgcggcttcgagacacacgcagccgagcaagccgccctgaacatcgccagatcctggctgttcctgcggagccaggagtacaagaaataccagacaaacaagacaaccggcaacaccgataagagagccttcgtcgagacctggcagtccttttaccggaagaagcttaaggaggtgtggaaacctgccgtgcggtctggcggatctggcggaggctccgccctggtgacatttgaggacgtcgccgtgcggttcacccaggaggaatgggctctgctggatccttctcagaaaatcctgtaccgggacgtgatgagagagacataccggaatctgacctccgtgggcatcaactgggaatgttgggaccttgaagcctgcttcagaagcctgggaagaaacctgagagtgcaggtggtgaagagaaagtgcgagctgaccaacagcggcccctgcgccgagggatctggctccggcagcggccccaagaaaaagagaaaagtctaagctgccttctgcggggcttgccttctggccatgcccttcttctctcccttgcacctgtacctcttggtctttgaataaagcctgagtaggaaggctagcaaaaaaaaaaaaaaaaaaaaaaaaaaaaaaaaaaaaaaaaaaaaaaaaaaaaaaaaaaaagcatgcaaaaaaaaaaaaaaaaaaaaaaaaaaaaaaaaaaaaaaaaaaaaaaaaaaaaaaaaa

SEQ ID NO: 2448 - RNA, 5684 nt, synthetic construct
  source 1..5684: mol_type = other RNA
aggaaataagagagaaaagaagagtaagaagaaatataagagccaccgccaccatggcccctaagaagaagcgtaaagtgagccggaaccacgaccaggagttcgacccccctaaggtgtaccctcccgtccccgccgagaagagaaagcccatccgggtcctgagcctgttcgatggcatcgccaccggtctgctggtgctgaaggacctgggcatccaggtggataggtacattgcctccgaggtgtgcgaggactccatcaccgtgggaatggtgcgtcatcagggcaagatcatgtacgtgggcgacgtgcggagcgtgacacagaagcatatccaggagtggggccctttcgacctggtgatcggcggcagcccttgcaatgacctgagcatcgtgaacccagcccggaagggcctgtacgagggaaccggcagactgttcttcgagttttacagactgctgcacgacgcccggcctaaggaaggcgacgaccggcccttcttttggctgttcgagaatgtggtggccatgggagtcagcgacaagcgggatattagccggttcctggagagcaaccccgtgatgatcgatgccaaggaagtgagcgccgcccaccgggccagatacttctggggcaatctgcctggcatgaacagacccctggccagcaccgtgaacgacaagctggagctgcaggagtgcctggagcacggccggatcgccaagttcagcaaggtgagaaccatcaccacccgaagcaacagcatcaaacaaggcaaggaccagcactttcctgtgttcatgaacgagaaggaggacatcctgtggtgtaccgagatggagagagtgttcgggttcccagtccactacacagatgtcagcaacatgtctagactggccagacagagactgctgggaagaagctggtccgtccctgtgatcagacacctgttcgcccctctgaaggagtacttcgcctgcgtgagcagcggcaacagcaacgccaacagccggggccccagcttctctagcggcctggtgccactgtccctgagagggagccacatgggccccatggagatctacaaaaccgtgagcgcctggaagcggcagcctgtgcgcgtgctgagcctgtttcggaatatcgataaagtcctgaaaagcctgggattcctggagagcggctctggctccggcggtggcaccctgaagtacgtggaggatgtgacaaacgtggtcagacgggatgtggagaagtggggccccttcgatctggtgtacggcagcacccaacccctgggcagctcttgtgaccggtgccctggctggtacatgtttcagttccaccggatcctgcagtacgccctgccgagacaggagtcccagcggccattcttttggattttcatggacaacttgctgctgaccgaggatgaccaggaaactaccactcggttcctgcagaccgaagccgtgaccctgcaggacgtgagaggccgggactaccagaacgccatgcgggtgtggtccaacatccctggactgaaaagcaagcacgcacctctgacccctaaagaagaggagtacctgcaggcccaggtgcggagcagaagcaagctggacgcccctaaggtggatctgctggtgaagaattgcctcctgcccctgagagagtacttcaagtatttcagccagaatagtctgcccctgggaggcagcggcggcggccaggacgtggtgacattcaaggacgtcgccatctacttcagccctgaggaatgggtgcggctgagcgccggacagagagaactgtaccaggaggtgatgctggacaactacgagctggtgaccagcctggatagagagagcaaactgctgtataagatggaccccgaggaagaaagctgcgagggcgtgccatacagctctgccgacagcggcgcccctgatagctcctccacctctgcttgtggcggcccaagcagcggcgcccctcctcccagcggcggcagcccagccggctccccaacctctaccgaggagggcacctctgagtccgccacccccgagagcggccctggcacctccaccgagcccagcgagggcagcgcacccggcagccctgccggcagccccacctccacagaggagggaaccagcaccgagcccagcgaaggcagcgccccaggcaccagcaccgagcctagtgagcaggagattaaacggatcaacaagatcagaagaagacttgtgaaagacagcaacaccaagaaggccggcaagacaggccccatgaaaaccctgctggttagagtgatgacacccgatctgagagagcggctggaaaacctgagaaagaagcctgaaaatatcccccagcccatcagcaatacatctagagccaacctgaataagctgctgaccgattacaccgaaatgaagaaggcgatcctgcatgtgtactgggaagagttccagaaggaccctgtgggcctgatgagccgggtggcccagcctgccagcaagaagatcgatcagaacaagctgaaacctgagatggacgagaagggcaacctgaccaccgccggctttgcctgctctcagtgtggccagcccctgttcgtgtacaagctggagcaggtgtctgagaagggcaaggcttacaccaactacttcggacggtgcaatgtggccgagcacgaaaagctgatcctgctggcccagctgaagcccgagaaggatagcgacgaagccgtgacatatagcctgggaaagtttgggcagagggccctggatttctacagcattcatgtgaccaaggagtccacccaccccgtgaagcccctggcccagatcgccggaaacagatacgcctccggacctgtgggaaaggccctgagcgacgcatgtatgggcacaatcgcctccttcctgtctaagtaccaggacatcatcatcgaacaccagaaggtggtgaagggcaaccagaagagactggagagcctgcgggagctggccggcaaggaaaacctggaataccctagcgtgaccctgccacctcagcctcacaccaaggagggcgttgatgcctacaacgaagtgatcgcccgggtgcgaatgtgggtgaacctgaacctgtggcagaagctgaagctaagcagagatgatgccaagcctctgctgagactgaagggattcccttcctttcctctggtcgagagacaggccaacgaagtggactggtgggacatggtgtgtaacgtgaagaagctgatcaacgagaaaaaggaggatggcaaggtgttttggcagaatctggctggctacaagagacaggaagccctgagaccatacctgagcagcgaggaagatcggaagaagggaaagaaattcgctcggtaccagctgggcgacctgctgctgcacctggaaaagaagcacggcgaggactggggaaaggtgtacgacgaggcctgggagcggattgacaagaaagtggaaggcctgagcaagcacatcaagctggaagaggaacggagaagcgaggacgcccagagcaaggccgccctgaccgactggctgcgggctaaggccagcttcgtgatcgagggcctgaaggaggccgacaaggacgagttctgcagatgcgagctgaagctgcagaagtggtacggggacctgcggggaaagcccttcgccatcgaagccgagaacagcatcctggacatcagcggcttcagcaagcagtacaactgtgccttcatctggcagaaggacggcgtgaagaagctgaacctgtacctgatcatcaactacttcaagggcggcaagctgcggttcaagaagatcaaacctgaagccttcgaagccaacagattctacaccgtgatcaacaaaaagagcggcgagatcgtgcccatggaggtgaacttcaacttcgacgaccccaacctgatcatcctgcctctggcctttggcaagagacagggcagagaattcatctggaacgacctgctgtccctggaaaccggcagcctgaagctggccaacggaagagtgatcgagaagacactgtacaacagaagaacccggcaggatgagcctgccctgttcgtggccctgaccttcgagcggcgggaggtcctggactcctccaatatcaaaccaatgaacctgatcggcgtggcaagaggcgaaaacatccccgccgtgatcgccctgaccgaccccgagggctgcccactgagccggtttaaggatagcctgggaaacccaacccacatcctgagaatcggcgagagctataaggagaagcagcggaccatccaggccaagaaggaggtggagcagcggagagccggcggctacagccggaagtacgccagcaaagccaagaatctggcagacgatatggtgagaaacaccgctagagatctgctgtactacgccgtgacccaggatgccatgctgatcttcgccaacctgagccggggcttcggccggcagggcaagcggaccttcatggccgagagacagtacacacggatggaggactggctgaccgccaagctggcctacgagggcctgagcaagacctacctgtccaagacactggcccagtacacctccaagacatgcagcaactgtgggtttaccatcaccagcgccgactacgacagggtgctggagaagctgaagaagacagcaacaggctggatgaccacaattaacggcaaggagctgaaggtggagggccagattacctactacaacagatacaagagacagaacgtagtcaaggacctgtccgtcgagctggatagactgagcgaagaatctgtgaacaacgacatctcctcctggacaaagggcagaagcggagaagctctgagcctcctgaagaaaagattctcccatagacccgtgcaggagaagttcgtgtgcctgaactgcggcttcgagacacacgcagccgagcaagccgccctgaacatcgccagatcctggctgttcctgcggagccaggagtacaagaaataccagacaaacaagacaaccggcaacaccgataagagagccttcgtcgagacctggcagtccttttaccggaagaagcttaaggaggtgtggaaacctgccgtgcggtctggcggatctggcggaggctcccaggacgtggtgacattcaaggacgtcgccatctacttcagccctgaggaatgggtgcggctgagcgccggacagagagaactgtaccaggaggtgatgctggacaactacgagctggtgaccagcctggatagagagagcaaactgctgtataagatggaccccgaggaagaaagctgcgagggcgtgccatacagctctgccgacagcggcgcccctgatagctcctccacctctgcttgtggatctggctccggcagcggccccaagaaaaagagaaaagtctaagctgccttctgcggggcttgccttctggccatgcccttcttctctcccttgcacctgtacctcttggtctttgaataaagcctgagtaggaaggctagcaaaaaaaaaaaaaaaaaaaaaaaaaaaaaaaaaaaaaaaaaaaaaaaaaaaaaaaaaaaagcatgcaaaaaaaaaaaaaaaaaaaaaaaaaaaaaaaaaaaaaaaaaaaaaaaaaaaaaaaaa

SEQ ID NO: 2449 - RNA, 5684 nt, synthetic construct
  source 1..5684: mol_type = other RNA
aggaaataagagagaaaagaagagtaagaagaaatataagagccaccgccaccatggcccctaagaagaagcgtaaagtgagccggaaccacgaccaggagttcgacccccctaaggtgtaccctcccgtccccgccgagaagagaaagcccatccgggtcctgagcctgttcgatggcatcgccaccggtctgctggtgctgaaggacctgggcatccaggtggataggtacattgcctccgaggtgtgcgaggactccatcaccgtgggaatggtgcgtcatcagggcaagatcatgtacgtgggcgacgtgcggagcgtgacacagaagcatatccaggagtggggccctttcgacctggtgatcggcggcagcccttgcaatgacctgagcatcgtgaacccagcccggaagggcctgtacgagggaaccggcagactgttcttcgagttttacagactgctgcacgacgcccggcctaaggaaggcgacgaccggcccttcttttggctgttcgagaatgtggtggccatgggagtcagcgacaagcgggatattagccggttcctggagagcaaccccgtgatgatcgatgccaaggaagtgagcgccgcccaccgggccagatacttctggggcaatctgcctggcatgaacagacccctggccagcaccgtgaacgacaagctggagctgcaggagtgcctggagcacggccggatcgccaagttcagcaaggtgagaaccatcaccacccgaagcaacagcatcaaacaaggcaaggaccagcactttcctgtgttcatgaacgagaaggaggacatcctgtggtgtaccgagatggagagagtgttcgggttcccagtccactacacagatgtcagcaacatgtctagactggccagacagagactgctgggaagaagctggtccgtccctgtgatcagacacctgttcgcccctctgaaggagtacttcgcctgcgtgagcagcggcaacagcaacgccaacagccggggccccagcttctctagcggcctggtgccactgtccctgagagggagccacatgggccccatggagatctacaaaaccgtgagcgcctggaagcggcagcctgtgcgcgtgctgagcctgtttcggaatatcgataaagtcctgaaaagcctgggattcctggagagcggctctggctccggcggtggcaccctgaagtacgtggaggatgtgacaaacgtggtcagacgggatgtggagaagtggggccccttcgatctggtgtacggcagcacccaacccctgggcagctcttgtgaccggtgccctggctggtacatgtttcagttccaccggatcctgcagtacgccctgccgagacaggagtcccagcggccattcttttggattttcatggacaacttgctgctgaccgaggatgaccaggaaactaccactcggttcctgcagaccgaagccgtgaccctgcaggacgtgagaggccgggactaccagaacgccatgcgggtgtggtccaacatccctggactgaaaagcaagcacgcacctctgacccctaaagaagaggagtacctgcaggcccaggtgcggagcagaagcaagctggacgcccctaaggtggatctgctggtgaagaattgcctcctgcccctgagagagtacttcaagtatttcagccagaatagtctgcccctgggaggcagcggcggcggctctacacctgtgaccttcgaggatgtggtggtctacttcaccgccgctgagtgggtgcacctgacaaactggcaaagagatttttatcaggccgtgatgatggaaacctacgagctggtggccagcgtggctggcgacggcgttccaatggccgaggacgaggaaggcggagtggaaagacccgtgtggcagtacatccccagaggcaagcggcggagaaagacccctcagcctcgcgccgacggcggcccaagcagcggcgcccctcctcccagcggcggcagcccagccggctccccaacctctaccgaggagggcacctctgagtccgccacccccgagagcggccctggcacctccaccgagcccagcgagggcagcgcacccggcagccctgccggcagccccacctccacagaggagggaaccagcaccgagcccagcgaaggcagcgccccaggcaccagcaccgagcctagtgagcaggagattaaacggatcaacaagatcagaagaagacttgtgaaagacagcaacaccaagaaggccggcaagacaggccccatgaaaaccctgctggttagagtgatgacacccgatctgagagagcggctggaaaacctgagaaagaagcctgaaaatatcccccagcccatcagcaatacatctagagccaacctgaataagctgctgaccgattacaccgaaatgaagaaggcgatcctgcatgtgtactgggaagagttccagaaggaccctgtgggcctgatgagccgggtggcccagcctgccagcaagaagatcgatcagaacaagctgaaacctgagatggacgagaagggcaacctgaccaccgccggctttgcctgctctcagtgtggccagcccctgttcgtgtacaagctggagcaggtgtctgagaagggcaaggcttacaccaactacttcggacggtgcaatgtggccgagcacgaaaagctgatcctgctggcccagctgaagcccgagaaggatagcgacgaagccgtgacatatagcctgggaaagtttgggcagagggccctggatttctacagcattcatgtgaccaaggagtccacccaccccgtgaagcccctggcccagatcgccggaaacagatacgcctccggacctgtgggaaaggccctgagcgacgcatgtatgggcacaatcgcctccttcctgtctaagtaccaggacatcatcatcgaacaccagaaggtggtgaagggcaaccagaagagactggagagcctgcgggagctggccggcaaggaaaacctggaataccctagcgtgaccctgccacctcagcctcacaccaaggagggcgttgatgcctacaacgaagtgatcgcccgggtgcgaatgtgggtgaacctgaacctgtggcagaagctgaagctaagcagagatgatgccaagcctctgctgagactgaagggattcccttcctttcctctggtcgagagacaggccaacgaagtggactggtgggacatggtgtgtaacgtgaagaagctgatcaacgagaaaaaggaggatggcaaggtgttttggcagaatctggctggctacaagagacaggaagccctgagaccatacctgagcagcgaggaagatcggaagaagggaaagaaattcgctcggtaccagctgggcgacctgctgctgcacctggaaaagaagcacggcgaggactggggaaaggtgtacgacgaggcctgggagcggattgacaagaaagtggaaggcctgagcaagcacatcaagctggaagaggaacggagaagcgaggacgcccagagcaaggccgccctgaccgactggctgcgggctaaggccagcttcgtgatcgagggcctgaaggaggccgacaaggacgagttctgcagatgcgagctgaagctgcagaagtggtacggggacctgcggggaaagcccttcgccatcgaagccgagaacagcatcctggacatcagcggcttcagcaagcagtacaactgtgccttcatctggcagaaggacggcgtgaagaagctgaacctgtacctgatcatcaactacttcaagggcggcaagctgcggttcaagaagatcaaacctgaagccttcgaagccaacagattctacaccgtgatcaacaaaaagagcggcgagatcgtgcccatggaggtgaacttcaacttcgacgaccccaacctgatcatcctgcctctggcctttggcaagagacagggcagagaattcatctggaacgacctgctgtccctggaaaccggcagcctgaagctggccaacggaagagtgatcgagaagacactgtacaacagaagaacccggcaggatgagcctgccctgttcgtggccctgaccttcgagcggcgggaggtcctggactcctccaatatcaaaccaatgaacctgatcggcgtggcaagaggcgaaaacatccccgccgtgatcgccctgaccgaccccgagggctgcccactgagccggtttaaggatagcctgggaaacccaacccacatcctgagaatcggcgagagctataaggagaagcagcggaccatccaggccaagaaggaggtggagcagcggagagccggcggctacagccggaagtacgccagcaaagccaagaatctggcagacgatatggtgagaaacaccgctagagatctgctgtactacgccgtgacccaggatgccatgctgatcttcgccaacctgagccggggcttcggccggcagggcaagcggaccttcatggccgagagacagtacacacggatggaggactggctgaccgccaagctggcctacgagggcctgagcaagacctacctgtccaagacactggcccagtacacctccaagacatgcagcaactgtgggtttaccatcaccagcgccgactacgacagggtgctggagaagctgaagaagacagcaacaggctggatgaccacaattaacggcaaggagctgaaggtggagggccagattacctactacaacagatacaagagacagaacgtagtcaaggacctgtccgtcgagctggatagactgagcgaagaatctgtgaacaacgacatctcctcctggacaaagggcagaagcggagaagctctgagcctcctgaagaaaagattctcccatagacccgtgcaggagaagttcgtgtgcctgaactgcggcttcgagacacacgcagccgagcaagccgccctgaacatcgccagatcctggctgttcctgcggagccaggagtacaagaaataccagacaaacaagacaaccggcaacaccgataagagagccttcgtcgagacctggcagtccttttaccggaagaagcttaaggaggtgtggaaacctgccgtgcggtctggcggatctggcggaggctcctctacacctgtgaccttcgaggatgtggtggtctacttcaccgccgctgagtgggtgcacctgacaaactggcaaagagatttttatcaggccgtgatgatggaaacctacgagctggtggccagcgtggctggcgacggcgttccaatggccgaggacgaggaaggcggagtggaaagacccgtgtggcagtacatccccagaggcaagcggcggagaaagacccctcagcctcgcgccgacggatctggctccggcagcggccccaagaaaaagagaaaagtctaagctgccttctgcggggcttgccttctggccatgcccttcttctctcccttgcacctgtacctcttggtctttgaataaagcctgagtaggaaggctagcaaaaaaaaaaaaaaaaaaaaaaaaaaaaaaaaaaaaaaaaaaaaaaaaaaaaaaaaaaaagcatgcaaaaaaaaaaaaaaaaaaaaaaaaaaaaaaaaaaaaaaaaaaaaaaaaaaaaaaaaa

SEQ ID NO: 2450 - RNA, 5684 nt, synthetic construct
  source 1..5684: mol_type = other RNA
aggaaataagagagaaaagaagagtaagaagaaatataagagccaccgccaccatggcccctaagaagaagcgtaaagtgagccggaaccacgaccaggagttcgacccccctaaggtgtaccctcccgtccccgccgagaagagaaagcccatccgggtcctgagcctgttcgatggcatcgccaccggtctgctggtgctgaaggacctgggcatccaggtggataggtacattgcctccgaggtgtgcgaggactccatcaccgtgggaatggtgcgtcatcagggcaagatcatgtacgtgggcgacgtgcggagcgtgacacagaagcatatccaggagtggggccctttcgacctggtgatcggcggcagcccttgcaatgacctgagcatcgtgaacccagcccggaagggcctgtacgagggaaccggcagactgttcttcgagttttacagactgctgcacgacgcccggcctaaggaaggcgacgaccggcccttcttttggctgttcgagaatgtggtggccatgggagtcagcgacaagcgggatattagccggttcctggagagcaaccccgtgatgatcgatgccaaggaagtgagcgccgcccaccgggccagatacttctggggcaatctgcctggcatgaacagacccctggccagcaccgtgaacgacaagctggagctgcaggagtgcctggagcacggccggatcgccaagttcagcaaggtgagaaccatcaccacccgaagcaacagcatcaaacaaggcaaggaccagcactttcctgtgttcatgaacgagaaggaggacatcctgtggtgtaccgagatggagagagtgttcgggttcccagtccactacacagatgtcagcaacatgtctagactggccagacagagactgctgggaagaagctggtccgtccctgtgatcagacacctgttcgcccctctgaaggagtacttcgcctgcgtgagcagcggcaacagcaacgccaacagccggggccccagcttctctagcggcctggtgccactgtccctgagagggagccacatgggccccatggagatctacaaaaccgtgagcgcctggaagcggcagcctgtgcgcgtgctgagcctgtttcggaatatcgataaagtcctgaaaagcctgggattcctggagagcggctctggctccggcggtggcaccctgaagtacgtggaggatgtgacaaacgtggtcagacgggatgtggagaagtggggccccttcgatctggtgtacggcagcacccaacccctgggcagctcttgtgaccggtgccctggctggtacatgtttcagttccaccggatcctgcagtacgccctgccgagacaggagtcccagcggccattcttttggattttcatggacaacttgctgctgaccgaggatgaccaggaaactaccactcggttcctgcagaccgaagccgtgaccctgcaggacgtgagaggccgggactaccagaacgccatgcgggtgtggtccaacatccctggactgaaaagcaagcacgcacctctgacccctaaagaagaggagtacctgcaggcccaggtgcggagcagaagcaagctggacgcccctaaggtggatctgctggtgaagaattgcctcctgcccctgagagagtacttcaagtatttcagccagaatagtctgcccctgggaggcagcggcggcggctctacacctgtgaccttcgaggatgtggtggtctacttcaccgccgctgagtgggtgcacctgacaaactggcaaagagatttttatcaggccgtgatgatggaaacctacgagctggtggccagcgtggctggcgacggcgttccaatggccgaggacgaggaaggcggagtggaaagacccgtgtggcagtacatccccagaggcaagcggcggagaaagacccctcagcctcgcgccgacggcggcccaagcagcggcgcccctcctcccagcggcggcagcccagccggctccccaacctctaccgaggagggcacctctgagtccgccacccccgagagcggccctggcacctccaccgagcccagcgagggcagcgcacccggcagccctgccggcagccccacctccacagaggagggaaccagcaccgagcccagcgaaggcagcgccccaggcaccagcaccgagcctagtgagcaggagattaaacggatcaacaagatcagaagaagacttgtgaaagacagcaacaccaagaaggccggcaagacaggccccatgaaaaccctgctggttagagtgatgacacccgatctgagagagcggctggaaaacctgagaaagaagcctgaaaatatcccccagcccatcagcaatacatctagagccaacctgaataagctgctgaccgattacaccgaaatgaagaaggcgatcctgcatgtgtactgggaagagttccagaaggaccctgtgggcctgatgagccgggtggcccagcctgccagcaagaagatcgatcagaacaagctgaaacctgagatggacgagaagggcaacctgaccaccgccggctttgcctgctctcagtgtggccagcccctgttcgtgtacaagctggagcaggtgtctgagaagggcaaggcttacaccaactacttcggacggtgcaatgtggccgagcacgaaaagctgatcctgctggcccagctgaagcccgagaaggatagcgacgaagccgtgacatatagcctgggaaagtttgggcagagggccctggatttctacagcattcatgtgaccaaggagtccacccaccccgtgaagcccctggcccagatcgccggaaacagatacgcctccggacctgtgggaaaggccctgagcgacgcatgtatgggcacaatcgcctccttcctgtctaagtaccaggacatcatcatcgaacaccagaaggtggtgaagggcaaccagaagagactggagagcctgcgggagctggccggcaaggaaaacctggaataccctagcgtgaccctgccacctcagcctcacaccaaggagggcgttgatgcctacaacgaagtgatcgcccgggtgcgaatgtgggtgaacctgaacctgtggcagaagctgaagctaagcagagatgatgccaagcctctgctgagactgaagggattcccttcctttcctctggtcgagagacaggccaacgaagtggactggtgggacatggtgtgtaacgtgaagaagctgatcaacgagaaaaaggaggatggcaaggtgttttggcagaatctggctggctacaagagacaggaagccctgagaccatacctgagcagcgaggaagatcggaagaagggaaagaaattcgctcggtaccagctgggcgacctgctgctgcacctggaaaagaagcacggcgaggactggggaaaggtgtacgacgaggcctgggagcggattgacaagaaagtggaaggcctgagcaagcacatcaagctggaagaggaacggagaagcgaggacgcccagagcaaggccgccctgaccgactggctgcgggctaaggccagcttcgtgatcgagggcctgaaggaggccgacaaggacgagttctgcagatgcgagctgaagctgcagaagtggtacggggacctgcggggaaagcccttcgccatcgaagccgagaacagcatcctggacatcagcggcttcagcaagcagtacaactgtgccttcatctggcagaaggacggcgtgaagaagctgaacctgtacctgatcatcaactacttcaagggcggcaagctgcggttcaagaagatcaaacctgaagccttcgaagccaacagattctacaccgtgatcaacaaaaagagcggcgagatcgtgcccatggaggtgaacttcaacttcgacgaccccaacctgatcatcctgcctctggcctttggcaagagacagggcagagaattcatctggaacgacctgctgtccctggaaaccggcagcctgaagctggccaacggaagagtgatcgagaagacactgtacaacagaagaacccggcaggatgagcctgccctgttcgtggccctgaccttcgagcggcgggaggtcctggactcctccaatatcaaaccaatgaacctgatcggcgtggcaagaggcgaaaacatccccgccgtgatcgccctgaccgaccccgagggctgcccactgagccggtttaaggatagcctgggaaacccaacccacatcctgagaatcggcgagagctataaggagaagcagcggaccatccaggccaagaaggaggtggagcagcggagagccggcggctacagccggaagtacgccagcaaagccaagaatctggcagacgatatggtgagaaacaccgctagagatctgctgtactacgccgtgacccaggatgccatgctgatcttcgccaacctgagccggggcttcggccggcagggcaagcggaccttcatggccgagagacagtacacacggatggaggactggctgaccgccaagctggcctacgagggcctgagcaagacctacctgtccaagacactggcccagtacacctccaagacatgcagcaactgtgggtttaccatcaccagcgccgactacgacagggtgctggagaagctgaagaagacagcaacaggctggatgaccacaattaacggcaaggagctgaaggtggagggccagattacctactacaacagatacaagagacagaacgtagtcaaggacctgtccgtcgagctggatagactgagcgaagaatctgtgaacaacgacatctcctcctggacaaagggcagaagcggagaagctctgagcctcctgaagaaaagattctcccatagacccgtgcaggagaagttcgtgtgcctgaactgcggcttcgagacacacgcagccgagcaagccgccctgaacatcgccagatcctggctgttcctgcggagccaggagtacaagaaataccagacaaacaagacaaccggcaacaccgataagagagccttcgtcgagacctggcagtccttttaccggaagaagcttaaggaggtgtggaaacctgccgtgcggtctggcggatctggcggaggctcccaggacgtggtgacattcaaggacgtcgccatctacttcagccctgaggaatgggtgcggctgagcgccggacagagagaactgtaccaggaggtgatgctggacaactacgagctggtgaccagcctggatagagagagcaaactgctgtataagatggaccccgaggaagaaagctgcgagggcgtgccatacagctctgccgacagcggcgcccctgatagctcctccacctctgcttgtggatctggctccggcagcggccccaagaaaaagagaaaagtctaagctgccttctgcggggcttgccttctggccatgcccttcttctctcccttgcacctgtacctcttggtctttgaataaagcctgagtaggaaggctagcaaaaaaaaaaaaaaaaaaaaaaaaaaaaaaaaaaaaaaaaaaaaaaaaaaaaaaaaaaaagcatgcaaaaaaaaaaaaaaaaaaaaaaaaaaaaaaaaaaaaaaaaaaaaaaaaaaaaaaaaa

SEQ ID NO: 2451 - RNA, 5684 nt, synthetic construct
  source 1..5684: mol_type = other RNA
aggaaataagagagaaaagaagagtaagaagaaatataagagccaccgccaccatggcccctaagaagaagcgtaaagtgagccggaaccacgaccaggagttcgacccccctaaggtgtaccctcccgtccccgccgagaagagaaagcccatccgggtcctgagcctgttcgatggcatcgccaccggtctgctggtgctgaaggacctgggcatccaggtggataggtacattgcctccgaggtgtgcgaggactccatcaccgtgggaatggtgcgtcatcagggcaagatcatgtacgtgggcgacgtgcggagcgtgacacagaagcatatccaggagtggggccctttcgacctggtgatcggcggcagcccttgcaatgacctgagcatcgtgaacccagcccggaagggcctgtacgagggaaccggcagactgttcttcgagttttacagactgctgcacgacgcccggcctaaggaaggcgacgaccggcccttcttttggctgttcgagaatgtggtggccatgggagtcagcgacaagcgggatattagccggttcctggagagcaaccccgtgatgatcgatgccaaggaagtgagcgccgcccaccgggccagatacttctggggcaatctgcctggcatgaacagacccctggccagcaccgtgaacgacaagctggagctgcaggagtgcctggagcacggccggatcgccaagttcagcaaggtgagaaccatcaccacccgaagcaacagcatcaaacaaggcaaggaccagcactttcctgtgttcatgaacgagaaggaggacatcctgtggtgtaccgagatggagagagtgttcgggttcccagtccactacacagatgtcagcaacatgtctagactggccagacagagactgctgggaagaagctggtccgtccctgtgatcagacacctgttcgcccctctgaaggagtacttcgcctgcgtgagcagcggcaacagcaacgccaacagccggggccccagcttctctagcggcctggtgccactgtccctgagagggagccacatgggccccatggagatctacaaaaccgtgagcgcctggaagcggcagcctgtgcgcgtgctgagcctgtttcggaatatcgataaagtcctgaaaagcctgggattcctggagagcggctctggctccggcggtggcaccctgaagtacgtggaggatgtgacaaacgtggtcagacgggatgtggagaagtggggccccttcgatctggtgtacggcagcacccaacccctgggcagctcttgtgaccggtgccctggctggtacatgtttcagttccaccggatcctgcagtacgccctgccgagacaggagtcccagcggccattcttttggattttcatggacaacttgctgctgaccgaggatgaccaggaaactaccactcggttcctgcagaccgaagccgtgaccctgcaggacgtgagaggccgggactaccagaacgccatgcgggtgtggtccaacatccctggactgaaaagcaagcacgcacctctgacccctaaagaagaggagtacctgcaggcccaggtgcggagcagaagcaagctggacgcccctaaggtggatctgctggtgaagaattgcctcctgcccctgagagagtacttcaagtatttcagccagaatagtctgcccctgggaggcagcggcggcggctctacacctgtgaccttcgaggatgtggtggtctacttcaccgccgctgagtgggtgcacctgacaaactggcaaagagatttttatcaggccgtgatgatggaaacctacgagctggtggccagcgtggctggcgacggcgttccaatggccgaggacgaggaaggcggagtggaaagacccgtgtggcagtacatccccagaggcaagcggcggagaaagacccctcagcctcgcgccgacggcggcccaagcagcggcgcccctcctcccagcggcggcagcccagccggctccccaacctctaccgaggagggcacctctgagtccgccacccccgagagcggccctggcacctccaccgagcccagcgagggcagcgcacccggcagccctgccggcagccccacctccacagaggagggaaccagcaccgagcccagcgaaggcagcgccccaggcaccagcaccgagcctagtgagcaggagattaaacggatcaacaagatcagaagaagacttgtgaaagacagcaacaccaagaaggccggcaagacaggccccatgaaaaccctgctggttagagtgatgacacccgatctgagagagcggctggaaaacctgagaaagaagcctgaaaatatcccccagcccatcagcaatacatctagagccaacctgaataagctgctgaccgattacaccgaaatgaagaaggcgatcctgcatgtgtactgggaagagttccagaaggaccctgtgggcctgatgagccgggtggcccagcctgccagcaagaagatcgatcagaacaagctgaaacctgagatggacgagaagggcaacctgaccaccgccggctttgcctgctctcagtgtggccagcccctgttcgtgtacaagctggagcaggtgtctgagaagggcaaggcttacaccaactacttcggacggtgcaatgtggccgagcacgaaaagctgatcctgctggcccagctgaagcccgagaaggatagcgacgaagccgtgacatatagcctgggaaagtttgggcagagggccctggatttctacagcattcatgtgaccaaggagtccacccaccccgtgaagcccctggcccagatcgccggaaacagatacgcctccggacctgtgggaaaggccctgagcgacgcatgtatgggcacaatcgcctccttcctgtctaagtaccaggacatcatcatcgaacaccagaaggtggtgaagggcaaccagaagagactggagagcctgcgggagctggccggcaaggaaaacctggaataccctagcgtgaccctgccacctcagcctcacaccaaggagggcgttgatgcctacaacgaagtgatcgcccgggtgcgaatgtgggtgaacctgaacctgtggcagaagctgaagctaagcagagatgatgccaagcctctgctgagactgaagggattcccttcctttcctctggtcgagagacaggccaacgaagtggactggtgggacatggtgtgtaacgtgaagaagctgatcaacgagaaaaaggaggatggcaaggtgttttggcagaatctggctggctacaagagacaggaagccctgagaccatacctgagcagcgaggaagatcggaagaagggaaagaaattcgctcggtaccagctgggcgacctgctgctgcacctggaaaagaagcacggcgaggactggggaaaggtgtacgacgaggcctgggagcggattgacaagaaagtggaaggcctgagcaagcacatcaagctggaagaggaacggagaagcgaggacgcccagagcaaggccgccctgaccgactggctgcgggctaaggccagcttcgtgatcgagggcctgaaggaggccgacaaggacgagttctgcagatgcgagctgaagctgcagaagtggtacggggacctgcggggaaagcccttcgccatcgaagccgagaacagcatcctggacatcagcggcttcagcaagcagtacaactgtgccttcatctggcagaaggacggcgtgaagaagctgaacctgtacctgatcatcaactacttcaagggcggcaagctgcggttcaagaagatcaaacctgaagccttcgaagccaacagattctacaccgtgatcaacaaaaagagcggcgagatcgtgcccatggaggtgaacttcaacttcgacgaccccaacctgatcatcctgcctctggcctttggcaagagacagggcagagaattcatctggaacgacctgctgtccctggaaaccggcagcctgaagctggccaacggaagagtgatcgagaagacactgtacaacagaagaacccggcaggatgagcctgccctgttcgtggccctgaccttcgagcggcgggaggtcctggactcctccaatatcaaaccaatgaacctgatcggcgtggcaagaggcgaaaacatccccgccgtgatcgccctgaccgaccccgagggctgcccactgagccggtttaaggatagcctgggaaacccaacccacatcctgagaatcggcgagagctataaggagaagcagcggaccatccaggccaagaaggaggtggagcagcggagagccggcggctacagccggaagtacgccagcaaagccaagaatctggcagacgatatggtgagaaacaccgctagagatctgctgtactacgccgtgacccaggatgccatgctgatcttcgccaacctgagccggggcttcggccggcagggcaagcggaccttcatggccgagagacagtacacacggatggaggactggctgaccgccaagctggcctacgagggcctgagcaagacctacctgtccaagacactggcccagtacacctccaagacatgcagcaactgtgggtttaccatcaccagcgccgactacgacagggtgctggagaagctgaagaagacagcaacaggctggatgaccacaattaacggcaaggagctgaaggtggagggccagattacctactacaacagatacaagagacagaacgtagtcaaggacctgtccgtcgagctggatagactgagcgaagaatctgtgaacaacgacatctcctcctggacaaagggcagaagcggagaagctctgagcctcctgaagaaaagattctcccatagacccgtgcaggagaagttcgtgtgcctgaactgcggcttcgagacacacgcagccgagcaagccgccctgaacatcgccagatcctggctgttcctgcggagccaggagtacaagaaataccagacaaacaagacaaccggcaacaccgataagagagccttcgtcgagacctggcagtccttttaccggaagaagcttaaggaggtgtggaaacctgccgtgcggtctggcggatctggcggaggctccgccctggtgacatttgaggacgtcgccgtgcggttcacccaggaggaatgggctctgctggatccttctcagaaaatcctgtaccgggacgtgatgagagagacataccggaatctgacctccgtgggcatcaactgggaatgttgggaccttgaagcctgcttcagaagcctgggaagaaacctgagagtgcaggtggtgaagagaaagtgcgagctgaccaacagcggcccctgcgccgagggatctggctccggcagcggccccaagaaaaagagaaaagtctaagctgccttctgcggggcttgccttctggccatgcccttcttctctcccttgcacctgtacctcttggtctttgaataaagcctgagtaggaaggctagcaaaaaaaaaaaaaaaaaaaaaaaaaaaaaaaaaaaaaaaaaaaaaaaaaaaaaaaaaaaagcatgcaaaaaaaaaaaaaaaaaaaaaaaaaaaaaaaaaaaaaaaaaaaaaaaaaaaaaaaaa

SEQ ID NO: 2452 - RNA, 5684 nt, synthetic construct
  source 1..5684: mol_type = other RNA
aggaaataagagagaaaagaagagtaagaagaaatataagagccaccgccaccatggcccctaagaagaagcgtaaagtgagccggaaccacgaccaggagttcgacccccctaaggtgtaccctcccgtccccgccgagaagagaaagcccatccgggtcctgagcctgttcgatggcatcgccaccggtctgctggtgctgaaggacctgggcatccaggtggataggtacattgcctccgaggtgtgcgaggactccatcaccgtgggaatggtgcgtcatcagggcaagatcatgtacgtgggcgacgtgcggagcgtgacacagaagcatatccaggagtggggccctttcgacctggtgatcggcggcagcccttgcaatgacctgagcatcgtgaacccagcccggaagggcctgtacgagggaaccggcagactgttcttcgagttttacagactgctgcacgacgcccggcctaaggaaggcgacgaccggcccttcttttggctgttcgagaatgtggtggccatgggagtcagcgacaagcgggatattagccggttcctggagagcaaccccgtgatgatcgatgccaaggaagtgagcgccgcccaccgggccagatacttctggggcaatctgcctggcatgaacagacccctggccagcaccgtgaacgacaagctggagctgcaggagtgcctggagcacggccggatcgccaagttcagcaaggtgagaaccatcaccacccgaagcaacagcatcaaacaaggcaaggaccagcactttcctgtgttcatgaacgagaaggaggacatcctgtggtgtaccgagatggagagagtgttcgggttcccagtccactacacagatgtcagcaacatgtctagactggccagacagagactgctgggaagaagctggtccgtccctgtgatcagacacctgttcgcccctctgaaggagtacttcgcctgcgtgagcagcggcaacagcaacgccaacagccggggccccagcttctctagcggcctggtgccactgtccctgagagggagccacatgggccccatggagatctacaaaaccgtgagcgcctggaagcggcagcctgtgcgcgtgctgagcctgtttcggaatatcgataaagtcctgaaaagcctgggattcctggagagcggctctggctccggcggtggcaccctgaagtacgtggaggatgtgacaaacgtggtcagacgggatgtggagaagtggggccccttcgatctggtgtacggcagcacccaacccctgggcagctcttgtgaccggtgccctggctggtacatgtttcagttccaccggatcctgcagtacgccctgccgagacaggagtcccagcggccattcttttggattttcatggacaacttgctgctgaccgaggatgaccaggaaactaccactcggttcctgcagaccgaagccgtgaccctgcaggacgtgagaggccgggactaccagaacgccatgcgggtgtggtccaacatccctggactgaaaagcaagcacgcacctctgacccctaaagaagaggagtacctgcaggcccaggtgcggagcagaagcaagctggacgcccctaaggtggatctgctggtgaagaattgcctcctgcccctgagagagtacttcaagtatttcagccagaatagtctgcccctgggaggcagcggcggcggccaggacgtggtgacattcaaggacgtcgccatctacttcagccctgaggaatgggtgcggctgagcgccggacagagagaactgtaccaggaggtgatgctggacaactacgagctggtgaccagcctggatagagagagcaaactgctgtataagatggaccccgaggaagaaagctgcgagggcgtgccatacagctctgccgacagcggcgcccctgatagctcctccacctctgcttgtggcggcccaagcagcggcgcccctcctcccagcggcggcagcccagccggctccccaacctctaccgaggagggcacctctgagtccgccacccccgagagcggccctggcacctccaccgagcccagcgagggcagcgcacccggcagccctgccggcagccccacctccacagaggagggaaccagcaccgagcccagcgaaggcagcgccccaggcaccagcaccgagcctagtgagcaggagattaaacggatcaacaagatcagaagaagacttgtgaaagacagcaacaccaagaaggccggcaagacaggccccatgaaaaccctgctggttagagtgatgacacccgatctgagagagcggctggaaaacctgagaaagaagcctgaaaatatcccccagcccatcagcaatacatctagagccaacctgaataagctgctgaccgattacaccgaaatgaagaaggcgatcctgcatgtgtactgggaagagttccagaaggaccctgtgggcctgatgagccgggtggcccagcctgccagcaagaagatcgatcagaacaagctgaaacctgagatggacgagaagggcaacctgaccaccgccggctttgcctgctctcagtgtggccagcccctgttcgtgtacaagctggagcaggtgtctgagaagggcaaggcttacaccaactacttcggacggtgcaatgtggccgagcacgaaaagctgatcctgctggcccagctgaagcccgagaaggatagcgacgaagccgtgacatatagcctgggaaagtttgggcagagggccctggatttctacagcattcatgtgaccaaggagtccacccaccccgtgaagcccctggcccagatcgccggaaacagatacgcctccggacctgtgggaaaggccctgagcgacgcatgtatgggcacaatcgcctccttcctgtctaagtaccaggacatcatcatcgaacaccagaaggtggtgaagggcaaccagaagagactggagagcctgcgggagctggccggcaaggaaaacctggaataccctagcgtgaccctgccacctcagcctcacaccaaggagggcgttgatgcctacaacgaagtgatcgcccgggtgcgaatgtgggtgaacctgaacctgtggcagaagctgaagctaagcagagatgatgccaagcctctgctgagactgaagggattcccttcctttcctctggtcgagagacaggccaacgaagtggactggtgggacatggtgtgtaacgtgaagaagctgatcaacgagaaaaaggaggatggcaaggtgttttggcagaatctggctggctacaagagacaggaagccctgagaccatacctgagcagcgaggaagatcggaagaagggaaagaaattcgctcggtaccagctgggcgacctgctgctgcacctggaaaagaagcacggcgaggactggggaaaggtgtacgacgaggcctgggagcggattgacaagaaagtggaaggcctgagcaagcacatcaagctggaagaggaacggagaagcgaggacgcccagagcaaggccgccctgaccgactggctgcgggctaaggccagcttcgtgatcgagggcctgaaggaggccgacaaggacgagttctgcagatgcgagctgaagctgcagaagtggtacggggacctgcggggaaagcccttcgccatcgaagccgagaacagcatcctggacatcagcggcttcagcaagcagtacaactgtgccttcatctggcagaaggacggcgtgaagaagctgaacctgtacctgatcatcaactacttcaagggcggcaagctgcggttcaagaagatcaaacctgaagccttcgaagccaacagattctacaccgtgatcaacaaaaagagcggcgagatcgtgcccatggaggtgaacttcaacttcgacgaccccaacctgatcatcctgcctctggcctttggcaagagacagggcagagaattcatctggaacgacctgctgtccctggaaaccggcagcctgaagctggccaacggaagagtgatcgagaagacactgtacaacagaagaacccggcaggatgagcctgccctgttcgtggccctgaccttcgagcggcgggaggtcctggactcctccaatatcaaaccaatgaacctgatcggcgtggcaagaggcgaaaacatccccgccgtgatcgccctgaccgaccccgagggctgcccactgagccggtttaaggatagcctgggaaacccaacccacatcctgagaatcggcgagagctataaggagaagcagcggaccatccaggccaagaaggaggtggagcagcggagagccggcggctacagccggaagtacgccagcaaagccaagaatctggcagacgatatggtgagaaacaccgctagagatctgctgtactacgccgtgacccaggatgccatgctgatcttcgccaacctgagccggggcttcggccggcagggcaagcggaccttcatggccgagagacagtacacacggatggaggactggctgaccgccaagctggcctacgagggcctgagcaagacctacctgtccaagacactggcccagtacacctccaagacatgcagcaactgtgggtttaccatcaccagcgccgactacgacagggtgctggagaagctgaagaagacagcaacaggctggatgaccacaattaacggcaaggagctgaaggtggagggccagattacctactacaacagatacaagagacagaacgtagtcaaggacctgtccgtcgagctggatagactgagcgaagaatctgtgaacaacgacatctcctcctggacaaagggcagaagcggagaagctctgagcctcctgaagaaaagattctcccatagacccgtgcaggagaagttcgtgtgcctgaactgcggcttcgagacacacgcagccgagcaagccgccctgaacatcgccagatcctggctgttcctgcggagccaggagtacaagaaataccagacaaacaagacaaccggcaacaccgataagagagccttcgtcgagacctggcagtccttttaccggaagaagcttaaggaggtgtggaaacctgccgtgcggtctggcggatctggcggaggctcctctacacctgtgaccttcgaggatgtggtggtctacttcaccgccgctgagtgggtgcacctgacaaactggcaaagagatttttatcaggccgtgatgatggaaacctacgagctggtggccagcgtggctggcgacggcgttccaatggccgaggacgaggaaggcggagtggaaagacccgtgtggcagtacatccccagaggcaagcggcggagaaagacccctcagcctcgcgccgacggatctggctccggcagcggccccaagaaaaagagaaaagtctaagctgccttctgcggggcttgccttctggccatgcccttcttctctcccttgcacctgtacctcttggtctttgaataaagcctgagtaggaaggctagcaaaaaaaaaaaaaaaaaaaaaaaaaaaaaaaaaaaaaaaaaaaaaaaaaaaaaaaaaaaagcatgcaaaaaaaaaaaaaaaaaaaaaaaaaaaaaaaaaaaaaaaaaaaaaaaaaaaaaaaaa

SEQ ID NO: 2453 - RNA, 5684 nt, synthetic construct
  source 1..5684: mol_type = other RNA
aggaaataagagagaaaagaagagtaagaagaaatataagagccaccgccaccatggcccctaagaagaagcgtaaagtgagccggaaccacgaccaggagttcgacccccctaaggtgtaccctcccgtccccgccgagaagagaaagcccatccgggtcctgagcctgttcgatggcatcgccaccggtctgctggtgctgaaggacctgggcatccaggtggataggtacattgcctccgaggtgtgcgaggactccatcaccgtgggaatggtgcgtcatcagggcaagatcatgtacgtgggcgacgtgcggagcgtgacacagaagcatatccaggagtggggccctttcgacctggtgatcggcggcagcccttgcaatgacctgagcatcgtgaacccagcccggaagggcctgtacgagggaaccggcagactgttcttcgagttttacagactgctgcacgacgcccggcctaaggaaggcgacgaccggcccttcttttggctgttcgagaatgtggtggccatgggagtcagcgacaagcgggatattagccggttcctggagagcaaccccgtgatgatcgatgccaaggaagtgagcgccgcccaccgggccagatacttctggggcaatctgcctggcatgaacagacccctggccagcaccgtgaacgacaagctggagctgcaggagtgcctggagcacggccggatcgccaagttcagcaaggtgagaaccatcaccacccgaagcaacagcatcaaacaaggcaaggaccagcactttcctgtgttcatgaacgagaaggaggacatcctgtggtgtaccgagatggagagagtgttcgggttcccagtccactacacagatgtcagcaacatgtctagactggccagacagagactgctgggaagaagctggtccgtccctgtgatcagacacctgttcgcccctctgaaggagtacttcgcctgcgtgagcagcggcaacagcaacgccaacagccggggccccagcttctctagcggcctggtgccactgtccctgagagggagccacatgggccccatggagatctacaaaaccgtgagcgcctggaagcggcagcctgtgcgcgtgctgagcctgtttcggaatatcgataaagtcctgaaaagcctgggattcctggagagcggctctggctccggcggtggcaccctgaagtacgtggaggatgtgacaaacgtggtcagacgggatgtggagaagtggggccccttcgatctggtgtacggcagcacccaacccctgggcagctcttgtgaccggtgccctggctggtacatgtttcagttccaccggatcctgcagtacgccctgccgagacaggagtcccagcggccattcttttggattttcatggacaacttgctgctgaccgaggatgaccaggaaactaccactcggttcctgcagaccgaagccgtgaccctgcaggacgtgagaggccgggactaccagaacgccatgcgggtgtggtccaacatccctggactgaaaagcaagcacgcacctctgacccctaaagaagaggagtacctgcaggcccaggtgcggagcagaagcaagctggacgcccctaaggtggatctgctggtgaagaattgcctcctgcccctgagagagtacttcaagtatttcagccagaatagtctgcccctgggaggcagcggcggcggccaggacgtggtgacattcaaggacgtcgccatctacttcagccctgaggaatgggtgcggctgagcgccggacagagagaactgtaccaggaggtgatgctggacaactacgagctggtgaccagcctggatagagagagcaaactgctgtataagatggaccccgaggaagaaagctgcgagggcgtgccatacagctctgccgacagcggcgcccctgatagctcctccacctctgcttgtggcggcccaagcagcggcgcccctcctcccagcggcggcagcccagccggctccccaacctctaccgaggagggcacctctgagtccgccacccccgagagcggccctggcacctccaccgagcccagcgagggcagcgcacccggcagccctgccggcagccccacctccacagaggagggaaccagcaccgagcccagcgaaggcagcgccccaggcaccagcaccgagcctagtgagcaggagattaaacggatcaacaagatcagaagaagacttgtgaaagacagcaacaccaagaaggccggcaagacaggccccatgaaaaccctgctggttagagtgatgacacccgatctgagagagcggctggaaaacctgagaaagaagcctgaaaatatcccccagcccatcagcaatacatctagagccaacctgaataagctgctgaccgattacaccgaaatgaagaaggcgatcctgcatgtgtactgggaagagttccagaaggaccctgtgggcctgatgagccgggtggcccagcctgccagcaagaagatcgatcagaacaagctgaaacctgagatggacgagaagggcaacctgaccaccgccggctttgcctgctctcagtgtggccagcccctgttcgtgtacaagctggagcaggtgtctgagaagggcaaggcttacaccaactacttcggacggtgcaatgtggccgagcacgaaaagctgatcctgctggcccagctgaagcccgagaaggatagcgacgaagccgtgacatatagcctgggaaagtttgggcagagggccctggatttctacagcattcatgtgaccaaggagtccacccaccccgtgaagcccctggcccagatcgccggaaacagatacgcctccggacctgtgggaaaggccctgagcgacgcatgtatgggcacaatcgcctccttcctgtctaagtaccaggacatcatcatcgaacaccagaaggtggtgaagggcaaccagaagagactggagagcctgcgggagctggccggcaaggaaaacctggaataccctagcgtgaccctgccacctcagcctcacaccaaggagggcgttgatgcctacaacgaagtgatcgcccgggtgcgaatgtgggtgaacctgaacctgtggcagaagctgaagctaagcagagatgatgccaagcctctgctgagactgaagggattcccttcctttcctctggtcgagagacaggccaacgaagtggactggtgggacatggtgtgtaacgtgaagaagctgatcaacgagaaaaaggaggatggcaaggtgttttggcagaatctggctggctacaagagacaggaagccctgagaccatacctgagcagcgaggaagatcggaagaagggaaagaaattcgctcggtaccagctgggcgacctgctgctgcacctggaaaagaagcacggcgaggactggggaaaggtgtacgacgaggcctgggagcggattgacaagaaagtggaaggcctgagcaagcacatcaagctggaagaggaacggagaagcgaggacgcccagagcaaggccgccctgaccgactggctgcgggctaaggccagcttcgtgatcgagggcctgaaggaggccgacaaggacgagttctgcagatgcgagctgaagctgcagaagtggtacggggacctgcggggaaagcccttcgccatcgaagccgagaacagcatcctggacatcagcggcttcagcaagcagtacaactgtgccttcatctggcagaaggacggcgtgaagaagctgaacctgtacctgatcatcaactacttcaagggcggcaagctgcggttcaagaagatcaaacctgaagccttcgaagccaacagattctacaccgtgatcaacaaaaagagcggcgagatcgtgcccatggaggtgaacttcaacttcgacgaccccaacctgatcatcctgcctctggcctttggcaagagacagggcagagaattcatctggaacgacctgctgtccctggaaaccggcagcctgaagctggccaacggaagagtgatcgagaagacactgtacaacagaagaacccggcaggatgagcctgccctgttcgtggccctgaccttcgagcggcgggaggtcctggactcctccaatatcaaaccaatgaacctgatcggcgtggcaagaggcgaaaacatccccgccgtgatcgccctgaccgaccccgagggctgcccactgagccggtttaaggatagcctgggaaacccaacccacatcctgagaatcggcgagagctataaggagaagcagcggaccatccaggccaagaaggaggtggagcagcggagagccggcggctacagccggaagtacgccagcaaagccaagaatctggcagacgatatggtgagaaacaccgctagagatctgctgtactacgccgtgacccaggatgccatgctgatcttcgccaacctgagccggggcttcggccggcagggcaagcggaccttcatggccgagagacagtacacacggatggaggactggctgaccgccaagctggcctacgagggcctgagcaagacctacctgtccaagacactggcccagtacacctccaagacatgcagcaactgtgggtttaccatcaccagcgccgactacgacagggtgctggagaagctgaagaagacagcaacaggctggatgaccacaattaacggcaaggagctgaaggtggagggccagattacctactacaacagatacaagagacagaacgtagtcaaggacctgtccgtcgagctggatagactgagcgaagaatctgtgaacaacgacatctcctcctggacaaagggcagaagcggagaagctctgagcctcctgaagaaaagattctcccatagacccgtgcaggagaagttcgtgtgcctgaactgcggcttcgagacacacgcagccgagcaagccgccctgaacatcgccagatcctggctgttcctgcggagccaggagtacaagaaataccagacaaacaagacaaccggcaacaccgataagagagccttcgtcgagacctggcagtccttttaccggaagaagcttaaggaggtgtggaaacctgccgtgcggtctggcggatctggcggaggctccgccctggtgacatttgaggacgtcgccgtgcggttcacccaggaggaatgggctctgctggatccttctcagaaaatcctgtaccgggacgtgatgagagagacataccggaatctgacctccgtgggcatcaactgggaatgttgggaccttgaagcctgcttcagaagcctgggaagaaacctgagagtgcaggtggtgaagagaaagtgcgagctgaccaacagcggcccctgcgccgagggatctggctccggcagcggccccaagaaaaagagaaaagtctaagctgccttctgcggggcttgccttctggccatgcccttcttctctcccttgcacctgtacctcttggtctttgaataaagcctgagtaggaaggctagcaaaaaaaaaaaaaaaaaaaaaaaaaaaaaaaaaaaaaaaaaaaaaaaaaaaaaaaaaaaagcatgcaaaaaaaaaaaaaaaaaaaaaaaaaaaaaaaaaaaaaaaaaaaaaaaaaaaaaaaaa

SEQ ID NO: 2454 - RNA, 5684 nt, synthetic construct
  source 1..5684: mol_type = other RNA
aggaaataagagagaaaagaagagtaagaagaaatataagagccaccgccaccatggcccctaagaagaagcgtaaagtgagccggaaccacgaccaggagttcgacccccctaaggtgtaccctcccgtccccgccgagaagagaaagcccatccgggtcctgagcctgttcgatggcatcgccaccggtctgctggtgctgaaggacctgggcatccaggtggataggtacattgcctccgaggtgtgcgaggactccatcaccgtgggaatggtgcgtcatcagggcaagatcatgtacgtgggcgacgtgcggagcgtgacacagaagcatatccaggagtggggccctttcgacctggtgatcggcggcagcccttgcaatgacctgagcatcgtgaacccagcccggaagggcctgtacgagggaaccggcagactgttcttcgagttttacagactgctgcacgacgcccggcctaaggaaggcgacgaccggcccttcttttggctgttcgagaatgtggtggccatgggagtcagcgacaagcgggatattagccggttcctggagagcaaccccgtgatgatcgatgccaaggaagtgagcgccgcccaccgggccagatacttctggggcaatctgcctggcatgaacagacccctggccagcaccgtgaacgacaagctggagctgcaggagtgcctggagcacggccggatcgccaagttcagcaaggtgagaaccatcaccacccgaagcaacagcatcaaacaaggcaaggaccagcactttcctgtgttcatgaacgagaaggaggacatcctgtggtgtaccgagatggagagagtgttcgggttcccagtccactacacagatgtcagcaacatgtctagactggccagacagagactgctgggaagaagctggtccgtccctgtgatcagacacctgttcgcccctctgaaggagtacttcgcctgcgtgagcagcggcaacagcaacgccaacagccggggccccagcttctctagcggcctggtgccactgtccctgagagggagccacatgggccccatggagatctacaaaaccgtgagcgcctggaagcggcagcctgtgcgcgtgctgagcctgtttcggaatatcgataaagtcctgaaaagcctgggattcctggagagcggctctggctccggcggtggcaccctgaagtacgtggaggatgtgacaaacgtggtcagacgggatgtggagaagtggggccccttcgatctggtgtacggcagcacccaacccctgggcagctcttgtgaccggtgccctggctggtacatgtttcagttccaccggatcctgcagtacgccctgccgagacaggagtcccagcggccattcttttggattttcatggacaacttgctgctgaccgaggatgaccaggaaactaccactcggttcctgcagaccgaagccgtgaccctgcaggacgtgagaggccgggactaccagaacgccatgcgggtgtggtccaacatccctggactgaaaagcaagcacgcacctctgacccctaaagaagaggagtacctgcaggcccaggtgcggagcagaagcaagctggacgcccctaaggtggatctgctggtgaagaattgcctcctgcccctgagagagtacttcaagtatttcagccagaatagtctgcccctgggaggcagcggcggcggcgccctggtgacatttgaggacgtcgccgtgcggttcacccaggaggaatgggctctgctggatccttctcagaaaatcctgtaccgggacgtgatgagagagacataccggaatctgacctccgtgggcatcaactgggaatgttgggaccttgaagcctgcttcagaagcctgggaagaaacctgagagtgcaggtggtgaagagaaagtgcgagctgaccaacagcggcccctgcgccgagggcggcccaagcagcggcgcccctcctcccagcggcggcagcccagccggctccccaacctctaccgaggagggcacctctgagtccgccacccccgagagcggccctggcacctccaccgagcccagcgagggcagcgcacccggcagccctgccggcagccccacctccacagaggagggaaccagcaccgagcccagcgaaggcagcgccccaggcaccagcaccgagcctagtgagcaggagattaaacggatcaacaagatcagaagaagacttgtgaaagacagcaacaccaagaaggccggcaagacaggccccatgaaaaccctgctggttagagtgatgacacccgatctgagagagcggctggaaaacctgagaaagaagcctgaaaatatcccccagcccatcagcaatacatctagagccaacctgaataagctgctgaccgattacaccgaaatgaagaaggcgatcctgcatgtgtactgggaagagttccagaaggaccctgtgggcctgatgagccgggtggcccagcctgccagcaagaagatcgatcagaacaagctgaaacctgagatggacgagaagggcaacctgaccaccgccggctttgcctgctctcagtgtggccagcccctgttcgtgtacaagctggagcaggtgtctgagaagggcaaggcttacaccaactacttcggacggtgcaatgtggccgagcacgaaaagctgatcctgctggcccagctgaagcccgagaaggatagcgacgaagccgtgacatatagcctgggaaagtttgggcagagggccctggatttctacagcattcatgtgaccaaggagtccacccaccccgtgaagcccctggcccagatcgccggaaacagatacgcctccggacctgtgggaaaggccctgagcgacgcatgtatgggcacaatcgcctccttcctgtctaagtaccaggacatcatcatcgaacaccagaaggtggtgaagggcaaccagaagagactggagagcctgcgggagctggccggcaaggaaaacctggaataccctagcgtgaccctgccacctcagcctcacaccaaggagggcgttgatgcctacaacgaagtgatcgcccgggtgcgaatgtgggtgaacctgaacctgtggcagaagctgaagctaagcagagatgatgccaagcctctgctgagactgaagggattcccttcctttcctctggtcgagagacaggccaacgaagtggactggtgggacatggtgtgtaacgtgaagaagctgatcaacgagaaaaaggaggatggcaaggtgttttggcagaatctggctggctacaagagacaggaagccctgagaccatacctgagcagcgaggaagatcggaagaagggaaagaaattcgctcggtaccagctgggcgacctgctgctgcacctggaaaagaagcacggcgaggactggggaaaggtgtacgacgaggcctgggagcggattgacaagaaagtggaaggcctgagcaagcacatcaagctggaagaggaacggagaagcgaggacgcccagagcaaggccgccctgaccgactggctgcgggctaaggccagcttcgtgatcgagggcctgaaggaggccgacaaggacgagttctgcagatgcgagctgaagctgcagaagtggtacggggacctgcggggaaagcccttcgccatcgaagccgagaacagcatcctggacatcagcggcttcagcaagcagtacaactgtgccttcatctggcagaaggacggcgtgaagaagctgaacctgtacctgatcatcaactacttcaagggcggcaagctgcggttcaagaagatcaaacctgaagccttcgaagccaacagattctacaccgtgatcaacaaaaagagcggcgagatcgtgcccatggaggtgaacttcaacttcgacgaccccaacctgatcatcctgcctctggcctttggcaagagacagggcagagaattcatctggaacgacctgctgtccctggaaaccggcagcctgaagctggccaacggaagagtgatcgagaagacactgtacaacagaagaacccggcaggatgagcctgccctgttcgtggccctgaccttcgagcggcgggaggtcctggactcctccaatatcaaaccaatgaacctgatcggcgtggcaagaggcgaaaacatccccgccgtgatcgccctgaccgaccccgagggctgcccactgagccggtttaaggatagcctgggaaacccaacccacatcctgagaatcggcgagagctataaggagaagcagcggaccatccaggccaagaaggaggtggagcagcggagagccggcggctacagccggaagtacgccagcaaagccaagaatctggcagacgatatggtgagaaacaccgctagagatctgctgtactacgccgtgacccaggatgccatgctgatcttcgccaacctgagccggggcttcggccggcagggcaagcggaccttcatggccgagagacagtacacacggatggaggactggctgaccgccaagctggcctacgagggcctgagcaagacctacctgtccaagacactggcccagtacacctccaagacatgcagcaactgtgggtttaccatcaccagcgccgactacgacagggtgctggagaagctgaagaagacagcaacaggctggatgaccacaattaacggcaaggagctgaaggtggagggccagattacctactacaacagatacaagagacagaacgtagtcaaggacctgtccgtcgagctggatagactgagcgaagaatctgtgaacaacgacatctcctcctggacaaagggcagaagcggagaagctctgagcctcctgaagaaaagattctcccatagacccgtgcaggagaagttcgtgtgcctgaactgcggcttcgagacacacgcagccgagcaagccgccctgaacatcgccagatcctggctgttcctgcggagccaggagtacaagaaataccagacaaacaagacaaccggcaacaccgataagagagccttcgtcgagacctggcagtccttttaccggaagaagcttaaggaggtgtggaaacctgccgtgcggtctggcggatctggcggaggctcctctacacctgtgaccttcgaggatgtggtggtctacttcaccgccgctgagtgggtgcacctgacaaactggcaaagagatttttatcaggccgtgatgatggaaacctacgagctggtggccagcgtggctggcgacggcgttccaatggccgaggacgaggaaggcggagtggaaagacccgtgtggcagtacatccccagaggcaagcggcggagaaagacccctcagcctcgcgccgacggatctggctccggcagcggccccaagaaaaagagaaaagtctaagctgccttctgcggggcttgccttctggccatgcccttcttctctcccttgcacctgtacctcttggtctttgaataaagcctgagtaggaaggctagcaaaaaaaaaaaaaaaaaaaaaaaaaaaaaaaaaaaaaaaaaaaaaaaaaaaaaaaaaaaagcatgcaaaaaaaaaaaaaaaaaaaaaaaaaaaaaaaaaaaaaaaaaaaaaaaaaaaaaaaaa

SEQ ID NO: 2455 - RNA, 5684 nt, synthetic construct
  source 1..5684: mol_type = other RNA
aggaaataagagagaaaagaagagtaagaagaaatataagagccaccgccaccatggcccctaagaagaagcgtaaagtgagccggaaccacgaccaggagttcgacccccctaaggtgtaccctcccgtccccgccgagaagagaaagcccatccgggtcctgagcctgttcgatggcatcgccaccggtctgctggtgctgaaggacctgggcatccaggtggataggtacattgcctccgaggtgtgcgaggactccatcaccgtgggaatggtgcgtcatcagggcaagatcatgtacgtgggcgacgtgcggagcgtgacacagaagcatatccaggagtggggccctttcgacctggtgatcggcggcagcccttgcaatgacctgagcatcgtgaacccagcccggaagggcctgtacgagggaaccggcagactgttcttcgagttttacagactgctgcacgacgcccggcctaaggaaggcgacgaccggcccttcttttggctgttcgagaatgtggtggccatgggagtcagcgacaagcgggatattagccggttcctggagagcaaccccgtgatgatcgatgccaaggaagtgagcgccgcccaccgggccagatacttctggggcaatctgcctggcatgaacagacccctggccagcaccgtgaacgacaagctggagctgcaggagtgcctggagcacggccggatcgccaagttcagcaaggtgagaaccatcaccacccgaagcaacagcatcaaacaaggcaaggaccagcactttcctgtgttcatgaacgagaaggaggacatcctgtggtgtaccgagatggagagagtgttcgggttcccagtccactacacagatgtcagcaacatgtctagactggccagacagagactgctgggaagaagctggtccgtccctgtgatcagacacctgttcgcccctctgaaggagtacttcgcctgcgtgagcagcggcaacagcaacgccaacagccggggccccagcttctctagcggcctggtgccactgtccctgagagggagccacatgggccccatggagatctacaaaaccgtgagcgcctggaagcggcagcctgtgcgcgtgctgagcctgtttcggaatatcgataaagtcctgaaaagcctgggattcctggagagcggctctggctccggcggtggcaccctgaagtacgtggaggatgtgacaaacgtggtcagacgggatgtggagaagtggggccccttcgatctggtgtacggcagcacccaacccctgggcagctcttgtgaccggtgccctggctggtacatgtttcagttccaccggatcctgcagtacgccctgccgagacaggagtcccagcggccattcttttggattttcatggacaacttgctgctgaccgaggatgaccaggaaactaccactcggttcctgcagaccgaagccgtgaccctgcaggacgtgagaggccgggactaccagaacgccatgcgggtgtggtccaacatccctggactgaaaagcaagcacgcacctctgacccctaaagaagaggagtacctgcaggcccaggtgcggagcagaagcaagctggacgcccctaaggtggatctgctggtgaagaattgcctcctgcccctgagagagtacttcaagtatttcagccagaatagtctgcccctgggaggcagcggcggcggcgccctggtgacatttgaggacgtcgccgtgcggttcacccaggaggaatgggctctgctggatccttctcagaaaatcctgtaccgggacgtgatgagagagacataccggaatctgacctccgtgggcatcaactgggaatgttgggaccttgaagcctgcttcagaagcctgggaagaaacctgagagtgcaggtggtgaagagaaagtgcgagctgaccaacagcggcccctgcgccgagggcggcccaagcagcggcgcccctcctcccagcggcggcagcccagccggctccccaacctctaccgaggagggcacctctgagtccgccacccccgagagcggccctggcacctccaccgagcccagcgagggcagcgcacccggcagccctgccggcagccccacctccacagaggagggaaccagcaccgagcccagcgaaggcagcgccccaggcaccagcaccgagcctagtgagcaggagattaaacggatcaacaagatcagaagaagacttgtgaaagacagcaacaccaagaaggccggcaagacaggccccatgaaaaccctgctggttagagtgatgacacccgatctgagagagcggctggaaaacctgagaaagaagcctgaaaatatcccccagcccatcagcaatacatctagagccaacctgaataagctgctgaccgattacaccgaaatgaagaaggcgatcctgcatgtgtactgggaagagttccagaaggaccctgtgggcctgatgagccgggtggcccagcctgccagcaagaagatcgatcagaacaagctgaaacctgagatggacgagaagggcaacctgaccaccgccggctttgcctgctctcagtgtggccagcccctgttcgtgtacaagctggagcaggtgtctgagaagggcaaggcttacaccaactacttcggacggtgcaatgtggccgagcacgaaaagctgatcctgctggcccagctgaagcccgagaaggatagcgacgaagccgtgacatatagcctgggaaagtttgggcagagggccctggatttctacagcattcatgtgaccaaggagtccacccaccccgtgaagcccctggcccagatcgccggaaacagatacgcctccggacctgtgggaaaggccctgagcgacgcatgtatgggcacaatcgcctccttcctgtctaagtaccaggacatcatcatcgaacaccagaaggtggtgaagggcaaccagaagagactggagagcctgcgggagctggccggcaaggaaaacctggaataccctagcgtgaccctgccacctcagcctcacaccaaggagggcgttgatgcctacaacgaagtgatcgcccgggtgcgaatgtgggtgaacctgaacctgtggcagaagctgaagctaagcagagatgatgccaagcctctgctgagactgaagggattcccttcctttcctctggtcgagagacaggccaacgaagtggactggtgggacatggtgtgtaacgtgaagaagctgatcaacgagaaaaaggaggatggcaaggtgttttggcagaatctggctggctacaagagacaggaagccctgagaccatacctgagcagcgaggaagatcggaagaagggaaagaaattcgctcggtaccagctgggcgacctgctgctgcacctggaaaagaagcacggcgaggactggggaaaggtgtacgacgaggcctgggagcggattgacaagaaagtggaaggcctgagcaagcacatcaagctggaagaggaacggagaagcgaggacgcccagagcaaggccgccctgaccgactggctgcgggctaaggccagcttcgtgatcgagggcctgaaggaggccgacaaggacgagttctgcagatgcgagctgaagctgcagaagtggtacggggacctgcggggaaagcccttcgccatcgaagccgagaacagcatcctggacatcagcggcttcagcaagcagtacaactgtgccttcatctggcagaaggacggcgtgaagaagctgaacctgtacctgatcatcaactacttcaagggcggcaagctgcggttcaagaagatcaaacctgaagccttcgaagccaacagattctacaccgtgatcaacaaaaagagcggcgagatcgtgcccatggaggtgaacttcaacttcgacgaccccaacctgatcatcctgcctctggcctttggcaagagacagggcagagaattcatctggaacgacctgctgtccctggaaaccggcagcctgaagctggccaacggaagagtgatcgagaagacactgtacaacagaagaacccggcaggatgagcctgccctgttcgtggccctgaccttcgagcggcgggaggtcctggactcctccaatatcaaaccaatgaacctgatcggcgtggcaagaggcgaaaacatccccgccgtgatcgccctgaccgaccccgagggctgcccactgagccggtttaaggatagcctgggaaacccaacccacatcctgagaatcggcgagagctataaggagaagcagcggaccatccaggccaagaaggaggtggagcagcggagagccggcggctacagccggaagtacgccagcaaagccaagaatctggcagacgatatggtgagaaacaccgctagagatctgctgtactacgccgtgacccaggatgccatgctgatcttcgccaacctgagccggggcttcggccggcagggcaagcggaccttcatggccgagagacagtacacacggatggaggactggctgaccgccaagctggcctacgagggcctgagcaagacctacctgtccaagacactggcccagtacacctccaagacatgcagcaactgtgggtttaccatcaccagcgccgactacgacagggtgctggagaagctgaagaagacagcaacaggctggatgaccacaattaacggcaaggagctgaaggtggagggccagattacctactacaacagatacaagagacagaacgtagtcaaggacctgtccgtcgagctggatagactgagcgaagaatctgtgaacaacgacatctcctcctggacaaagggcagaagcggagaagctctgagcctcctgaagaaaagattctcccatagacccgtgcaggagaagttcgtgtgcctgaactgcggcttcgagacacacgcagccgagcaagccgccctgaacatcgccagatcctggctgttcctgcggagccaggagtacaagaaataccagacaaacaagacaaccggcaacaccgataagagagccttcgtcgagacctggcagtccttttaccggaagaagcttaaggaggtgtggaaacctgccgtgcggtctggcggatctggcggaggctcccaggacgtggtgacattcaaggacgtcgccatctacttcagccctgaggaatgggtgcggctgagcgccggacagagagaactgtaccaggaggtgatgctggacaactacgagctggtgaccagcctggatagagagagcaaactgctgtataagatggaccccgaggaagaaagctgcgagggcgtgccatacagctctgccgacagcggcgcccctgatagctcctccacctctgcttgtggatctggctccggcagcggccccaagaaaaagagaaaagtctaagctgccttctgcggggcttgccttctggccatgcccttcttctctcccttgcacctgtacctcttggtctttgaataaagcctgagtaggaaggctagcaaaaaaaaaaaaaaaaaaaaaaaaaaaaaaaaaaaaaaaaaaaaaaaaaaaaaaaaaaaagcatgcaaaaaaaaaaaaaaaaaaaaaaaaaaaaaaaaaaaaaaaaaaaaaaaaaaaaaaaaa

SEQ ID NO: 2456 - RNA, 9485 nt, synthetic construct
  source 1..9485: mol_type = other RNA
aggaaataagagagaaaagaagagtaagaagaaatataagagccaccatggcccctaagaagaagcgtaaagtgagccggatggaacgcctcgtctacgaggtgcggcagaagtgcagaaacatcgaggacatctgcatctcctgcggatctctgaacgtgaccctggagcacccactgttcatcggcggcatgtgccagaactgtaaaaactgttttctggagtgtgcctatcaatacgacgatgacggctaccagagctactgcaccatctgttgcggcggaagagaggtgctgatgtgtggaaataacaactgctgccggtgcttctgcgtggaatgcgtggacctgctggtgggccccggcgccgcccaggccgctattaaggaagatccttggaactgctacatgtgcggccacaagggcacatacggcctgctgagacggagagaggactggcctagcagactgcagatgttcttcgccaataaccacgaccaggagttcgacccccctaaggtgtaccctcccgtccccgccgagaagagaaagcccatccgggtcctgagcctgttcgatggcatcgccaccggtctgctggtgctgaaggacctgggcatccaggtggataggtacattgcctccgaggtgtgcgaggactccatcaccgtgggaatggtgcgtcatcagggcaagatcatgtacgtgggcgacgtgcggagcgtgacacagaagcatatccaggagtggggccctttcgacctggtgatcggcggcagcccttgcaatgacctgagcatcgtgaacccagcccggaagggcctgtacgagggaaccggcagactgttcttcgagttttacagactgctgcacgacgcccggcctaaggaaggcgacgaccggcccttcttttggctgttcgagaatgtggtggccatgggagtcagcgacaagcgggatattagccggttcctggagagcaaccccgtgatgatcgatgccaaggaagtgagcgccgcccaccgggccagatacttctggggcaatctgcctggcatgaacagacccctggccagcaccgtgaacgacaagctggagctgcaggagtgcctggagcacggccggatcgccaagttcagcaaggtgagaaccatcaccacccgaagcaacagcatcaaacaaggcaaggaccagcactttcctgtgttcatgaacgagaaggaggacatcctgtggtgtaccgagatggagagagtgttcgggttcccagtccactacacagatgtcagcaacatgtctagactggccagacagagactgctgggaagaagctggtccgtccctgtgatcagacacctgttcgcccctctgaaggagtacttcgcctgcgtgagcagcggcaacagcaacgccaacagccggggccccagcttctctagcggcctggtgccactgtccctgagagggagccacatgggccccatggagatctacaaaaccgtgagcgcctggaagcggcagcctgtgcgcgtgctgagcctgtttcggaatatcgataaagtcctgaaaagcctgggattcctggagagcggctctggctccggcggtggcaccctgaagtacgtggaggatgtgacaaacgtggtcagacgggatgtggagaagtggggccccttcgatctggtgtacggcagcacccaacccctgggcagctcttgtgaccggtgccctggctggtacatgtttcagttccaccggatcctgcagtacgccctgccgagacaggagtcccagcggccattcttttggattttcatggacaacttgctgctgaccgaggatgaccaggaaactaccactcggttcctgcagaccgaagccgtgaccctgcaggacgtgagaggccgggactaccagaacgccatgcgggtgtggtccaacatccctggactgaaaagcaagcacgcacctctgacccctaaagaagaggagtacctgcaggcccaggtgcggagcagaagcaagctggacgcccctaaggtggatctgctggtgaagaattgcctcctgcccctgagagagtacttcaagtatttcagccagaatagtctgcccctgggaggcagcggcggcggcgccctggtgacatttgaggacgtcgccgtgcggttcacccaggaggaatgggctctgctggatccttctcagaaaatcctgtaccgggacgtgatgagagagacataccggaatctgacctccgtgggcatcaactgggaatgttgggaccttgaagcctgcttcagaagcctgggaagaaacctgagagtgcaggtggtgaagagaaagtgcgagctgaccaacagcggcccctgcgccgagggcggcccaagcagcggcgcccctcctcccagcggcggcagcccagccggctccccaacctctaccgaggagggcacctctgagtccgccacccccgagagcggccctggcacctccaccgagcccagcgagggcagcgcacccggcagccctgccggcagccccacctccacagaggagggaaccagcaccgagcccagcgaaggcagcgccccaggcaccagcaccgagcctagtgagcaggagattaaacggatcaacaagatcagaagaagacttgtgaaagacagcaacaccaagaaggccggcaagacaggccccatgaaaaccctgctggttagagtgatgacacccgatctgagagagcggctggaaaacctgagaaagaagcctgaaaatatcccccagcccatcagcaatacatctagagccaacctgaataagctgctgaccgattacaccgaaatgaagaaggcgatcctgcatgtgtactgggaagagttccagaaggaccctgtgggcctgatgagccgggtggcccagcctgccagcaagaagatcgatcagaacaagctgaaacctgagatggacgagaagggcaacctgaccaccgccggctttgcctgctctcagtgtggccagcccctgttcgtgtacaagctggagcaggtgtctgagaagggcaaggcttacaccaactacttcggacggtgcaatgtggccgagcacgaaaagctgatcctgctggcccagctgaagcccgagaaggatagcgacgaagccgtgacatatagcctgggaaagtttgggcagagggccctggatttctacagcattcatgtgaccaaggagtccacccaccccgtgaagcccctggcccagatcgccggaaacagatacgcctccggacctgtgggaaaggccctgagcgacgcatgtatgggcacaatcgcctccttcctgtctaagtaccaggacatcatcatcgaacaccagaaggtggtgaagggcaaccagaagagactggagagcctgcgggagctggccggcaaggaaaacctggaataccctagcgtgaccctgccacctcagcctcacaccaaggagggcgttgatgcctacaacgaagtgatcgcccgggtgcgaatgtgggtgaacctgaacctgtggcagaagctgaagctaagcagagatgatgccaagcctctgctgagactgaagggattcccttcctttcctctggtcgagagacaggccaacgaagtggactggtgggacatggtgtgtaacgtgaagaagctgatcaacgagaaaaaggaggatggcaaggtgttttggcagaatctggctggctacaagagacaggaagccctgagaccatacctgagcagcgaggaagatcggaagaagggaaagaaattcgctcggtaccagctgggcgacctgctgctgcacctggaaaagaagcacggcgaggactggggaaaggtgtacgacgaggcctgggagcggattgacaagaaagtggaaggcctgagcaagcacatcaagctggaagaggaacggagaagcgaggacgcccagagcaaggccgccctgaccgactggctgcgggctaaggccagcttcgtgatcgagggcctgaaggaggccgacaaggacgagttctgcagatgcgagctgaagctgcagaagtggtacggggacctgcggggaaagcccttcgccatcgaagccgagaacagcatcctggacatcagcggcttcagcaagcagtacaactgtgccttcatctggcagaaggacggcgtgaagaagctgaacctgtacctgatcatcaactacttcaagggcggcaagctgcggttcaagaagatcaaacctgaagccttcgaagccaacagattctacaccgtgatcaacaaaaagagcggcgagatcgtgcccatggaggtgaacttcaacttcgacgaccccaacctgatcatcctgcctctggcctttggcaagagacagggcagagaattcatctggaacgacctgctgtccctggaaaccggcagcctgaagctggccaacggaagagtgatcgagaagacactgtacaacagaagaacccggcaggatgagcctgccctgttcgtggccctgaccttcgagcggcgggaggtcctggactcctccaatatcaaaccaatgaacctgatcggcgtggcaagaggcgaaaacatccccgccgtgatcgccctgaccgaccccgagggctgcccactgagccggtttaaggatagcctgggaaacccaacccacatcctgagaatcggcgagagctataaggagaagcagcggaccatccaggccaagaaggaggtggagcagcggagagccggcggctacagccggaagtacgccagcaaagccaagaatctggcagacgatatggtgagaaacaccgctagagatctgctgtactacgccgtgacccaggatgccatgctgatcttcgccaacctgagccggggcttcggccggcagggcaagcggaccttcatggccgagagacagtacacacggatggaggactggctgaccgccaagctggcctacgagggcctgagcaagacctacctgtccaagacactggcccagtacacctccaagacatgcagcaactgtgggtttaccatcaccagcgccgactacgacagggtgctggagaagctgaagaagacagcaacaggctggatgaccacaattaacggcaaggagctgaaggtggagggccagattacctactacaacagatacaagagacagaacgtagtcaaggacctgtccgtcgagctggatagactgagcgaagaatctgtgaacaacgacatctcctcctggacaaagggcagaagcggagaagctctgagcctcctgaagaaaagattctcccatagacccgtgcaggagaagttcgtgtgcctgaactgcggcttcgagacacacgcagccgagcaagccgccctgaacatcgccagatcctggctgttcctgcggagccaggagtacaagaaataccagacaaacaagacaaccggcaacaccgataagagagccttcgtcgagacctggcagtccttttaccggaagaagcttaaggaggtgtggaaacctgccgtgcggtctggcggatctggcggaggctccgccctggtgacatttgaggacgtcgccgtgcggttcacccaggaggaatgggctctgctggatccttctcagaaaatcctgtaccgggacgtgatgagagagacataccggaatctgacctccgtgggcatcaactgggaatgttgggaccttgaagcctgcttcagaagcctgggaagaaacctgagagtgcaggtggtgaagagaaagtgcgagctgaccaacagcggcccctgcgccgagggcggcccaagcagcggcgcccctcctcccagcggcggcagcccagccggctccccaacctctaccgaggagggcacctctgagtccgccacccccgagagcggccctggcacctccaccgagcccagcgagggcagcgcacccggcagccctgccggcagccccacctccacagaggagggaaccagcaccgagcccagcgaaggcagcgccccaggcaccagcaccgagcctagtgagcaggagattaaacggatcaacaagatcagaagaagacttgtgaaagacagcaacaccaagaaggccggcaagacaggccccatgaaaaccctgctggttagagtgatgacacccgatctgagagagcggctggaaaacctgagaaagaagcctgaaaatatcccccagcccatcagcaatacatctagagccaacctgaataagctgctgaccgattacaccgaaatgaagaaggcgatcctgcatgtgtactgggaagagttccagaaggaccctgtgggcctgatgagccgggtggcccagcctgccagcaagaagatcgatcagaacaagctgaaacctgagatggacgagaagggcaacctgaccaccgccggctttgcctgctctcagtgtggccagcccctgttcgtgtacaagctggagcaggtgtctgagaagggcaaggcttacaccaactacttcggacggtgcaatgtggccgagcacgaaaagctgatcctgctggcccagctgaagcccgagaaggatagcgacgaagccgtgacatatagcctgggaaagtttgggcagagggccctggatttctacagcattcatgtgaccaaggagtccacccaccccgtgaagcccctggcccagatcgccggaaacagatacgcctccggacctgtgggaaaggccctgagcgacgcatgtatgggcacaatcgcctccttcctgtctaagtaccaggacatcatcatcgaacaccagaaggtggtgaagggcaaccagaagagactggagagcctgcgggagctggccggcaaggaaaacctggaataccctagcgtgaccctgccacctcagcctcacaccaaggagggcgttgatgcctacaacgaagtgatcgcccgggtgcgaatgtgggtgaacctgaacctgtggcagaagctgaagctaagcagagatgatgccaagcctctgctgagactgaagggattcccttcctttcctctggtcgagagacaggccaacgaagtggactggtgggacatggtgtgtaacgtgaagaagctgatcaacgagaaaaaggaggatggcaaggtgttttggcagaatctggctggctacaagagacaggaagccctgagaccatacctgagcagcgaggaagatcggaagaagggaaagaaattcgctcggtaccagctgggcgacctgctgctgcacctggaaaagaagcacggcgaggactggggaaaggtgtacgacgaggcctgggagcggattgacaagaaagtggaaggcctgagcaagcacatcaagctggaagaggaacggagaagcgaggacgcccagagcaaggccgccctgaccgactggctgcgggctaaggccagcttcgtgatcgagggcctgaaggaggccgacaaggacgagttctgcagatgcgagctgaagctgcagaagtggtacggggacctgcggggaaagcccttcgccatcgaagccgagaacagcatcctggacatcagcggcttcagcaagcagtacaactgtgccttcatctggcagaaggacggcgtgaagaagctgaacctgtacctgatcatcaactacttcaagggcggcaagctgcggttcaagaagatcaaacctgaagccttcgaagccaacagattctacaccgtgatcaacaaaaagagcggcgagatcgtgcccatggaggtgaacttcaacttcgacgaccccaacctgatcatcctgcctctggcctttggcaagagacagggcagagaattcatctggaacgacctgctgtccctggaaaccggcagcctgaagctggccaacggaagagtgatcgagaagacactgtacaacagaagaacccggcaggatgagcctgccctgttcgtggccctgaccttcgagcggcgggaggtcctggactcctccaatatcaaaccaatgaacctgatcggcgtggcaagaggcgaaaacatccccgccgtgatcgccctgaccgaccccgagggctgcccactgagccggtttaaggatagcctgggaaacccaacccacatcctgagaatcggcgagagctataaggagaagcagcggaccatccaggccaagaaggaggtggagcagcggagagccggcggctacagccggaagtacgccagcaaagccaagaatctggcagacgatatggtgagaaacaccgctagagatctgctgtactacgccgtgacccaggatgccatgctgatcttcgccaacctgagccggggcttcggccggcagggcaagcggaccttcatggccgagagacagtacacacggatggaggactggctgaccgccaagctggcctacgagggcctgagcaagacctacctgtccaagacactggcccagtacacctccaagacatgcagcaactgtgggtttaccatcaccagcgccgactacgacagggtgctggagaagctgaagaagacagcaacaggctggatgaccacaattaacggcaaggagctgaaggtggagggccagattacctactacaacagatacaagagacagaacgtagtcaaggacctgtccgtcgagctggatagactgagcgaagaatctgtgaacaacgacatctcctcctggacaaagggcagaagcggagaagctctgagcctcctgaagaaaagattctcccatagacccgtgcaggagaagttcgtgtgcctgaactgcggcttcgagacacacgcagccgagcaagccgccctgaacatcgccagatcctggctgttcctgcggagccaggagtacaagaaataccagacaaacaagacaaccggcaacaccgataagagagccttcgtcgagacctggcagtccttttaccggaagaagcttaaggaggtgtggaaacctgccgtgcggtctggcggatctggcggaggctcctgccctggtgacatttgaggacgtcgccgtgcggttcacccaggaggaatgggctctgctggatccttctcagaaaatcctgtaccgggacgtgatgagagagacataccggaatctgacctccgtgggcatcaactgggaatgttgggaccttgaagcctgcttcagaagcctgggaagaaacctgagagtgcaggtggtgaagagaaagtgcgagctgaccaacagcggcccctgcgccgagggatctggctccggcagcggccccaagaaaaagagaaaagtctaagctgccttctgcggggcttgccttctggccatgcccttcttctctcccttgcacctgtacctcttggtctttgaataaagcctgagtaggaaggctagcaaaaaaaaaaaaaaaaaaaaaaaaaaaaaaaaaaaaaaaaaaaaaaaaaaaaaaaaaaaaaaaaaaaaaaaaaaaaaaaa

SEQ ID NO: 2457 - RNA, 9485 nt, synthetic construct
  source 1..9485: mol_type = other RNA
aggaaataagagagaaaagaagagtaagaagaaatataagagccaccatggcccctaagaagaagcgtaaagtgagccggatggaacgcctcgtctacgaggtgcggcagaagtgcagaaacatcgaggacatctgcatctcctgcggatctctgaacgtgaccctggagcacccactgttcatcggcggcatgtgccagaactgtaaaaactgttttctggagtgtgcctatcaatacgacgatgacggctaccagagctactgcaccatctgttgcggcggaagagaggtgctgatgtgtggaaataacaactgctgccggtgcttctgcgtggaatgcgtggacctgctggtgggccccggcgccgcccaggccgctattaaggaagatccttggaactgctacatgtgcggccacaagggcacatacggcctgctgagacggagagaggactggcctagcagactgcagatgttcttcgccaataaccacgaccaggagttcgacccccctaaggtgtaccctcccgtccccgccgagaagagaaagcccatccgggtcctgagcctgttcgatggcatcgccaccggtctgctggtgctgaaggacctgggcatccaggtggataggtacattgcctccgaggtgtgcgaggactccatcaccgtgggaatggtgcgtcatcagggcaagatcatgtacgtgggcgacgtgcggagcgtgacacagaagcatatccaggagtggggccctttcgacctggtgatcggcggcagcccttgcaatgacctgagcatcgtgaacccagcccggaagggcctgtacgagggaaccggcagactgttcttcgagttttacagactgctgcacgacgcccggcctaaggaaggcgacgaccggcccttcttttggctgttcgagaatgtggtggccatgggagtcagcgacaagcgggatattagccggttcctggagagcaaccccgtgatgatcgatgccaaggaagtgagcgccgcccaccgggccagatacttctggggcaatctgcctggcatgaacagacccctggccagcaccgtgaacgacaagctggagctgcaggagtgcctggagcacggccggatcgccaagttcagcaaggtgagaaccatcaccacccgaagcaacagcatcaaacaaggcaaggaccagcactttcctgtgttcatgaacgagaaggaggacatcctgtggtgtaccgagatggagagagtgttcgggttcccagtccactacacagatgtcagcaacatgtctagactggccagacagagactgctgggaagaagctggtccgtccctgtgatcagacacctgttcgcccctctgaaggagtacttcgcctgcgtgagcagcggcaacagcaacgccaacagccggggccccagcttctctagcggcctggtgccactgtccctgagagggagccacatgggccccatggagatctacaaaaccgtgagcgcctggaagcggcagcctgtgcgcgtgctgagcctgtttcggaatatcgataaagtcctgaaaagcctgggattcctggagagcggctctggctccggcggtggcaccctgaagtacgtggaggatgtgacaaacgtggtcagacgggatgtggagaagtggggccccttcgatctggtgtacggcagcacccaacccctgggcagctcttgtgaccggtgccctggctggtacatgtttcagttccaccggatcctgcagtacgccctgccgagacaggagtcccagcggccattcttttggattttcatggacaacttgctgctgaccgaggatgaccaggaaactaccactcggttcctgcagaccgaagccgtgaccctgcaggacgtgagaggccgggactaccagaacgccatgcgggtgtggtccaacatccctggactgaaaagcaagcacgcacctctgacccctaaagaagaggagtacctgcaggcccaggtgcggagcagaagcaagctggacgcccctaaggtggatctgctggtgaagaattgcctcctgcccctgagagagtacttcaagtatttcagccagaatagtctgcccctgggaggcagcggcggcggcgccctggtgacatttgaggacgtcgccgtgcggttcacccaggaggaatgggctctgctggatccttctcagaaaatcctgtaccgggacgtgatgagagagacataccggaatctgacctccgtgggcatcaactgggaatgttgggaccttgaagcctgcttcagaagcctgggaagaaacctgagagtgcaggtggtgaagagaaagtgcgagctgaccaacagcggcccctgcgccgagggcggcccaagcagcggcgcccctcctcccagcggcggcagcccagccggctccccaacctctaccgaggagggcacctctgagtccgccacccccgagagcggccctggcacctccaccgagcccagcgagggcagcgcacccggcagccctgccggcagccccacctccacagaggagggaaccagcaccgagcccagcgaaggcagcgccccaggcaccagcaccgagcctagtgagcaggagattaaacggatcaacaagatcagaagaagacttgtgaaagacagcaacaccaagaaggccggcaagacaggccccatgaaaaccctgctggttagagtgatgacacccgatctgagagagcggctggaaaacctgagaaagaagcctgaaaatatcccccagcccatcagcaatacatctagagccaacctgaataagctgctgaccgattacaccgaaatgaagaaggcgatcctgcatgtgtactgggaagagttccagaaggaccctgtgggcctgatgagccgggtggcccagcctgccagcaagaagatcgatcagaacaagctgaaacctgagatggacgagaagggcaacctgaccaccgccggctttgcctgctctcagtgtggccagcccctgttcgtgtacaagctggagcaggtgtctgagaagggcaaggcttacaccaactacttcggacggtgcaatgtggccgagcacgaaaagctgatcctgctggcccagctgaagcccgagaaggatagcgacgaagccgtgacatatagcctgggaaagtttgggcagagggccctggatttctacagcattcatgtgaccaaggagtccacccaccccgtgaagcccctggcccagatcgccggaaacagatacgcctccggacctgtgggaaaggccctgagcgacgcatgtatgggcacaatcgcctccttcctgtctaagtaccaggacatcatcatcgaacaccagaaggtggtgaagggcaaccagaagagactggagagcctgcgggagctggccggcaaggaaaacctggaataccctagcgtgaccctgccacctcagcctcacaccaaggagggcgttgatgcctacaacgaagtgatcgcccgggtgcgaatgtgggtgaacctgaacctgtggcagaagctgaagctaagcagagatgatgccaagcctctgctgagactgaagggattcccttcctttcctctggtcgagagacaggccaacgaagtggactggtgggacatggtgtgtaacgtgaagaagctgatcaacgagaaaaaggaggatggcaaggtgttttggcagaatctggctggctacaagagacaggaagccctgagaccatacctgagcagcgaggaagatcggaagaagggaaagaaattcgctcggtaccagctgggcgacctgctgctgcacctggaaaagaagcacggcgaggactggggaaaggtgtacgacgaggcctgggagcggattgacaagaaagtggaaggcctgagcaagcacatcaagctggaagaggaacggagaagcgaggacgcccagagcaaggccgccctgaccgactggctgcgggctaaggccagcttcgtgatcgagggcctgaaggaggccgacaaggacgagttctgcagatgcgagctgaagctgcagaagtggtacggggacctgcggggaaagcccttcgccatcgaagccgagaacagcatcctggacatcagcggcttcagcaagcagtacaactgtgccttcatctggcagaaggacggcgtgaagaagctgaacctgtacctgatcatcaactacttcaagggcggcaagctgcggttcaagaagatcaaacctgaagccttcgaagccaacagattctacaccgtgatcaacaaaaagagcggcgagatcgtgcccatggaggtgaacttcaacttcgacgaccccaacctgatcatcctgcctctggcctttggcaagagacagggcagagaattcatctggaacgacctgctgtccctggaaaccggcagcctgaagctggccaacggaagagtgatcgagaagacactgtacaacagaagaacccggcaggatgagcctgccctgttcgtggccctgaccttcgagcggcgggaggtcctggactcctccaatatcaaaccaatgaacctgatcggcgtggcaagaggcgaaaacatccccgccgtgatcgccctgaccgaccccgagggctgcccactgagccggtttaaggatagcctgggaaacccaacccacatcctgagaatcggcgagagctataaggagaagcagcggaccatccaggccaagaaggaggtggagcagcggagagccggcggctacagccggaagtacgccagcaaagccaagaatctggcagacgatatggtgagaaacaccgctagagatctgctgtactacgccgtgacccaggatgccatgctgatcttcgccaacctgagccggggcttcggccggcagggcaagcggaccttcatggccgagagacagtacacacggatggaggactggctgaccgccaagctggcctacgagggcctgagcaagacctacctgtccaagacactggcccagtacacctccaagacatgcagcaactgtgggtttaccatcaccagcgccgactacgacagggtgctggagaagctgaagaagacagcaacaggctggatgaccacaattaacggcaaggagctgaaggtggagggccagattacctactacaacagatacaagagacagaacgtagtcaaggacctgtccgtcgagctggatagactgagcgaagaatctgtgaacaacgacatctcctcctggacaaagggcagaagcggagaagctctgagcctcctgaagaaaagattctcccatagacccgtgcaggagaagttcgtgtgcctgaactgcggcttcgagacacacgcagccgagcaagccgccctgaacatcgccagatcctggctgttcctgcggagccaggagtacaagaaataccagacaaacaagacaaccggcaacaccgataagagagccttcgtcgagacctggcagtccttttaccggaagaagcttaaggaggtgtggaaacctgccgtgcggtctggcggatctggcggaggctcccaggacgtggtgacattcaaggacgtcgccatctacttcagccctgaggaatgggtgcggctgagcgccggacagagagaactgtaccaggaggtgatgctggacaactacgagctggtgaccagcctggatagagagagcaaactgctgtataagatggaccccgaggaagaaagctgcgagggcgtgccatacagctctgccgacagcggcgcccctgatagctcctccacctctgcttgtggcggcccaagcagcggcgcccctcctcccagcggcggcagcccagccggctccccaacctctaccgaggagggcacctctgagtccgccacccccgagagcggccctggcacctccaccgagcccagcgagggcagcgcacccggcagccctgccggcagccccacctccacagaggagggaaccagcaccgagcccagcgaaggcagcgccccaggcaccagcaccgagcctagtgagcaggagattaaacggatcaacaagatcagaagaagacttgtgaaagacagcaacaccaagaaggccggcaagacaggccccatgaaaaccctgctggttagagtgatgacacccgatctgagagagcggctggaaaacctgagaaagaagcctgaaaatatcccccagcccatcagcaatacatctagagccaacctgaataagctgctgaccgattacaccgaaatgaagaaggcgatcctgcatgtgtactgggaagagttccagaaggaccctgtgggcctgatgagccgggtggcccagcctgccagcaagaagatcgatcagaacaagctgaaacctgagatggacgagaagggcaacctgaccaccgccggctttgcctgctctcagtgtggccagcccctgttcgtgtacaagctggagcaggtgtctgagaagggcaaggcttacaccaactacttcggacggtgcaatgtggccgagcacgaaaagctgatcctgctggcccagctgaagcccgagaaggatagcgacgaagccgtgacatatagcctgggaaagtttgggcagagggccctggatttctacagcattcatgtgaccaaggagtccacccaccccgtgaagcccctggcccagatcgccggaaacagatacgcctccggacctgtgggaaaggccctgagcgacgcatgtatgggcacaatcgcctccttcctgtctaagtaccaggacatcatcatcgaacaccagaaggtggtgaagggcaaccagaagagactggagagcctgcgggagctggccggcaaggaaaacctggaataccctagcgtgaccctgccacctcagcctcacaccaaggagggcgttgatgcctacaacgaagtgatcgcccgggtgcgaatgtgggtgaacctgaacctgtggcagaagctgaagctaagcagagatgatgccaagcctctgctgagactgaagggattcccttcctttcctctggtcgagagacaggccaacgaagtggactggtgggacatggtgtgtaacgtgaagaagctgatcaacgagaaaaaggaggatggcaaggtgttttggcagaatctggctggctacaagagacaggaagccctgagaccatacctgagcagcgaggaagatcggaagaagggaaagaaattcgctcggtaccagctgggcgacctgctgctgcacctggaaaagaagcacggcgaggactggggaaaggtgtacgacgaggcctgggagcggattgacaagaaagtggaaggcctgagcaagcacatcaagctggaagaggaacggagaagcgaggacgcccagagcaaggccgccctgaccgactggctgcgggctaaggccagcttcgtgatcgagggcctgaaggaggccgacaaggacgagttctgcagatgcgagctgaagctgcagaagtggtacggggacctgcggggaaagcccttcgccatcgaagccgagaacagcatcctggacatcagcggcttcagcaagcagtacaactgtgccttcatctggcagaaggacggcgtgaagaagctgaacctgtacctgatcatcaactacttcaagggcggcaagctgcggttcaagaagatcaaacctgaagccttcgaagccaacagattctacaccgtgatcaacaaaaagagcggcgagatcgtgcccatggaggtgaacttcaacttcgacgaccccaacctgatcatcctgcctctggcctttggcaagagacagggcagagaattcatctggaacgacctgctgtccctggaaaccggcagcctgaagctggccaacggaagagtgatcgagaagacactgtacaacagaagaacccggcaggatgagcctgccctgttcgtggccctgaccttcgagcggcgggaggtcctggactcctccaatatcaaaccaatgaacctgatcggcgtggcaagaggcgaaaacatccccgccgtgatcgccctgaccgaccccgagggctgcccactgagccggtttaaggatagcctgggaaacccaacccacatcctgagaatcggcgagagctataaggagaagcagcggaccatccaggccaagaaggaggtggagcagcggagagccggcggctacagccggaagtacgccagcaaagccaagaatctggcagacgatatggtgagaaacaccgctagagatctgctgtactacgccgtgacccaggatgccatgctgatcttcgccaacctgagccggggcttcggccggcagggcaagcggaccttcatggccgagagacagtacacacggatggaggactggctgaccgccaagctggcctacgagggcctgagcaagacctacctgtccaagacactggcccagtacacctccaagacatgcagcaactgtgggtttaccatcaccagcgccgactacgacagggtgctggagaagctgaagaagacagcaacaggctggatgaccacaattaacggcaaggagctgaaggtggagggccagattacctactacaacagatacaagagacagaacgtagtcaaggacctgtccgtcgagctggatagactgagcgaagaatctgtgaacaacgacatctcctcctggacaaagggcagaagcggagaagctctgagcctcctgaagaaaagattctcccatagacccgtgcaggagaagttcgtgtgcctgaactgcggcttcgagacacacgcagccgagcaagccgccctgaacatcgccagatcctggctgttcctgcggagccaggagtacaagaaataccagacaaacaagacaaccggcaacaccgataagagagccttcgtcgagacctggcagtccttttaccggaagaagcttaaggaggtgtggaaacctgccgtgcggtctggcggatctggcggaggctcctcaggacgtggtgacattcaaggacgtcgccatctacttcagccctgaggaatgggtgcggctgagcgccggacagagagaactgtaccaggaggtgatgctggacaactacgagctggtgaccagcctggatagagagagcaaactgctgtataagatggaccccgaggaagaaagctgcgagggcgtgccatacagctctgccgacagcggcgcccctgatagctcctccacctctgcttgtggatctggctccggcagcggccccaagaaaaagagaaaagtctaagctgccttctgcggggcttgccttctggccatgcccttcttctctcccttgcacctgtacctcttggtctttgaataaagcctgagtaggaaggctagcaaaaaaaaaaaaaaaaaaaaaaaaaaaaaaaaaaaaaaaaaaaaaaaaaaaaaaaaaaaaaaaaaaaaaaaaaaaaaaaa

SEQ ID NO: 2458 - RNA, 9485 nt, synthetic construct
  source 1..9485: mol_type = other RNA
aggaaataagagagaaaagaagagtaagaagaaatataagagccaccatggcccctaagaagaagcgtaaagtgagccggatggaacgcctcgtctacgaggtgcggcagaagtgcagaaacatcgaggacatctgcatctcctgcggatctctgaacgtgaccctggagcacccactgttcatcggcggcatgtgccagaactgtaaaaactgttttctggagtgtgcctatcaatacgacgatgacggctaccagagctactgcaccatctgttgcggcggaagagaggtgctgatgtgtggaaataacaactgctgccggtgcttctgcgtggaatgcgtggacctgctggtgggccccggcgccgcccaggccgctattaaggaagatccttggaactgctacatgtgcggccacaagggcacatacggcctgctgagacggagagaggactggcctagcagactgcagatgttcttcgccaataaccacgaccaggagttcgacccccctaaggtgtaccctcccgtccccgccgagaagagaaagcccatccgggtcctgagcctgttcgatggcatcgccaccggtctgctggtgctgaaggacctgggcatccaggtggataggtacattgcctccgaggtgtgcgaggactccatcaccgtgggaatggtgcgtcatcagggcaagatcatgtacgtgggcgacgtgcggagcgtgacacagaagcatatccaggagtggggccctttcgacctggtgatcggcggcagcccttgcaatgacctgagcatcgtgaacccagcccggaagggcctgtacgagggaaccggcagactgttcttcgagttttacagactgctgcacgacgcccggcctaaggaaggcgacgaccggcccttcttttggctgttcgagaatgtggtggccatgggagtcagcgacaagcgggatattagccggttcctggagagcaaccccgtgatgatcgatgccaaggaagtgagcgccgcccaccgggccagatacttctggggcaatctgcctggcatgaacagacccctggccagcaccgtgaacgacaagctggagctgcaggagtgcctggagcacggccggatcgccaagttcagcaaggtgagaaccatcaccacccgaagcaacagcatcaaacaaggcaaggaccagcactttcctgtgttcatgaacgagaaggaggacatcctgtggtgtaccgagatggagagagtgttcgggttcccagtccactacacagatgtcagcaacatgtctagactggccagacagagactgctgggaagaagctggtccgtccctgtgatcagacacctgttcgcccctctgaaggagtacttcgcctgcgtgagcagcggcaacagcaacgccaacagccggggccccagcttctctagcggcctggtgccactgtccctgagagggagccacatgggccccatggagatctacaaaaccgtgagcgcctggaagcggcagcctgtgcgcgtgctgagcctgtttcggaatatcgataaagtcctgaaaagcctgggattcctggagagcggctctggctccggcggtggcaccctgaagtacgtggaggatgtgacaaacgtggtcagacgggatgtggagaagtggggccccttcgatctggtgtacggcagcacccaacccctgggcagctcttgtgaccggtgccctggctggtacatgtttcagttccaccggatcctgcagtacgccctgccgagacaggagtcccagcggccattcttttggattttcatggacaacttgctgctgaccgaggatgaccaggaaactaccactcggttcctgcagaccgaagccgtgaccctgcaggacgtgagaggccgggactaccagaacgccatgcgggtgtggtccaacatccctggactgaaaagcaagcacgcacctctgacccctaaagaagaggagtacctgcaggcccaggtgcggagcagaagcaagctggacgcccctaaggtggatctgctggtgaagaattgcctcctgcccctgagagagtacttcaagtatttcagccagaatagtctgcccctgggaggcagcggcggcggcgccctggtgacatttgaggacgtcgccgtgcggttcacccaggaggaatgggctctgctggatccttctcagaaaatcctgtaccgggacgtgatgagagagacataccggaatctgacctccgtgggcatcaactgggaatgttgggaccttgaagcctgcttcagaagcctgggaagaaacctgagagtgcaggtggtgaagagaaagtgcgagctgaccaacagcggcccctgcgccgagggcggcccaagcagcggcgcccctcctcccagcggcggcagcccagccggctccccaacctctaccgaggagggcacctctgagtccgccacccccgagagcggccctggcacctccaccgagcccagcgagggcagcgcacccggcagccctgccggcagccccacctccacagaggagggaaccagcaccgagcccagcgaaggcagcgccccaggcaccagcaccgagcctagtgagcaggagattaaacggatcaacaagatcagaagaagacttgtgaaagacagcaacaccaagaaggccggcaagacaggccccatgaaaaccctgctggttagagtgatgacacccgatctgagagagcggctggaaaacctgagaaagaagcctgaaaatatcccccagcccatcagcaatacatctagagccaacctgaataagctgctgaccgattacaccgaaatgaagaaggcgatcctgcatgtgtactgggaagagttccagaaggaccctgtgggcctgatgagccgggtggcccagcctgccagcaagaagatcgatcagaacaagctgaaacctgagatggacgagaagggcaacctgaccaccgccggctttgcctgctctcagtgtggccagcccctgttcgtgtacaagctggagcaggtgtctgagaagggcaaggcttacaccaactacttcggacggtgcaatgtggccgagcacgaaaagctgatcctgctggcccagctgaagcccgagaaggatagcgacgaagccgtgacatatagcctgggaaagtttgggcagagggccctggatttctacagcattcatgtgaccaaggagtccacccaccccgtgaagcccctggcccagatcgccggaaacagatacgcctccggacctgtgggaaaggccctgagcgacgcatgtatgggcacaatcgcctccttcctgtctaagtaccaggacatcatcatcgaacaccagaaggtggtgaagggcaaccagaagagactggagagcctgcgggagctggccggcaaggaaaacctggaataccctagcgtgaccctgccacctcagcctcacaccaaggagggcgttgatgcctacaacgaagtgatcgcccgggtgcgaatgtgggtgaacctgaacctgtggcagaagctgaagctaagcagagatgatgccaagcctctgctgagactgaagggattcccttcctttcctctggtcgagagacaggccaacgaagtggactggtgggacatggtgtgtaacgtgaagaagctgatcaacgagaaaaaggaggatggcaaggtgttttggcagaatctggctggctacaagagacaggaagccctgagaccatacctgagcagcgaggaagatcggaagaagggaaagaaattcgctcggtaccagctgggcgacctgctgctgcacctggaaaagaagcacggcgaggactggggaaaggtgtacgacgaggcctgggagcggattgacaagaaagtggaaggcctgagcaagcacatcaagctggaagaggaacggagaagcgaggacgcccagagcaaggccgccctgaccgactggctgcgggctaaggccagcttcgtgatcgagggcctgaaggaggccgacaaggacgagttctgcagatgcgagctgaagctgcagaagtggtacggggacctgcggggaaagcccttcgccatcgaagccgagaacagcatcctggacatcagcggcttcagcaagcagtacaactgtgccttcatctggcagaaggacggcgtgaagaagctgaacctgtacctgatcatcaactacttcaagggcggcaagctgcggttcaagaagatcaaacctgaagccttcgaagccaacagattctacaccgtgatcaacaaaaagagcggcgagatcgtgcccatggaggtgaacttcaacttcgacgaccccaacctgatcatcctgcctctggcctttggcaagagacagggcagagaattcatctggaacgacctgctgtccctggaaaccggcagcctgaagctggccaacggaagagtgatcgagaagacactgtacaacagaagaacccggcaggatgagcctgccctgttcgtggccctgaccttcgagcggcgggaggtcctggactcctccaatatcaaaccaatgaacctgatcggcgtggcaagaggcgaaaacatccccgccgtgatcgccctgaccgaccccgagggctgcccactgagccggtttaaggatagcctgggaaacccaacccacatcctgagaatcggcgagagctataaggagaagcagcggaccatccaggccaagaaggaggtggagcagcggagagccggcggctacagccggaagtacgccagcaaagccaagaatctggcagacgatatggtgagaaacaccgctagagatctgctgtactacgccgtgacccaggatgccatgctgatcttcgccaacctgagccggggcttcggccggcagggcaagcggaccttcatggccgagagacagtacacacggatggaggactggctgaccgccaagctggcctacgagggcctgagcaagacctacctgtccaagacactggcccagtacacctccaagacatgcagcaactgtgggtttaccatcaccagcgccgactacgacagggtgctggagaagctgaagaagacagcaacaggctggatgaccacaattaacggcaaggagctgaaggtggagggccagattacctactacaacagatacaagagacagaacgtagtcaaggacctgtccgtcgagctggatagactgagcgaagaatctgtgaacaacgacatctcctcctggacaaagggcagaagcggagaagctctgagcctcctgaagaaaagattctcccatagacccgtgcaggagaagttcgtgtgcctgaactgcggcttcgagacacacgcagccgagcaagccgccctgaacatcgccagatcctggctgttcctgcggagccaggagtacaagaaataccagacaaacaagacaaccggcaacaccgataagagagccttcgtcgagacctggcagtccttttaccggaagaagcttaaggaggtgtggaaacctgccgtgcggtctggcggatctggcggaggctcctctacacctgtgaccttcgaggatgtggtggtctacttcaccgccgctgagtgggtgcacctgacaaactggcaaagagatttttatcaggccgtgatgatggaaacctacgagctggtggccagcgtggctggcgacggcgttccaatggccgaggacgaggaaggcggagtggaaagacccgtgtggcagtacatccccagaggcaagcggcggagaaagacccctcagcctcgcgccgacggcggcccaagcagcggcgcccctcctcccagcggcggcagcccagccggctccccaacctctaccgaggagggcacctctgagtccgccacccccgagagcggccctggcacctccaccgagcccagcgagggcagcgcacccggcagccctgccggcagccccacctccacagaggagggaaccagcaccgagcccagcgaaggcagcgccccaggcaccagcaccgagcctagtgagcaggagattaaacggatcaacaagatcagaagaagacttgtgaaagacagcaacaccaagaaggccggcaagacaggccccatgaaaaccctgctggttagagtgatgacacccgatctgagagagcggctggaaaacctgagaaagaagcctgaaaatatcccccagcccatcagcaatacatctagagccaacctgaataagctgctgaccgattacaccgaaatgaagaaggcgatcctgcatgtgtactgggaagagttccagaaggaccctgtgggcctgatgagccgggtggcccagcctgccagcaagaagatcgatcagaacaagctgaaacctgagatggacgagaagggcaacctgaccaccgccggctttgcctgctctcagtgtggccagcccctgttcgtgtacaagctggagcaggtgtctgagaagggcaaggcttacaccaactacttcggacggtgcaatgtggccgagcacgaaaagctgatcctgctggcccagctgaagcccgagaaggatagcgacgaagccgtgacatatagcctgggaaagtttgggcagagggccctggatttctacagcattcatgtgaccaaggagtccacccaccccgtgaagcccctggcccagatcgccggaaacagatacgcctccggacctgtgggaaaggccctgagcgacgcatgtatgggcacaatcgcctccttcctgtctaagtaccaggacatcatcatcgaacaccagaaggtggtgaagggcaaccagaagagactggagagcctgcgggagctggccggcaaggaaaacctggaataccctagcgtgaccctgccacctcagcctcacaccaaggagggcgttgatgcctacaacgaagtgatcgcccgggtgcgaatgtgggtgaacctgaacctgtggcagaagctgaagctaagcagagatgatgccaagcctctgctgagactgaagggattcccttcctttcctctggtcgagagacaggccaacgaagtggactggtgggacatggtgtgtaacgtgaagaagctgatcaacgagaaaaaggaggatggcaaggtgttttggcagaatctggctggctacaagagacaggaagccctgagaccatacctgagcagcgaggaagatcggaagaagggaaagaaattcgctcggtaccagctgggcgacctgctgctgcacctggaaaagaagcacggcgaggactggggaaaggtgtacgacgaggcctgggagcggattgacaagaaagtggaaggcctgagcaagcacatcaagctggaagaggaacggagaagcgaggacgcccagagcaaggccgccctgaccgactggctgcgggctaaggccagcttcgtgatcgagggcctgaaggaggccgacaaggacgagttctgcagatgcgagctgaagctgcagaagtggtacggggacctgcggggaaagcccttcgccatcgaagccgagaacagcatcctggacatcagcggcttcagcaagcagtacaactgtgccttcatctggcagaaggacggcgtgaagaagctgaacctgtacctgatcatcaactacttcaagggcggcaagctgcggttcaagaagatcaaacctgaagccttcgaagccaacagattctacaccgtgatcaacaaaaagagcggcgagatcgtgcccatggaggtgaacttcaacttcgacgaccccaacctgatcatcctgcctctggcctttggcaagagacagggcagagaattcatctggaacgacctgctgtccctggaaaccggcagcctgaagctggccaacggaagagtgatcgagaagacactgtacaacagaagaacccggcaggatgagcctgccctgttcgtggccctgaccttcgagcggcgggaggtcctggactcctccaatatcaaaccaatgaacctgatcggcgtggcaagaggcgaaaacatccccgccgtgatcgccctgaccgaccccgagggctgcccactgagccggtttaaggatagcctgggaaacccaacccacatcctgagaatcggcgagagctataaggagaagcagcggaccatccaggccaagaaggaggtggagcagcggagagccggcggctacagccggaagtacgccagcaaagccaagaatctggcagacgatatggtgagaaacaccgctagagatctgctgtactacgccgtgacccaggatgccatgctgatcttcgccaacctgagccggggcttcggccggcagggcaagcggaccttcatggccgagagacagtacacacggatggaggactggctgaccgccaagctggcctacgagggcctgagcaagacctacctgtccaagacactggcccagtacacctccaagacatgcagcaactgtgggtttaccatcaccagcgccgactacgacagggtgctggagaagctgaagaagacagcaacaggctggatgaccacaattaacggcaaggagctgaaggtggagggccagattacctactacaacagatacaagagacagaacgtagtcaaggacctgtccgtcgagctggatagactgagcgaagaatctgtgaacaacgacatctcctcctggacaaagggcagaagcggagaagctctgagcctcctgaagaaaagattctcccatagacccgtgcaggagaagttcgtgtgcctgaactgcggcttcgagacacacgcagccgagcaagccgccctgaacatcgccagatcctggctgttcctgcggagccaggagtacaagaaataccagacaaacaagacaaccggcaacaccgataagagagccttcgtcgagacctggcagtccttttaccggaagaagcttaaggaggtgtggaaacctgccgtgcggtctggcggatctggcggaggctccttctacacctgtgaccttcgaggatgtggtggtctacttcaccgccgctgagtgggtgcacctgacaaactggcaaagagatttttatcaggccgtgatgatggaaacctacgagctggtggccagcgtggctggcgacggcgttccaatggccgaggacgaggaaggcggagtggaaagacccgtgtggcagtacatccccagaggcaagcggcggagaaagacccctcagcctcgcgccgacggatctggctccggcagcggccccaagaaaaagagaaaagtctaagctgccttctgcggggcttgccttctggccatgcccttcttctctcccttgcacctgtacctcttggtctttgaataaagcctgagtaggaaggctagcaaaaaaaaaaaaaaaaaaaaaaaaaaaaaaaaaaaaaaaaaaaaaaaaaaaaaaaaaaaaaaaaaaaaaaaaaaaaaaaa

SEQ ID NO: 2459 - RNA, 6050 nt, synthetic construct
  source 1..6050: mol_type = other RNA
aggaaataagagagaaaagaagagtaagaagaaatataagagccaccgccaccatggcccctaagaagaagcgtaaagtgagccggatggaacgcctcgtctacgaggtgcggcagaagtgcagaaacatcgaggacatctgcatctcctgcggatctctgaacgtgaccctggagcacccactgttcatcggcggcatgtgccagaactgtaaaaactgttttctggagtgtgcctatcaatacgacgatgacggctaccagagctactgcaccatctgttgcggcggaagagaggtgctgatgtgtggaaataacaactgctgccggtgcttctgcgtggaatgcgtggacctgctggtgggccccggcgccgcccaggccgctattaaggaagatccttggaactgctacatgtgcggccacaagggcacatacggcctgctgagacggagagaggactggcctagcagactgcagatgttcttcgccaataaccacgaccaggagttcgacccccctaaggtgtaccctcccgtccccgccgagaagagaaagcccatccgggtcctgagcctgttcgatggcatcgccaccggtctgctggtgctgaaggacctgggcatccaggtggataggtacattgcctccgaggtgtgcgaggactccatcaccgtgggaatggtgcgtcatcagggcaagatcatgtacgtgggcgacgtgcggagcgtgacacagaagcatatccaggagtggggccctttcgacctggtgatcggcggcagcccttgcaatgacctgagcatcgtgaacccagcccggaagggcctgtacgagggaaccggcagactgttcttcgagttttacagactgctgcacgacgcccggcctaaggaaggcgacgaccggcccttcttttggctgttcgagaatgtggtggccatgggagtcagcgacaagcgggatattagccggttcctggagagcaaccccgtgatgatcgatgccaaggaagtgagcgccgcccaccgggccagatacttctggggcaatctgcctggcatgaacagacccctggccagcaccgtgaacgacaagctggagctgcaggagtgcctggagcacggccggatcgccaagttcagcaaggtgagaaccatcaccacccgaagcaacagcatcaaacaaggcaaggaccagcactttcctgtgttcatgaacgagaaggaggacatcctgtggtgtaccgagatggagagagtgttcgggttcccagtccactacacagatgtcagcaacatgtctagactggccagacagagactgctgggaagaagctggtccgtccctgtgatcagacacctgttcgcccctctgaaggagtacttcgcctgcgtgagcagcggcaacagcaacgccaacagccggggccccagcttctctagcggcctggtgccactgtccctgagagggagccacatgggccccatggagatctacaaaaccgtgagcgcctggaagcggcagcctgtgcgcgtgctgagcctgtttcggaatatcgataaagtcctgaaaagcctgggattcctggagagcggctctggctccggcggtggcaccctgaagtacgtggaggatgtgacaaacgtggtcagacgggatgtggagaagtggggccccttcgatctggtgtacggcagcacccaacccctgggcagctcttgtgaccggtgccctggctggtacatgtttcagttccaccggatcctgcagtacgccctgccgagacaggagtcccagcggccattcttttggattttcatggacaacttgctgctgaccgaggatgaccaggaaactaccactcggttcctgcagaccgaagccgtgaccctgcaggacgtgagaggccgggactaccagaacgccatgcgggtgtggtccaacatccctggactgaaaagcaagcacgcacctctgacccctaaagaagaggagtacctgcaggcccaggtgcggagcagaagcaagctggacgcccctaaggtggatctgctggtgaagaattgcctcctgcccctgagagagtacttcaagtatttcagccagaatagtctgcccctgggaggcagcggcggcggctctacacctgtgaccttcgaggatgtggtggtctacttcaccgccgctgagtgggtgcacctgacaaactggcaaagagatttttatcaggccgtgatgatggaaacctacgagctggtggccagcgtggctggcgacggcgttccaatggccgaggacgaggaaggcggagtggaaagacccgtgtggcagtacatccccagaggcaagcggcggagaaagacccctcagcctcgcgccgacggcggcccaagcagcggcgcccctcctcccagcggcggcagcccagccggctccccaacctctaccgaggagggcacctctgagtccgccacccccgagagcggccctggcacctccaccgagcccagcgagggcagcgcacccggcagccctgccggcagccccacctccacagaggagggaaccagcaccgagcccagcgaaggcagcgccccaggcaccagcaccgagcctagtgagcaggagattaaacggatcaacaagatcagaagaagacttgtgaaagacagcaacaccaagaaggccggcaagacaggccccatgaaaaccctgctggttagagtgatgacacccgatctgagagagcggctggaaaacctgagaaagaagcctgaaaatatcccccagcccatcagcaatacatctagagccaacctgaataagctgctgaccgattacaccgaaatgaagaaggcgatcctgcatgtgtactgggaagagttccagaaggaccctgtgggcctgatgagccgggtggcccagcctgccagcaagaagatcgatcagaacaagctgaaacctgagatggacgagaagggcaacctgaccaccgccggctttgcctgctctcagtgtggccagcccctgttcgtgtacaagctggagcaggtgtctgagaagggcaaggcttacaccaactacttcggacggtgcaatgtggccgagcacgaaaagctgatcctgctggcccagctgaagcccgagaaggatagcgacgaagccgtgacatatagcctgggaaagtttgggcagagggccctggatttctacagcattcatgtgaccaaggagtccacccaccccgtgaagcccctggcccagatcgccggaaacagatacgcctccggacctgtgggaaaggccctgagcgacgcatgtatgggcacaatcgcctccttcctgtctaagtaccaggacatcatcatcgaacaccagaaggtggtgaagggcaaccagaagagactggagagcctgcgggagctggccggcaaggaaaacctggaataccctagcgtgaccctgccacctcagcctcacaccaaggagggcgttgatgcctacaacgaagtgatcgcccgggtgcgaatgtgggtgaacctgaacctgtggcagaagctgaagctaagcagagatgatgccaagcctctgctgagactgaagggattcccttcctttcctctggtcgagagacaggccaacgaagtggactggtgggacatggtgtgtaacgtgaagaagctgatcaacgagaaaaaggaggatggcaaggtgttttggcagaatctggctggctacaagagacaggaagccctgagaccatacctgagcagcgaggaagatcggaagaagggaaagaaattcgctcggtaccagctgggcgacctgctgctgcacctggaaaagaagcacggcgaggactggggaaaggtgtacgacgaggcctgggagcggattgacaagaaagtggaaggcctgagcaagcacatcaagctggaagaggaacggagaagcgaggacgcccagagcaaggccgccctgaccgactggctgcgggctaaggccagcttcgtgatcgagggcctgaaggaggccgacaaggacgagttctgcagatgcgagctgaagctgcagaagtggtacggggacctgcggggaaagcccttcgccatcgaagccgagaacagcatcctggacatcagcggcttcagcaagcagtacaactgtgccttcatctggcagaaggacggcgtgaagaagctgaacctgtacctgatcatcaactacttcaagggcggcaagctgcggttcaagaagatcaaacctgaagccttcgaagccaacagattctacaccgtgatcaacaaaaagagcggcgagatcgtgcccatggaggtgaacttcaacttcgacgaccccaacctgatcatcctgcctctggcctttggcaagagacagggcagagaattcatctggaacgacctgctgtccctggaaaccggcagcctgaagctggccaacggaagagtgatcgagaagacactgtacaacagaagaacccggcaggatgagcctgccctgttcgtggccctgaccttcgagcggcgggaggtcctggactcctccaatatcaaaccaatgaacctgatcggcgtggcaagaggcgaaaacatccccgccgtgatcgccctgaccgaccccgagggctgcccactgagccggtttaaggatagcctgggaaacccaacccacatcctgagaatcggcgagagctataaggagaagcagcggaccatccaggccaagaaggaggtggagcagcggagagccggcggctacagccggaagtacgccagcaaagccaagaatctggcagacgatatggtgagaaacaccgctagagatctgctgtactacgccgtgacccaggatgccatgctgatcttcgccaacctgagccggggcttcggccggcagggcaagcggaccttcatggccgagagacagtacacacggatggaggactggctgaccgccaagctggcctacgagggcctgagcaagacctacctgtccaagacactggcccagtacacctccaagacatgcagcaactgtgggtttaccatcaccagcgccgactacgacagggtgctggagaagctgaagaagacagcaacaggctggatgaccacaattaacggcaaggagctgaaggtggagggccagattacctactacaacagatacaagagacagaacgtagtcaaggacctgtccgtcgagctggatagactgagcgaagaatctgtgaacaacgacatctcctcctggacaaagggcagaagcggagaagctctgagcctcctgaagaaaagattctcccatagacccgtgcaggagaagttcgtgtgcctgaactgcggcttcgagacacacgcagccgagcaagccgccctgaacatcgccagatcctggctgttcctgcggagccaggagtacaagaaataccagacaaacaagacaaccggcaacaccgataagagagccttcgtcgagacctggcagtccttttaccggaagaagcttaaggaggtgtggaaacctgccgtgcggtctggcggatctggcggaggctcctcaggacgtggtgacattcaaggacgtcgccatctacttcagccctgaggaatgggtgcggctgagcgccggacagagagaactgtaccaggaggtgatgctggacaactacgagctggtgaccagcctggatagagagagcaaactgctgtataagatggaccccgaggaagaaagctgcgagggcgtgccatacagctctgccgacagcggcgcccctgatagctcctccacctctgcttgtggatctggctccggcagcggccccaagaaaaagagaaaagtctaagctgccttctgcggggcttgccttctggccatgcccttcttctctcccttgcacctgtacctcttggtctttgaataaagcctgagtaggaaggctagcaaaaaaaaaaaaaaaaaaaaaaaaaaaaaaaaaaaaaaaaaaaaaaaaaaaaaaaaaaaaaaaaaaaaaaaaaaaaaaaa

SEQ ID NO: 2460 - RNA, 6050 nt, synthetic construct
  source 1..6050: mol_type = other RNA
aggaaataagagagaaaagaagagtaagaagaaatataagagccaccgccaccatggcccctaagaagaagcgtaaagtgagccggatggaacgcctcgtctacgaggtgcggcagaagtgcagaaacatcgaggacatctgcatctcctgcggatctctgaacgtgaccctggagcacccactgttcatcggcggcatgtgccagaactgtaaaaactgttttctggagtgtgcctatcaatacgacgatgacggctaccagagctactgcaccatctgttgcggcggaagagaggtgctgatgtgtggaaataacaactgctgccggtgcttctgcgtggaatgcgtggacctgctggtgggccccggcgccgcccaggccgctattaaggaagatccttggaactgctacatgtgcggccacaagggcacatacggcctgctgagacggagagaggactggcctagcagactgcagatgttcttcgccaataaccacgaccaggagttcgacccccctaaggtgtaccctcccgtccccgccgagaagagaaagcccatccgggtcctgagcctgttcgatggcatcgccaccggtctgctggtgctgaaggacctgggcatccaggtggataggtacattgcctccgaggtgtgcgaggactccatcaccgtgggaatggtgcgtcatcagggcaagatcatgtacgtgggcgacgtgcggagcgtgacacagaagcatatccaggagtggggccctttcgacctggtgatcggcggcagcccttgcaatgacctgagcatcgtgaacccagcccggaagggcctgtacgagggaaccggcagactgttcttcgagttttacagactgctgcacgacgcccggcctaaggaaggcgacgaccggcccttcttttggctgttcgagaatgtggtggccatgggagtcagcgacaagcgggatattagccggttcctggagagcaaccccgtgatgatcgatgccaaggaagtgagcgccgcccaccgggccagatacttctggggcaatctgcctggcatgaacagacccctggccagcaccgtgaacgacaagctggagctgcaggagtgcctggagcacggccggatcgccaagttcagcaaggtgagaaccatcaccacccgaagcaacagcatcaaacaaggcaaggaccagcactttcctgtgttcatgaacgagaaggaggacatcctgtggtgtaccgagatggagagagtgttcgggttcccagtccactacacagatgtcagcaacatgtctagactggccagacagagactgctgggaagaagctggtccgtccctgtgatcagacacctgttcgcccctctgaaggagtacttcgcctgcgtgagcagcggcaacagcaacgccaacagccggggccccagcttctctagcggcctggtgccactgtccctgagagggagccacatgggccccatggagatctacaaaaccgtgagcgcctggaagcggcagcctgtgcgcgtgctgagcctgtttcggaatatcgataaagtcctgaaaagcctgggattcctggagagcggctctggctccggcggtggcaccctgaagtacgtggaggatgtgacaaacgtggtcagacgggatgtggagaagtggggccccttcgatctggtgtacggcagcacccaacccctgggcagctcttgtgaccggtgccctggctggtacatgtttcagttccaccggatcctgcagtacgccctgccgagacaggagtcccagcggccattcttttggattttcatggacaacttgctgctgaccgaggatgaccaggaaactaccactcggttcctgcagaccgaagccgtgaccctgcaggacgtgagaggccgggactaccagaacgccatgcgggtgtggtccaacatccctggactgaaaagcaagcacgcacctctgacccctaaagaagaggagtacctgcaggcccaggtgcggagcagaagcaagctggacgcccctaaggtggatctgctggtgaagaattgcctcctgcccctgagagagtacttcaagtatttcagccagaatagtctgcccctgggaggcagcggcggcggctctacacctgtgaccttcgaggatgtggtggtctacttcaccgccgctgagtgggtgcacctgacaaactggcaaagagatttttatcaggccgtgatgatggaaacctacgagctggtggccagcgtggctggcgacggcgttccaatggccgaggacgaggaaggcggagtggaaagacccgtgtggcagtacatccccagaggcaagcggcggagaaagacccctcagcctcgcgccgacggcggcccaagcagcggcgcccctcctcccagcggcggcagcccagccggctccccaacctctaccgaggagggcacctctgagtccgccacccccgagagcggccctggcacctccaccgagcccagcgagggcagcgcacccggcagccctgccggcagccccacctccacagaggagggaaccagcaccgagcccagcgaaggcagcgccccaggcaccagcaccgagcctagtgagcaggagattaaacggatcaacaagatcagaagaagacttgtgaaagacagcaacaccaagaaggccggcaagacaggccccatgaaaaccctgctggttagagtgatgacacccgatctgagagagcggctggaaaacctgagaaagaagcctgaaaatatcccccagcccatcagcaatacatctagagccaacctgaataagctgctgaccgattacaccgaaatgaagaaggcgatcctgcatgtgtactgggaagagttccagaaggaccctgtgggcctgatgagccgggtggcccagcctgccagcaagaagatcgatcagaacaagctgaaacctgagatggacgagaagggcaacctgaccaccgccggctttgcctgctctcagtgtggccagcccctgttcgtgtacaagctggagcaggtgtctgagaagggcaaggcttacaccaactacttcggacggtgcaatgtggccgagcacgaaaagctgatcctgctggcccagctgaagcccgagaaggatagcgacgaagccgtgacatatagcctgggaaagtttgggcagagggccctggatttctacagcattcatgtgaccaaggagtccacccaccccgtgaagcccctggcccagatcgccggaaacagatacgcctccggacctgtgggaaaggccctgagcgacgcatgtatgggcacaatcgcctccttcctgtctaagtaccaggacatcatcatcgaacaccagaaggtggtgaagggcaaccagaagagactggagagcctgcgggagctggccggcaaggaaaacctggaataccctagcgtgaccctgccacctcagcctcacaccaaggagggcgttgatgcctacaacgaagtgatcgcccgggtgcgaatgtgggtgaacctgaacctgtggcagaagctgaagctaagcagagatgatgccaagcctctgctgagactgaagggattcccttcctttcctctggtcgagagacaggccaacgaagtggactggtgggacatggtgtgtaacgtgaagaagctgatcaacgagaaaaaggaggatggcaaggtgttttggcagaatctggctggctacaagagacaggaagccctgagaccatacctgagcagcgaggaagatcggaagaagggaaagaaattcgctcggtaccagctgggcgacctgctgctgcacctggaaaagaagcacggcgaggactggggaaaggtgtacgacgaggcctgggagcggattgacaagaaagtggaaggcctgagcaagcacatcaagctggaagaggaacggagaagcgaggacgcccagagcaaggccgccctgaccgactggctgcgggctaaggccagcttcgtgatcgagggcctgaaggaggccgacaaggacgagttctgcagatgcgagctgaagctgcagaagtggtacggggacctgcggggaaagcccttcgccatcgaagccgagaacagcatcctggacatcagcggcttcagcaagcagtacaactgtgccttcatctggcagaaggacggcgtgaagaagctgaacctgtacctgatcatcaactacttcaagggcggcaagctgcggttcaagaagatcaaacctgaagccttcgaagccaacagattctacaccgtgatcaacaaaaagagcggcgagatcgtgcccatggaggtgaacttcaacttcgacgaccccaacctgatcatcctgcctctggcctttggcaagagacagggcagagaattcatctggaacgacctgctgtccctggaaaccggcagcctgaagctggccaacggaagagtgatcgagaagacactgtacaacagaagaacccggcaggatgagcctgccctgttcgtggccctgaccttcgagcggcgggaggtcctggactcctccaatatcaaaccaatgaacctgatcggcgtggcaagaggcgaaaacatccccgccgtgatcgccctgaccgaccccgagggctgcccactgagccggtttaaggatagcctgggaaacccaacccacatcctgagaatcggcgagagctataaggagaagcagcggaccatccaggccaagaaggaggtggagcagcggagagccggcggctacagccggaagtacgccagcaaagccaagaatctggcagacgatatggtgagaaacaccgctagagatctgctgtactacgccgtgacccaggatgccatgctgatcttcgccaacctgagccggggcttcggccggcagggcaagcggaccttcatggccgagagacagtacacacggatggaggactggctgaccgccaagctggcctacgagggcctgagcaagacctacctgtccaagacactggcccagtacacctccaagacatgcagcaactgtgggtttaccatcaccagcgccgactacgacagggtgctggagaagctgaagaagacagcaacaggctggatgaccacaattaacggcaaggagctgaaggtggagggccagattacctactacaacagatacaagagacagaacgtagtcaaggacctgtccgtcgagctggatagactgagcgaagaatctgtgaacaacgacatctcctcctggacaaagggcagaagcggagaagctctgagcctcctgaagaaaagattctcccatagacccgtgcaggagaagttcgtgtgcctgaactgcggcttcgagacacacgcagccgagcaagccgccctgaacatcgccagatcctggctgttcctgcggagccaggagtacaagaaataccagacaaacaagacaaccggcaacaccgataagagagccttcgtcgagacctggcagtccttttaccggaagaagcttaaggaggtgtggaaacctgccgtgcggtctggcggatctggcggaggctcctgccctggtgacatttgaggacgtcgccgtgcggttcacccaggaggaatgggctctgctggatccttctcagaaaatcctgtaccgggacgtgatgagagagacataccggaatctgacctccgtgggcatcaactgggaatgttgggaccttgaagcctgcttcagaagcctgggaagaaacctgagagtgcaggtggtgaagagaaagtgcgagctgaccaacagcggcccctgcgccgagggatctggctccggcagcggccccaagaaaaagagaaaagtctaagctgccttctgcggggcttgccttctggccatgcccttcttctctcccttgcacctgtacctcttggtctttgaataaagcctgagtaggaaggctagcaaaaaaaaaaaaaaaaaaaaaaaaaaaaaaaaaaaaaaaaaaaaaaaaaaaaaaaaaaaaaaaaaaaaaaaaaaaaaaaa

SEQ ID NO: 2461 - RNA, 6092 nt, synthetic construct
  source 1..6092: mol_type = other RNA
aggaaataagagagaaaagaagagtaagaagaaatataagagccaccgccaccatggcccctaagaagaagcgtaaagtgagccggatggaacgcctcgtctacgaggtgcggcagaagtgcagaaacatcgaggacatctgcatctcctgcggatctctgaacgtgaccctggagcacccactgttcatcggcggcatgtgccagaactgtaaaaactgttttctggagtgtgcctatcaatacgacgatgacggctaccagagctactgcaccatctgttgcggcggaagagaggtgctgatgtgtggaaataacaactgctgccggtgcttctgcgtggaatgcgtggacctgctggtgggccccggcgccgcccaggccgctattaaggaagatccttggaactgctacatgtgcggccacaagggcacatacggcctgctgagacggagagaggactggcctagcagactgcagatgttcttcgccaataaccacgaccaggagttcgacccccctaaggtgtaccctcccgtccccgccgagaagagaaagcccatccgggtcctgagcctgttcgatggcatcgccaccggtctgctggtgctgaaggacctgggcatccaggtggataggtacattgcctccgaggtgtgcgaggactccatcaccgtgggaatggtgcgtcatcagggcaagatcatgtacgtgggcgacgtgcggagcgtgacacagaagcatatccaggagtggggccctttcgacctggtgatcggcggcagcccttgcaatgacctgagcatcgtgaacccagcccggaagggcctgtacgagggaaccggcagactgttcttcgagttttacagactgctgcacgacgcccggcctaaggaaggcgacgaccggcccttcttttggctgttcgagaatgtggtggccatgggagtcagcgacaagcgggatattagccggttcctggagagcaaccccgtgatgatcgatgccaaggaagtgagcgccgcccaccgggccagatacttctggggcaatctgcctggcatgaacagacccctggccagcaccgtgaacgacaagctggagctgcaggagtgcctggagcacggccggatcgccaagttcagcaaggtgagaaccatcaccacccgaagcaacagcatcaaacaaggcaaggaccagcactttcctgtgttcatgaacgagaaggaggacatcctgtggtgtaccgagatggagagagtgttcgggttcccagtccactacacagatgtcagcaacatgtctagactggccagacagagactgctgggaagaagctggtccgtccctgtgatcagacacctgttcgcccctctgaaggagtacttcgcctgcgtgagcagcggcaacagcaacgccaacagccggggccccagcttctctagcggcctggtgccactgtccctgagagggagccacatgggccccatggagatctacaaaaccgtgagcgcctggaagcggcagcctgtgcgcgtgctgagcctgtttcggaatatcgataaagtcctgaaaagcctgggattcctggagagcggctctggctccggcggtggcaccctgaagtacgtggaggatgtgacaaacgtggtcagacgggatgtggagaagtggggccccttcgatctggtgtacggcagcacccaacccctgggcagctcttgtgaccggtgccctggctggtacatgtttcagttccaccggatcctgcagtacgccctgccgagacaggagtcccagcggccattcttttggattttcatggacaacttgctgctgaccgaggatgaccaggaaactaccactcggttcctgcagaccgaagccgtgaccctgcaggacgtgagaggccgggactaccagaacgccatgcgggtgtggtccaacatccctggactgaaaagcaagcacgcacctctgacccctaaagaagaggagtacctgcaggcccaggtgcggagcagaagcaagctggacgcccctaaggtggatctgctggtgaagaattgcctcctgcccctgagagagtacttcaagtatttcagccagaatagtctgcccctgggaggcagcggcggcggccaggacgtggtgacattcaaggacgtcgccatctacttcagccctgaggaatgggtgcggctgagcgccggacagagagaactgtaccaggaggtgatgctggacaactacgagctggtgaccagcctggatagagagagcaaactgctgtataagatggaccccgaggaagaaagctgcgagggcgtgccatacagctctgccgacagcggcgcccctgatagctcctccacctctgcttgtggcggcccaagcagcggcgcccctcctcccagcggcggcagcccagccggctccccaacctctaccgaggagggcacctctgagtccgccacccccgagagcggccctggcacctccaccgagcccagcgagggcagcgcacccggcagccctgccggcagccccacctccacagaggagggaaccagcaccgagcccagcgaaggcagcgccccaggcaccagcaccgagcctagtgagcaggagattaaacggatcaacaagatcagaagaagacttgtgaaagacagcaacaccaagaaggccggcaagacaggccccatgaaaaccctgctggttagagtgatgacacccgatctgagagagcggctggaaaacctgagaaagaagcctgaaaatatcccccagcccatcagcaatacatctagagccaacctgaataagctgctgaccgattacaccgaaatgaagaaggcgatcctgcatgtgtactgggaagagttccagaaggaccctgtgggcctgatgagccgggtggcccagcctgccagcaagaagatcgatcagaacaagctgaaacctgagatggacgagaagggcaacctgaccaccgccggctttgcctgctctcagtgtggccagcccctgttcgtgtacaagctggagcaggtgtctgagaagggcaaggcttacaccaactacttcggacggtgcaatgtggccgagcacgaaaagctgatcctgctggcccagctgaagcccgagaaggatagcgacgaagccgtgacatatagcctgggaaagtttgggcagagggccctggatttctacagcattcatgtgaccaaggagtccacccaccccgtgaagcccctggcccagatcgccggaaacagatacgcctccggacctgtgggaaaggccctgagcgacgcatgtatgggcacaatcgcctccttcctgtctaagtaccaggacatcatcatcgaacaccagaaggtggtgaagggcaaccagaagagactggagagcctgcgggagctggccggcaaggaaaacctggaataccctagcgtgaccctgccacctcagcctcacaccaaggagggcgttgatgcctacaacgaagtgatcgcccgggtgcgaatgtgggtgaacctgaacctgtggcagaagctgaagctaagcagagatgatgccaagcctctgctgagactgaagggattcccttcctttcctctggtcgagagacaggccaacgaagtggactggtgggacatggtgtgtaacgtgaagaagctgatcaacgagaaaaaggaggatggcaaggtgttttggcagaatctggctggctacaagagacaggaagccctgagaccatacctgagcagcgaggaagatcggaagaagggaaagaaattcgctcggtaccagctgggcgacctgctgctgcacctggaaaagaagcacggcgaggactggggaaaggtgtacgacgaggcctgggagcggattgacaagaaagtggaaggcctgagcaagcacatcaagctggaagaggaacggagaagcgaggacgcccagagcaaggccgccctgaccgactggctgcgggctaaggccagcttcgtgatcgagggcctgaaggaggccgacaaggacgagttctgcagatgcgagctgaagctgcagaagtggtacggggacctgcggggaaagcccttcgccatcgaagccgagaacagcatcctggacatcagcggcttcagcaagcagtacaactgtgccttcatctggcagaaggacggcgtgaagaagctgaacctgtacctgatcatcaactacttcaagggcggcaagctgcggttcaagaagatcaaacctgaagccttcgaagccaacagattctacaccgtgatcaacaaaaagagcggcgagatcgtgcccatggaggtgaacttcaacttcgacgaccccaacctgatcatcctgcctctggcctttggcaagagacagggcagagaattcatctggaacgacctgctgtccctggaaaccggcagcctgaagctggccaacggaagagtgatcgagaagacactgtacaacagaagaacccggcaggatgagcctgccctgttcgtggccctgaccttcgagcggcgggaggtcctggactcctccaatatcaaaccaatgaacctgatcggcgtggcaagaggcgaaaacatccccgccgtgatcgccctgaccgaccccgagggctgcccactgagccggtttaaggatagcctgggaaacccaacccacatcctgagaatcggcgagagctataaggagaagcagcggaccatccaggccaagaaggaggtggagcagcggagagccggcggctacagccggaagtacgccagcaaagccaagaatctggcagacgatatggtgagaaacaccgctagagatctgctgtactacgccgtgacccaggatgccatgctgatcttcgccaacctgagccggggcttcggccggcagggcaagcggaccttcatggccgagagacagtacacacggatggaggactggctgaccgccaagctggcctacgagggcctgagcaagacctacctgtccaagacactggcccagtacacctccaagacatgcagcaactgtgggtttaccatcaccagcgccgactacgacagggtgctggagaagctgaagaagacagcaacaggctggatgaccacaattaacggcaaggagctgaaggtggagggccagattacctactacaacagatacaagagacagaacgtagtcaaggacctgtccgtcgagctggatagactgagcgaagaatctgtgaacaacgacatctcctcctggacaaagggcagaagcggagaagctctgagcctcctgaagaaaagattctcccatagacccgtgcaggagaagttcgtgtgcctgaactgcggcttcgagacacacgcagccgagcaagccgccctgaacatcgccagatcctggctgttcctgcggagccaggagtacaagaaataccagacaaacaagacaaccggcaacaccgataagagagccttcgtcgagacctggcagtccttttaccggaagaagcttaaggaggtgtggaaacctgccgtgcggtctggcggatctggcggaggctcctctacacctgtgaccttcgaggatgtggtggtctacttcaccgccgctgagtgggtgcacctgacaaactggcaaagagatttttatcaggccgtgatgatggaaacctacgagctggtggccagcgtggctggcgacggcgttccaatggccgaggacgaggaaggcggagtggaaagacccgtgtggcagtacatccccagaggcaagcggcggagaaagacccctcagcctcgcgccgacggatctggctccggcagcggccccaagaaaaagagaaaagtctaagctgccttctgcggggcttgccttctggccatgcccttcttctctcccttgcacctgtacctcttggtctttgaataaagcctgagtaggaaggctagcaaaaaaaaaaaaaaaaaaaaaaaaaaaaaaaaaaaaaaaaaaaaaaaaaaaaaaaaaaaagcatgcaaaaaaaaaaaaaaaaaaaaaaaaaaaaaaaaaaaaaaaaaaaaaaaaaaaaaaaaa

SEQ ID NO: 2462 - RNA, 6050 nt, synthetic construct
  source 1..6050: mol_type = other RNA
aggaaataagagagaaaagaagagtaagaagaaatataagagccaccgccaccatggcccctaagaagaagcgtaaagtgagccggatggaacgcctcgtctacgaggtgcggcagaagtgcagaaacatcgaggacatctgcatctcctgcggatctctgaacgtgaccctggagcacccactgttcatcggcggcatgtgccagaactgtaaaaactgttttctggagtgtgcctatcaatacgacgatgacggctaccagagctactgcaccatctgttgcggcggaagagaggtgctgatgtgtggaaataacaactgctgccggtgcttctgcgtggaatgcgtggacctgctggtgggccccggcgccgcccaggccgctattaaggaagatccttggaactgctacatgtgcggccacaagggcacatacggcctgctgagacggagagaggactggcctagcagactgcagatgttcttcgccaataaccacgaccaggagttcgacccccctaaggtgtaccctcccgtccccgccgagaagagaaagcccatccgggtcctgagcctgttcgatggcatcgccaccggtctgctggtgctgaaggacctgggcatccaggtggataggtacattgcctccgaggtgtgcgaggactccatcaccgtgggaatggtgcgtcatcagggcaagatcatgtacgtgggcgacgtgcggagcgtgacacagaagcatatccaggagtggggccctttcgacctggtgatcggcggcagcccttgcaatgacctgagcatcgtgaacccagcccggaagggcctgtacgagggaaccggcagactgttcttcgagttttacagactgctgcacgacgcccggcctaaggaaggcgacgaccggcccttcttttggctgttcgagaatgtggtggccatgggagtcagcgacaagcgggatattagccggttcctggagagcaaccccgtgatgatcgatgccaaggaagtgagcgccgcccaccgggccagatacttctggggcaatctgcctggcatgaacagacccctggccagcaccgtgaacgacaagctggagctgcaggagtgcctggagcacggccggatcgccaagttcagcaaggtgagaaccatcaccacccgaagcaacagcatcaaacaaggcaaggaccagcactttcctgtgttcatgaacgagaaggaggacatcctgtggtgtaccgagatggagagagtgttcgggttcccagtccactacacagatgtcagcaacatgtctagactggccagacagagactgctgggaagaagctggtccgtccctgtgatcagacacctgttcgcccctctgaaggagtacttcgcctgcgtgagcagcggcaacagcaacgccaacagccggggccccagcttctctagcggcctggtgccactgtccctgagagggagccacatgggccccatggagatctacaaaaccgtgagcgcctggaagcggcagcctgtgcgcgtgctgagcctgtttcggaatatcgataaagtcctgaaaagcctgggattcctggagagcggctctggctccggcggtggcaccctgaagtacgtggaggatgtgacaaacgtggtcagacgggatgtggagaagtggggccccttcgatctggtgtacggcagcacccaacccctgggcagctcttgtgaccggtgccctggctggtacatgtttcagttccaccggatcctgcagtacgccctgccgagacaggagtcccagcggccattcttttggattttcatggacaacttgctgctgaccgaggatgaccaggaaactaccactcggttcctgcagaccgaagccgtgaccctgcaggacgtgagaggccgggactaccagaacgccatgcgggtgtggtccaacatccctggactgaaaagcaagcacgcacctctgacccctaaagaagaggagtacctgcaggcccaggtgcggagcagaagcaagctggacgcccctaaggtggatctgctggtgaagaattgcctcctgcccctgagagagtacttcaagtatttcagccagaatagtctgcccctgggaggcagcggcggcggccaggacgtggtgacattcaaggacgtcgccatctacttcagccctgaggaatgggtgcggctgagcgccggacagagagaactgtaccaggaggtgatgctggacaactacgagctggtgaccagcctggatagagagagcaaactgctgtataagatggaccccgaggaagaaagctgcgagggcgtgccatacagctctgccgacagcggcgcccctgatagctcctccacctctgcttgtggcggcccaagcagcggcgcccctcctcccagcggcggcagcccagccggctccccaacctctaccgaggagggcacctctgagtccgccacccccgagagcggccctggcacctccaccgagcccagcgagggcagcgcacccggcagccctgccggcagccccacctccacagaggagggaaccagcaccgagcccagcgaaggcagcgccccaggcaccagcaccgagcctagtgagcaggagattaaacggatcaacaagatcagaagaagacttgtgaaagacagcaacaccaagaaggccggcaagacaggccccatgaaaaccctgctggttagagtgatgacacccgatctgagagagcggctggaaaacctgagaaagaagcctgaaaatatcccccagcccatcagcaatacatctagagccaacctgaataagctgctgaccgattacaccgaaatgaagaaggcgatcctgcatgtgtactgggaagagttccagaaggaccctgtgggcctgatgagccgggtggcccagcctgccagcaagaagatcgatcagaacaagctgaaacctgagatggacgagaagggcaacctgaccaccgccggctttgcctgctctcagtgtggccagcccctgttcgtgtacaagctggagcaggtgtctgagaagggcaaggcttacaccaactacttcggacggtgcaatgtggccgagcacgaaaagctgatcctgctggcccagctgaagcccgagaaggatagcgacgaagccgtgacatatagcctgggaaagtttgggcagagggccctggatttctacagcattcatgtgaccaaggagtccacccaccccgtgaagcccctggcccagatcgccggaaacagatacgcctccggacctgtgggaaaggccctgagcgacgcatgtatgggcacaatcgcctccttcctgtctaagtaccaggacatcatcatcgaacaccagaaggtggtgaagggcaaccagaagagactggagagcctgcgggagctggccggcaaggaaaacctggaataccctagcgtgaccctgccacctcagcctcacaccaaggagggcgttgatgcctacaacgaagtgatcgcccgggtgcgaatgtgggtgaacctgaacctgtggcagaagctgaagctaagcagagatgatgccaagcctctgctgagactgaagggattcccttcctttcctctggtcgagagacaggccaacgaagtggactggtgggacatggtgtgtaacgtgaagaagctgatcaacgagaaaaaggaggatggcaaggtgttttggcagaatctggctggctacaagagacaggaagccctgagaccatacctgagcagcgaggaagatcggaagaagggaaagaaattcgctcggtaccagctgggcgacctgctgctgcacctggaaaagaagcacggcgaggactggggaaaggtgtacgacgaggcctgggagcggattgacaagaaagtggaaggcctgagcaagcacatcaagctggaagaggaacggagaagcgaggacgcccagagcaaggccgccctgaccgactggctgcgggctaaggccagcttcgtgatcgagggcctgaaggaggccgacaaggacgagttctgcagatgcgagctgaagctgcagaagtggtacggggacctgcggggaaagcccttcgccatcgaagccgagaacagcatcctggacatcagcggcttcagcaagcagtacaactgtgccttcatctggcagaaggacggcgtgaagaagctgaacctgtacctgatcatcaactacttcaagggcggcaagctgcggttcaagaagatcaaacctgaagccttcgaagccaacagattctacaccgtgatcaacaaaaagagcggcgagatcgtgcccatggaggtgaacttcaacttcgacgaccccaacctgatcatcctgcctctggcctttggcaagagacagggcagagaattcatctggaacgacctgctgtccctggaaaccggcagcctgaagctggccaacggaagagtgatcgagaagacactgtacaacagaagaacccggcaggatgagcctgccctgttcgtggccctgaccttcgagcggcgggaggtcctggactcctccaatatcaaaccaatgaacctgatcggcgtggcaagaggcgaaaacatccccgccgtgatcgccctgaccgaccccgagggctgcccactgagccggtttaaggatagcctgggaaacccaacccacatcctgagaatcggcgagagctataaggagaagcagcggaccatccaggccaagaaggaggtggagcagcggagagccggcggctacagccggaagtacgccagcaaagccaagaatctggcagacgatatggtgagaaacaccgctagagatctgctgtactacgccgtgacccaggatgccatgctgatcttcgccaacctgagccggggcttcggccggcagggcaagcggaccttcatggccgagagacagtacacacggatggaggactggctgaccgccaagctggcctacgagggcctgagcaagacctacctgtccaagacactggcccagtacacctccaagacatgcagcaactgtgggtttaccatcaccagcgccgactacgacagggtgctggagaagctgaagaagacagcaacaggctggatgaccacaattaacggcaaggagctgaaggtggagggccagattacctactacaacagatacaagagacagaacgtagtcaaggacctgtccgtcgagctggatagactgagcgaagaatctgtgaacaacgacatctcctcctggacaaagggcagaagcggagaagctctgagcctcctgaagaaaagattctcccatagacccgtgcaggagaagttcgtgtgcctgaactgcggcttcgagacacacgcagccgagcaagccgccctgaacatcgccagatcctggctgttcctgcggagccaggagtacaagaaataccagacaaacaagacaaccggcaacaccgataagagagccttcgtcgagacctggcagtccttttaccggaagaagcttaaggaggtgtggaaacctgccgtgcggtctggcggatctggcggaggctcctgccctggtgacatttgaggacgtcgccgtgcggttcacccaggaggaatgggctctgctggatccttctcagaaaatcctgtaccgggacgtgatgagagagacataccggaatctgacctccgtgggcatcaactgggaatgttgggaccttgaagcctgcttcagaagcctgggaagaaacctgagagtgcaggtggtgaagagaaagtgcgagctgaccaacagcggcccctgcgccgagggatctggctccggcagcggccccaagaaaaagagaaaagtctaagctgccttctgcggggcttgccttctggccatgcccttcttctctcccttgcacctgtacctcttggtctttgaataaagcctgagtaggaaggctagcaaaaaaaaaaaaaaaaaaaaaaaaaaaaaaaaaaaaaaaaaaaaaaaaaaaaaaaaaaaaaaaaaaaaaaaaaaaaaaaa

SEQ ID NO: 2463 - RNA, 6043 nt, synthetic construct
  source 1..6043: mol_type = other RNA
aggaaataagagagaaaagaagagtaagaagaaatataagagccaccatggcccctaagaagaagcgtaaagtgagccggatggaacgcctcgtctacgaggtgcggcagaagtgcagaaacatcgaggacatctgcatctcctgcggatctctgaacgtgaccctggagcacccactgttcatcggcggcatgtgccagaactgtaaaaactgttttctggagtgtgcctatcaatacgacgatgacggctaccagagctactgcaccatctgttgcggcggaagagaggtgctgatgtgtggaaataacaactgctgccggtgcttctgcgtggaatgcgtggacctgctggtgggccccggcgccgcccaggccgctattaaggaagatccttggaactgctacatgtgcggccacaagggcacatacggcctgctgagacggagagaggactggcctagcagactgcagatgttcttcgccaataaccacgaccaggagttcgacccccctaaggtgtaccctcccgtccccgccgagaagagaaagcccatccgggtcctgagcctgttcgatggcatcgccaccggtctgctggtgctgaaggacctgggcatccaggtggataggtacattgcctccgaggtgtgcgaggactccatcaccgtgggaatggtgcgtcatcagggcaagatcatgtacgtgggcgacgtgcggagcgtgacacagaagcatatccaggagtggggccctttcgacctggtgatcggcggcagcccttgcaatgacctgagcatcgtgaacccagcccggaagggcctgtacgagggaaccggcagactgttcttcgagttttacagactgctgcacgacgcccggcctaaggaaggcgacgaccggcccttcttttggctgttcgagaatgtggtggccatgggagtcagcgacaagcgggatattagccggttcctggagagcaaccccgtgatgatcgatgccaaggaagtgagcgccgcccaccgggccagatacttctggggcaatctgcctggcatgaacagacccctggccagcaccgtgaacgacaagctggagctgcaggagtgcctggagcacggccggatcgccaagttcagcaaggtgagaaccatcaccacccgaagcaacagcatcaaacaaggcaaggaccagcactttcctgtgttcatgaacgagaaggaggacatcctgtggtgtaccgagatggagagagtgttcgggttcccagtccactacacagatgtcagcaacatgtctagactggccagacagagactgctgggaagaagctggtccgtccctgtgatcagacacctgttcgcccctctgaaggagtacttcgcctgcgtgagcagcggcaacagcaacgccaacagccggggccccagcttctctagcggcctggtgccactgtccctgagagggagccacatgggccccatggagatctacaaaaccgtgagcgcctggaagcggcagcctgtgcgcgtgctgagcctgtttcggaatatcgataaagtcctgaaaagcctgggattcctggagagcggctctggctccggcggtggcaccctgaagtacgtggaggatgtgacaaacgtggtcagacgggatgtggagaagtggggccccttcgatctggtgtacggcagcacccaacccctgggcagctcttgtgaccggtgccctggctggtacatgtttcagttccaccggatcctgcagtacgccctgccgagacaggagtcccagcggccattcttttggattttcatggacaacttgctgctgaccgaggatgaccaggaaactaccactcggttcctgcagaccgaagccgtgaccctgcaggacgtgagaggccgggactaccagaacgccatgcgggtgtggtccaacatccctggactgaaaagcaagcacgcacctctgacccctaaagaagaggagtacctgcaggcccaggtgcggagcagaagcaagctggacgcccctaaggtggatctgctggtgaagaattgcctcctgcccctgagagagtacttcaagtatttcagccagaatagtctgcccctgggaggcagcggcggcggcgccctggtgacatttgaggacgtcgccgtgcggttcacccaggaggaatgggctctgctggatccttctcagaaaatcctgtaccgggacgtgatgagagagacataccggaatctgacctccgtgggcatcaactgggaatgttgggaccttgaagcctgcttcagaagcctgggaagaaacctgagagtgcaggtggtgaagagaaagtgcgagctgaccaacagcggcccctgcgccgagggcggcccaagcagcggcgcccctcctcccagcggcggcagcccagccggctccccaacctctaccgaggagggcacctctgagtccgccacccccgagagcggccctggcacctccaccgagcccagcgagggcagcgcacccggcagccctgccggcagccccacctccacagaggagggaaccagcaccgagcccagcgaaggcagcgccccaggcaccagcaccgagcctagtgagcaggagattaaacggatcaacaagatcagaagaagacttgtgaaagacagcaacaccaagaaggccggcaagacaggccccatgaaaaccctgctggttagagtgatgacacccgatctgagagagcggctggaaaacctgagaaagaagcctgaaaatatcccccagcccatcagcaatacatctagagccaacctgaataagctgctgaccgattacaccgaaatgaagaaggcgatcctgcatgtgtactgggaagagttccagaaggaccctgtgggcctgatgagccgggtggcccagcctgccagcaagaagatcgatcagaacaagctgaaacctgagatggacgagaagggcaacctgaccaccgccggctttgcctgctctcagtgtggccagcccctgttcgtgtacaagctggagcaggtgtctgagaagggcaaggcttacaccaactacttcggacggtgcaatgtggccgagcacgaaaagctgatcctgctggcccagctgaagcccgagaaggatagcgacgaagccgtgacatatagcctgggaaagtttgggcagagggccctggatttctacagcattcatgtgaccaaggagtccacccaccccgtgaagcccctggcccagatcgccggaaacagatacgcctccggacctgtgggaaaggccctgagcgacgcatgtatgggcacaatcgcctccttcctgtctaagtaccaggacatcatcatcgaacaccagaaggtggtgaagggcaaccagaagagactggagagcctgcgggagctggccggcaaggaaaacctggaataccctagcgtgaccctgccacctcagcctcacaccaaggagggcgttgatgcctacaacgaagtgatcgcccgggtgcgaatgtgggtgaacctgaacctgtggcagaagctgaagctaagcagagatgatgccaagcctctgctgagactgaagggattcccttcctttcctctggtcgagagacaggccaacgaagtggactggtgggacatggtgtgtaacgtgaagaagctgatcaacgagaaaaaggaggatggcaaggtgttttggcagaatctggctggctacaagagacaggaagccctgagaccatacctgagcagcgaggaagatcggaagaagggaaagaaattcgctcggtaccagctgggcgacctgctgctgcacctggaaaagaagcacggcgaggactggggaaaggtgtacgacgaggcctgggagcggattgacaagaaagtggaaggcctgagcaagcacatcaagctggaagaggaacggagaagcgaggacgcccagagcaaggccgccctgaccgactggctgcgggctaaggccagcttcgtgatcgagggcctgaaggaggccgacaaggacgagttctgcagatgcgagctgaagctgcagaagtggtacggggacctgcggggaaagcccttcgccatcgaagccgagaacagcatcctggacatcagcggcttcagcaagcagtacaactgtgccttcatctggcagaaggacggcgtgaagaagctgaacctgtacctgatcatcaactacttcaagggcggcaagctgcggttcaagaagatcaaacctgaagccttcgaagccaacagattctacaccgtgatcaacaaaaagagcggcgagatcgtgcccatggaggtgaacttcaacttcgacgaccccaacctgatcatcctgcctctggcctttggcaagagacagggcagagaattcatctggaacgacctgctgtccctggaaaccggcagcctgaagctggccaacggaagagtgatcgagaagacactgtacaacagaagaacccggcaggatgagcctgccctgttcgtggccctgaccttcgagcggcgggaggtcctggactcctccaatatcaaaccaatgaacctgatcggcgtggcaagaggcgaaaacatccccgccgtgatcgccctgaccgaccccgagggctgcccactgagccggtttaaggatagcctgggaaacccaacccacatcctgagaatcggcgagagctataaggagaagcagcggaccatccaggccaagaaggaggtggagcagcggagagccggcggctacagccggaagtacgccagcaaagccaagaatctggcagacgatatggtgagaaacaccgctagagatctgctgtactacgccgtgacccaggatgccatgctgatcttcgccaacctgagccggggcttcggccggcagggcaagcggaccttcatggccgagagacagtacacacggatggaggactggctgaccgccaagctggcctacgagggcctgagcaagacctacctgtccaagacactggcccagtacacctccaagacatgcagcaactgtgggtttaccatcaccagcgccgactacgacagggtgctggagaagctgaagaagacagcaacaggctggatgaccacaattaacggcaaggagctgaaggtggagggccagattacctactacaacagatacaagagacagaacgtagtcaaggacctgtccgtcgagctggatagactgagcgaagaatctgtgaacaacgacatctcctcctggacaaagggcagaagcggagaagctctgagcctcctgaagaaaagattctcccatagacccgtgcaggagaagttcgtgtgcctgaactgcggcttcgagacacacgcagccgagcaagccgccctgaacatcgccagatcctggctgttcctgcggagccaggagtacaagaaataccagacaaacaagacaaccggcaacaccgataagagagccttcgtcgagacctggcagtccttttaccggaagaagcttaaggaggtgtggaaacctgccgtgcggtctggcggatctggcggaggctcctctacacctgtgaccttcgaggatgtggtggtctacttcaccgccgctgagtgggtgcacctgacaaactggcaaagagatttttatcaggccgtgatgatggaaacctacgagctggtggccagcgtggctggcgacggcgttccaatggccgaggacgaggaaggcggagtggaaagacccgtgtggcagtacatccccagaggcaagcggcggagaaagacccctcagcctcgcgccgacggatctggctccggcagcggccccaagaaaaagagaaaagtctaagctgccttctgcggggcttgccttctggccatgcccttcttctctcccttgcacctgtacctcttggtctttgaataaagcctgagtaggaaggctagcaaaaaaaaaaaaaaaaaaaaaaaaaaaaaaaaaaaaaaaaaaaaaaaaaaaaaaaaaaaaaaaaaaaaaaaaaaaaaaaa

SEQ ID NO: 2464 - RNA, 6050 nt, synthetic construct
  source 1..6050: mol_type = other RNA
aggaaataagagagaaaagaagagtaagaagaaatataagagccaccgccaccatggcccctaagaagaagcgtaaagtgagccggatggaacgcctcgtctacgaggtgcggcagaagtgcagaaacatcgaggacatctgcatctcctgcggatctctgaacgtgaccctggagcacccactgttcatcggcggcatgtgccagaactgtaaaaactgttttctggagtgtgcctatcaatacgacgatgacggctaccagagctactgcaccatctgttgcggcggaagagaggtgctgatgtgtggaaataacaactgctgccggtgcttctgcgtggaatgcgtggacctgctggtgggccccggcgccgcccaggccgctattaaggaagatccttggaactgctacatgtgcggccacaagggcacatacggcctgctgagacggagagaggactggcctagcagactgcagatgttcttcgccaataaccacgaccaggagttcgacccccctaaggtgtaccctcccgtccccgccgagaagagaaagcccatccgggtcctgagcctgttcgatggcatcgccaccggtctgctggtgctgaaggacctgggcatccaggtggataggtacattgcctccgaggtgtgcgaggactccatcaccgtgggaatggtgcgtcatcagggcaagatcatgtacgtgggcgacgtgcggagcgtgacacagaagcatatccaggagtggggccctttcgacctggtgatcggcggcagcccttgcaatgacctgagcatcgtgaacccagcccggaagggcctgtacgagggaaccggcagactgttcttcgagttttacagactgctgcacgacgcccggcctaaggaaggcgacgaccggcccttcttttggctgttcgagaatgtggtggccatgggagtcagcgacaagcgggatattagccggttcctggagagcaaccccgtgatgatcgatgccaaggaagtgagcgccgcccaccgggccagatacttctggggcaatctgcctggcatgaacagacccctggccagcaccgtgaacgacaagctggagctgcaggagtgcctggagcacggccggatcgccaagttcagcaaggtgagaaccatcaccacccgaagcaacagcatcaaacaaggcaaggaccagcactttcctgtgttcatgaacgagaaggaggacatcctgtggtgtaccgagatggagagagtgttcgggttcccagtccactacacagatgtcagcaacatgtctagactggccagacagagactgctgggaagaagctggtccgtccctgtgatcagacacctgttcgcccctctgaaggagtacttcgcctgcgtgagcagcggcaacagcaacgccaacagccggggccccagcttctctagcggcctggtgccactgtccctgagagggagccacatgggccccatggagatctacaaaaccgtgagcgcctggaagcggcagcctgtgcgcgtgctgagcctgtttcggaatatcgataaagtcctgaaaagcctgggattcctggagagcggctctggctccggcggtggcaccctgaagtacgtggaggatgtgacaaacgtggtcagacgggatgtggagaagtggggccccttcgatctggtgtacggcagcacccaacccctgggcagctcttgtgaccggtgccctggctggtacatgtttcagttccaccggatcctgcagtacgccctgccgagacaggagtcccagcggccattcttttggattttcatggacaacttgctgctgaccgaggatgaccaggaaactaccactcggttcctgcagaccgaagccgtgaccctgcaggacgtgagaggccgggactaccagaacgccatgcgggtgtggtccaacatccctggactgaaaagcaagcacgcacctctgacccctaaagaagaggagtacctgcaggcccaggtgcggagcagaagcaagctggacgcccctaaggtggatctgctggtgaagaattgcctcctgcccctgagagagtacttcaagtatttcagccagaatagtctgcccctgggaggcagcggcggcggcgccctggtgacatttgaggacgtcgccgtgcggttcacccaggaggaatgggctctgctggatccttctcagaaaatcctgtaccgggacgtgatgagagagacataccggaatctgacctccgtgggcatcaactgggaatgttgggaccttgaagcctgcttcagaagcctgggaagaaacctgagagtgcaggtggtgaagagaaagtgcgagctgaccaacagcggcccctgcgccgagggcggcccaagcagcggcgcccctcctcccagcggcggcagcccagccggctccccaacctctaccgaggagggcacctctgagtccgccacccccgagagcggccctggcacctccaccgagcccagcgagggcagcgcacccggcagccctgccggcagccccacctccacagaggagggaaccagcaccgagcccagcgaaggcagcgccccaggcaccagcaccgagcctagtgagcaggagattaaacggatcaacaagatcagaagaagacttgtgaaagacagcaacaccaagaaggccggcaagacaggccccatgaaaaccctgctggttagagtgatgacacccgatctgagagagcggctggaaaacctgagaaagaagcctgaaaatatcccccagcccatcagcaatacatctagagccaacctgaataagctgctgaccgattacaccgaaatgaagaaggcgatcctgcatgtgtactgggaagagttccagaaggaccctgtgggcctgatgagccgggtggcccagcctgccagcaagaagatcgatcagaacaagctgaaacctgagatggacgagaagggcaacctgaccaccgccggctttgcctgctctcagtgtggccagcccctgttcgtgtacaagctggagcaggtgtctgagaagggcaaggcttacaccaactacttcggacggtgcaatgtggccgagcacgaaaagctgatcctgctggcccagctgaagcccgagaaggatagcgacgaagccgtgacatatagcctgggaaagtttgggcagagggccctggatttctacagcattcatgtgaccaaggagtccacccaccccgtgaagcccctggcccagatcgccggaaacagatacgcctccggacctgtgggaaaggccctgagcgacgcatgtatgggcacaatcgcctccttcctgtctaagtaccaggacatcatcatcgaacaccagaaggtggtgaagggcaaccagaagagactggagagcctgcgggagctggccggcaaggaaaacctggaataccctagcgtgaccctgccacctcagcctcacaccaaggagggcgttgatgcctacaacgaagtgatcgcccgggtgcgaatgtgggtgaacctgaacctgtggcagaagctgaagctaagcagagatgatgccaagcctctgctgagactgaagggattcccttcctttcctctggtcgagagacaggccaacgaagtggactggtgggacatggtgtgtaacgtgaagaagctgatcaacgagaaaaaggaggatggcaaggtgttttggcagaatctggctggctacaagagacaggaagccctgagaccatacctgagcagcgaggaagatcggaagaagggaaagaaattcgctcggtaccagctgggcgacctgctgctgcacctggaaaagaagcacggcgaggactggggaaaggtgtacgacgaggcctgggagcggattgacaagaaagtggaaggcctgagcaagcacatcaagctggaagaggaacggagaagcgaggacgcccagagcaaggccgccctgaccgactggctgcgggctaaggccagcttcgtgatcgagggcctgaaggaggccgacaaggacgagttctgcagatgcgagctgaagctgcagaagtggtacggggacctgcggggaaagcccttcgccatcgaagccgagaacagcatcctggacatcagcggcttcagcaagcagtacaactgtgccttcatctggcagaaggacggcgtgaagaagctgaacctgtacctgatcatcaactacttcaagggcggcaagctgcggttcaagaagatcaaacctgaagccttcgaagccaacagattctacaccgtgatcaacaaaaagagcggcgagatcgtgcccatggaggtgaacttcaacttcgacgaccccaacctgatcatcctgcctctggcctttggcaagagacagggcagagaattcatctggaacgacctgctgtccctggaaaccggcagcctgaagctggccaacggaagagtgatcgagaagacactgtacaacagaagaacccggcaggatgagcctgccctgttcgtggccctgaccttcgagcggcgggaggtcctggactcctccaatatcaaaccaatgaacctgatcggcgtggcaagaggcgaaaacatccccgccgtgatcgccctgaccgaccccgagggctgcccactgagccggtttaaggatagcctgggaaacccaacccacatcctgagaatcggcgagagctataaggagaagcagcggaccatccaggccaagaaggaggtggagcagcggagagccggcggctacagccggaagtacgccagcaaagccaagaatctggcagacgatatggtgagaaacaccgctagagatctgctgtactacgccgtgacccaggatgccatgctgatcttcgccaacctgagccggggcttcggccggcagggcaagcggaccttcatggccgagagacagtacacacggatggaggactggctgaccgccaagctggcctacgagggcctgagcaagacctacctgtccaagacactggcccagtacacctccaagacatgcagcaactgtgggtttaccatcaccagcgccgactacgacagggtgctggagaagctgaagaagacagcaacaggctggatgaccacaattaacggcaaggagctgaaggtggagggccagattacctactacaacagatacaagagacagaacgtagtcaaggacctgtccgtcgagctggatagactgagcgaagaatctgtgaacaacgacatctcctcctggacaaagggcagaagcggagaagctctgagcctcctgaagaaaagattctcccatagacccgtgcaggagaagttcgtgtgcctgaactgcggcttcgagacacacgcagccgagcaagccgccctgaacatcgccagatcctggctgttcctgcggagccaggagtacaagaaataccagacaaacaagacaaccggcaacaccgataagagagccttcgtcgagacctggcagtccttttaccggaagaagcttaaggaggtgtggaaacctgccgtgcggtctggcggatctggcggaggctcctcaggacgtggtgacattcaaggacgtcgccatctacttcagccctgaggaatgggtgcggctgagcgccggacagagagaactgtaccaggaggtgatgctggacaactacgagctggtgaccagcctggatagagagagcaaactgctgtataagatggaccccgaggaagaaagctgcgagggcgtgccatacagctctgccgacagcggcgcccctgatagctcctccacctctgcttgtggatctggctccggcagcggccccaagaaaaagagaaaagtctaagctgccttctgcggggcttgccttctggccatgcccttcttctctcccttgcacctgtacctcttggtctttgaataaagcctgagtaggaaggctagcaaaaaaaaaaaaaaaaaaaaaaaaaaaaaaaaaaaaaaaaaaaaaaaaaaaaaaaaaaaaaaaaaaaaaaaaaaaaaaaa

SEQ ID NO: 2465 - RNA, 5476 nt, synthetic construct; identical to SEQ ID NO: 2409
  modified_base 1..5476: mod_base = OTHER; note = Each t is m1f
  source 1..5476: mol_type = other RNA

SEQ ID NO: 2466 - RNA, 5419 nt, synthetic construct; identical to SEQ ID NO: 2410
  modified_base 1..5419: mod_base = OTHER; note = Each t is m1f
  source 1..5419: mol_type = other RNA

SEQ ID NO: 2467 - RNA, 5419 nt, synthetic construct; identical to SEQ ID NO: 2411
  modified_base 1..5419: mod_base = OTHER; note = Each t is m1f
  source 1..5419: mol_type = other RNA

SEQ ID NO: 2468 - RNA, 5419 nt, synthetic construct; identical to SEQ ID NO: 2412
  modified_base 1..5419: mod_base = OTHER; note = Each t is m1f
  source 1..5419: mol_type = other RNA

SEQ ID NO: 2469 - RNA, 5446 nt, synthetic construct; identical to SEQ ID NO: 2413
  modified_base 1..5446: mod_base = OTHER; note = Each t is m1f
  source 1..5446: mol_type = other RNA

SEQ ID NO: 2470 - RNA, 5428 nt, synthetic construct; identical to SEQ ID NO: 2414
  modified_base 1..5428: mod_base = OTHER; note = Each t is m1f
  source 1..5428: mol_type = other RNA

SEQ ID NO: 2471 - RNA, 5419 nt, synthetic construct; identical to SEQ ID NO: 2415
  modified_base 1..5419: mod_base = OTHER; note = Each t is m1f
  source 1..5419: mol_type = other RNA

SEQ ID NO: 2472 - RNA, 5419 nt, synthetic construct; identical to SEQ ID NO: 2416
  modified_base 1..5419: mod_base = OTHER; note = Each t is m1f
  source 1..5419: mol_type = other RNA

SEQ ID NO: 2473 - RNA, 5419 nt, synthetic construct; identical to SEQ ID NO: 2417
  modified_base 1..5419: mod_base = OTHER; note = Each t is m1f
  source 1..5419: mol_type = other RNA

SEQ ID NO: 2474 - RNA, 5419 nt, synthetic construct; identical to SEQ ID NO: 2418
  modified_base 1..5419: mod_base = OTHER; note = Each t is m1f
  source 1..5419: mol_type = other RNA

SEQ ID NO: 2475 - RNA, 5854 nt, synthetic construct; identical to SEQ ID NO: 2419
  modified_base 1..5854: mod_base = OTHER; note = Each t is m1f
  source 1..5854: mol_type = other RNA

SEQ ID NO: 2476 - RNA, 5797 nt, synthetic construct; identical to SEQ ID NO: 2420
  modified_base 1..5797: mod_base = OTHER; note = Each t is m1f
  source 1..5797: mol_type = other RNA

SEQ ID NO: 2477 - RNA, 5797 nt, synthetic construct; identical to SEQ ID NO: 2421
  modified_base 1..5797: mod_base = OTHER; note = Each t is m1f
  source 1..5797: mol_type = other RNA

SEQ ID NO: 2478 - RNA, 5797 nt, synthetic construct; identical to SEQ ID NO: 2422
  modified_base 1..5797: mod_base = OTHER; note = Each t is m1f
  source 1..5797: mol_type = other RNA

SEQ ID NO: 2479 - RNA, 5824 nt, synthetic construct; identical to SEQ ID NO: 2423
  modified_base 1..5824: mod_base = OTHER; note = Each t is m1f
  source 1..5824: mol_type = other RNA

SEQ ID NO: 2480 - RNA, 5806 nt, synthetic construct; identical to SEQ ID NO: 2424
  modified_base 1..5806: mod_base = OTHER; note = Each t is m1f
  source 1..5806: mol_type = other RNA

SEQ ID NO: 2481 - RNA, 5797 nt, synthetic construct; identical to SEQ ID NO: 2425
  modified_base 1..5797: mod_base = OTHER; note = Each t is m1f
  source 1..5797: mol_type = other RNA

SEQ ID NO: 2482 - RNA, 5797 nt, synthetic construct; identical to SEQ ID NO: 2426
  modified_base 1..5797: mod_base = OTHER; note = Each t is m1f
  source 1..5797: mol_type = other RNA

SEQ ID NO: 2483 - RNA, 5797 nt, synthetic construct; identical to SEQ ID NO: 2427
  modified_base 1..5797: mod_base = OTHER; note = Each t is m1f
  source 1..5797: mol_type = other RNA

SEQ ID NO: 2484 - RNA, 5797 nt, synthetic construct; identical to SEQ ID NO: 2428
  modified_base 1..5797: mod_base = OTHER; note = Each t is m1f
  source 1..5797: mol_type = other RNA

SEQ ID NO: 2485 - RNA, 8787 nt, synthetic construct; identical to SEQ ID NO: 2429
  modified_base 1..8787: mod_base = OTHER; note = Each t is m1f
  source 1..8787: mol_type = other RNA

SEQ ID NO: 2486 - RNA, 8787 nt, synthetic construct; identical to SEQ ID NO: 2430
  modified_base 1..8787: mod_base = OTHER; note = Each t is m1f
  source 1..8787: mol_type = other RNA

SEQ ID NO: 2487 - RNA, 8787 nt, synthetic construct; identical to SEQ ID NO: 2431
  modified_base 1..8787: mod_base = OTHER; note = Each t is m1f
  source 1..8787: mol_type = other RNA

SEQ ID NO: 2488 - RNA, 8814 nt, synthetic construct; identical to SEQ ID NO: 2432
  modified_base 1..8814: mod_base = OTHER; note = Each t is m1f
  source 1..8814: mol_type = other RNA

SEQ ID NO: 2489 - RNA, 8796 nt, synthetic construct; identical to SEQ ID NO: 2433
  modified_base 1..8796: mod_base = OTHER; note = Each t is m1f
  source 1..8796: mol_type = other RNA

SEQ ID NO: 2490 - RNA, 8787 nt, synthetic construct; identical to SEQ ID NO: 2434
  modified_base 1..8787: mod_base = OTHER; note = Each t is m1f
  source 1..8787: mol_type = other RNA

SEQ ID NO: 2491 - RNA, 8787 nt, synthetic construct; identical to SEQ ID NO: 2435
  modified_base 1..8787: mod_base = OTHER; note = Each t is m1f
  source 1..8787: mol_type = other RNA

SEQ ID NO: 2492 - RNA, 8787 nt, synthetic construct; identical to SEQ ID NO: 2436
  modified_base 1..8787: mod_base = OTHER; note = Each t is m1f
  source 1..8787: mol_type = other RNA

SEQ ID NO: 2493 - RNA, 8787 nt, synthetic construct; identical to SEQ ID NO: 2437
  modified_base 1..8787: mod_base = OTHER; note = Each t is m1f
  source 1..8787: mol_type = other RNA

SEQ ID NO: 2494 - RNA, 5785 nt, synthetic construct; identical to SEQ ID NO: 2438
  modified_base 1..5785: mod_base = OTHER; note = Each t is m1f
  source 1..5785: mol_type = other RNA

SEQ ID NO: 2495 - RNA, 5785 nt, synthetic construct; identical to SEQ ID NO: 2439
  modified_base 1..5785: mod_base = OTHER; note = Each t is m1f
  source 1..5785: mol_type = other RNA

SEQ ID NO: 2496 - RNA, 5785 nt, synthetic construct; identical to SEQ ID NO: 2440
  modified_base 1..5785: mod_base = OTHER; note = Each t is m1f
  source 1..5785: mol_type = other RNA

SEQ ID NO: 2497 - RNA, 5812 nt, synthetic construct; identical to SEQ ID NO: 2441
  modified_base 1..5812: mod_base = OTHER; note = Each t is m1f
  source 1..5812: mol_type = other RNA

SEQ ID NO: 2498 - RNA, 5794 nt, synthetic construct; identical to SEQ ID NO: 2442
  modified_base 1..5794: mod_base = OTHER; note = Each t is m1f
  source 1..5794: mol_type = other RNA

SEQ ID NO: 2499 - RNA, 5785 nt, synthetic construct; identical to SEQ ID NO: 2443
  modified_base 1..5785: mod_base = OTHER; note = Each t is m1f
  source 1..5785: mol_type = other RNA

SEQ ID NO: 2500 - RNA, 5785 nt, synthetic construct; identical to SEQ ID NO: 2444
  modified_base 1..5785: mod_base = OTHER; note = Each t is m1f
  source 1..5785: mol_type = other RNA

SEQ ID NO: 2501 - RNA, 5785 nt, synthetic construct; identical to SEQ ID NO: 2445
  modified_base 1..5785: mod_base = OTHER; note = Each t is m1f
  source 1..5785: mol_type = other RNA

SEQ ID NO: 2502 - RNA, 5785 nt, synthetic construct; identical to SEQ ID NO: 2446
  modified_base 1..5785: mod_base = OTHER; note = Each t is m1f
  source 1..5785: mol_type = other RNA

SEQ ID NO: 2503 - RNA, 5684 nt, synthetic construct; identical to SEQ ID NO: 2447
  modified_base 1..5684: mod_base = OTHER; note = Each t is m1f
  source 1..5684: mol_type = other RNA

SEQ ID NO: 2504 - RNA, 5684 nt, synthetic construct; identical to SEQ ID NO: 2448
  modified_base 1..5684: mod_base = OTHER; note = Each t is m1f
  source 1..5684: mol_type = other RNA

SEQ ID NO: 2505 - RNA, 5684 nt, synthetic construct; identical to SEQ ID NO: 2449
  modified_base 1..5684: mod_base = OTHER; note = Each t is m1f
  source 1..5684: mol_type = other RNA

SEQ ID NO: 2506 - RNA, 5684 nt, synthetic construct; identical to SEQ ID NO: 2450
  modified_base 1..5684: mod_base = OTHER; note = Each t is m1f
  source 1..5684: mol_type = other RNA

SEQ ID NO: 2507 - RNA, 5684 nt, synthetic construct; identical to SEQ ID NO: 2451
  modified_base 1..5684: mod_base = OTHER; note = Each t is m1f
  source 1..5684: mol_type = other RNA

SEQ ID NO: 2508 - RNA, 5684 nt, synthetic construct; identical to SEQ ID NO: 2452
  modified_base 1..5684: mod_base = OTHER; note = Each t is m1f
  source 1..5684: mol_type = other RNA

SEQ ID NO: 2509 - RNA, 5684 nt, synthetic construct; identical to SEQ ID NO: 2453
  modified_base 1..5684: mod_base = OTHER; note = Each t is m1f
  source 1..5684: mol_type = other RNA

SEQ ID NO: 2510 - RNA, 5684 nt, synthetic construct; identical to SEQ ID NO: 2454
  modified_base 1..5684: mod_base = OTHER; note = Each t is m1f
  source 1..5684: mol_type = other RNA

SEQ ID NO: 2511 - RNA, 5684 nt, synthetic construct; identical to SEQ ID NO: 2455
  modified_base 1..5684: mod_base = OTHER; note = Each t is m1f
  source 1..5684: mol_type = other RNA

SEQ ID NO: 2512 - RNA, 9485 nt, synthetic construct; identical to SEQ ID NO: 2456
  modified_base 1..9485: mod_base = OTHER; note = Each t is m1f
  source 1..9485: mol_type = other RNA

SEQ ID NO: 2513 - RNA, 9485 nt, synthetic construct; identical to SEQ ID NO: 2457
  modified_base 1..9485: mod_base = OTHER; note = Each t is m1f
  source 1..9485: mol_type = other RNA

SEQ ID NO: 2514 - RNA, 9485 nt, synthetic construct; identical to SEQ ID NO: 2458
  modified_base 1..9485: mod_base = OTHER; note = Each t is m1f
  source 1..9485: mol_type = other RNA

SEQ ID NO: 2515 - RNA, 6050 nt, synthetic construct; identical to SEQ ID NO: 2459
  modified_base 1..6050: mod_base = OTHER; note = Each t is m1f
  source 1..6050: mol_type = other RNA

SEQ ID NO: 2516 - RNA, 6050 nt, synthetic construct; identical to SEQ ID NO: 2460
  modified_base 1..6050: mod_base = OTHER; note = Each t is m1f
  source 1..6050: mol_type = other RNA

SEQ ID NO: 2517 - RNA, 6092 nt, synthetic construct; identical to SEQ ID NO: 2461
  modified_base 1..6092: mod_base = OTHER; note = Each t is m1f
  source 1..6092: mol_type = other RNA

SEQ ID NO: 2518 - RNA, 6050 nt, synthetic construct; identical to SEQ ID NO: 2462
  modified_base 1..6050: mod_base = OTHER; note = Each t is m1f
  source 1..6050: mol_type = other RNA

SEQ ID NO: 2519 - RNA, 6043 nt, synthetic construct; identical to SEQ ID NO: 2463
  modified_base 1..6043: mod_base = OTHER; note = Each t is m1f
  source 1..6043: mol_type = other RNA

SEQ ID NO: 2520 - RNA, 6050 nt, synthetic construct; identical to SEQ ID NO: 2464
  modified_base 1..6050: mod_base = OTHER; note = Each t is m1f
  source 1..6050: mol_type = other RNA

SEQ ID NO: 2521 - RNA, 5419 nt, synthetic construct
  source 1..5419: mol_type = other RNA
aggaaataagagagaaaagaagagtaagaagaaatataagagccaccatggcccctaagaagaagcgtaaagtgagccgggtgaacggcagcggcagcggcggcggcatgaaccacgaccaggagttcgacccccctaaggtgtaccctcccgtccccgccgagaagagaaagcccatccgggtcctgagcctgttcgatggcatcgccaccggtctgctggtgctgaaggacctgggcatccaggtggataggtacattgcctccgaggtgtgcgaggactccatcaccgtgggaatggtgcgtcatcagggcaagatcatgtacgtgggcgacgtgcggagcgtgacacagaagcatatccaggagtggggccctttcgacctggtgatcggcggcagcccttgcaatgacctgagcatcgtgaacccagcccggaagggcctgtacgagggaaccggcagactgttcttcgagttttacagactgctgcacgacgcccggcctaaggaaggcgacgaccggcccttcttttggctgttcgagaatgtggtggccatgggagtcagcgacaagcgggatattagccggttcctggagagcaaccccgtgatgatcgatgccaaggaagtgagcgccgcccaccgggccagatacttctggggcaatctgcctggcatgaacagacccctggccagcaccgtgaacgacaagctggagctgcaggagtgcctggagcacggccggatcgccaagttcagcaaggtgagaaccatcaccacccgaagcaacagcatcaaacaaggcaaggaccagcactttcctgtgttcatgaacgagaaggaggacatcctgtggtgtaccgagatggagagagtgttcgggttcccagtccactacacagatgtcagcaacatgtctagactggccagacagagactgctgggaagaagctggtccgtccctgtgatcagacacctgttcgcccctctgaaggagtacttcgcctgcgtgagcagcggcaacagcaacgccaacagccggggccccagcttctctagcggcctggtgccactgtccctgagagggagccacatgggccccatggagatctacaaaaccgtgagcgcctggaagcggcagcctgtgcgcgtgctgagcctgtttcggaatatcgataaagtcctgaaaagcctgggattcctggagagcggctctggctccggcggtggcaccctgaagtacgtggaggatgtgacaaacgtggtcagacgggatgtggagaagtggggccccttcgatctggtgtacggcagcacccaacccctgggcagctcttgtgaccggtgccctggctggtacatgtttcagttccaccggatcctgcagtacgccctgccgagacaggagtcccagcggccattcttttggattttcatggacaacttgctgctgaccgaggatgaccaggaaactaccactcggttcctgcagaccgaagccgtgaccctgcaggacgtgagaggccgggactaccagaacgccatgcgggtgtggtccaacatccctggactgaaaagcaagcacgcacctctgacccctaaagaagaggagtacctgcaggcccaggtgcggagcagaagcaagctggacgcccctaaggtggatctgctggtgaagaattgcctcctgcccctgagagagtacttcaagtatttcagccagaatagtctgcccctgggcggcccaagcagcggcgcccctcctcccagcggcggcagcccagccggctccccaacctctaccgaggagggcacctctgagtccgccacccccgagagcggccctggcacctccaccgagcccagcgagggcagcgcacccggcagccctgccggcagccccacctccacagaggagggaaccagcaccgagcccagcgaaggcagcgccccaggcaccagcaccgagcctagtgagggcggctctggcggcggcagcgcccaggagattaaacggatcaacaagatcagaagaagacttgtgaaagacagcaacaccaagaaggccggcaagacaggccccatgaaaaccctgctggttagagtgatgacacccgatctgagagagcggctggaaaacctgagaaagaagcctgaaaatatcccccagcccatcagcaatacatctagagccaacctgaataagctgctgaccgattacaccgaaatgaagaaggcgatcctgcatgtgtactgggaagagttccagaaggaccctgtgggcctgatgagccgggtggcccagcctgccagcaagaagatcgatcagaacaagctgaaacctgagatggacgagaagggcaacctgaccaccgccggctttgcctgctctcagtgtggccagcccctgttcgtgtacaagctggagcaggtgtctgagaagggcaaggcttacaccaactacttcggacggtgcaatgtggccgagcacgaaaagctgatcctgctggcccagctgaagcccgagaaggatagcgacgaagccgtgacatatagcctgggaaagtttgggcagagggccctggatttctacagcattcatgtgaccaaggagtccacccaccccgtgaagcccctggcccagatcgccggaaacagatacgcctccggacctgtgggaaaggccctgagcgacgcatgtatgggcacaatcgcctccttcctgtctaagtaccaggacatcatcatcgaacaccagaaggtggtgaagggcaaccagaagagactggagagcctgcgggagctggccggcaaggaaaacctggaataccctagcgtgaccctgccacctcagcctcacaccaaggagggcgttgatgcctacaacgaagtgatcgcccgggtgcgaatgtgggtgaacctgaacctgtggcagaagctgaagctaagcagagatgatgccaagcctctgctgagactgaagggattcccttcctttcctctggtcgagagacaggccaacgaagtggactggtgggacatggtgtgtaacgtgaagaagctgatcaacgagaaaaaggaggatggcaaggtgttttggcagaatctggctggctacaagagacaggaagccctgagaccatacctgagcagcgaggaagatcggaagaagggaaagaaattcgctcggtaccagctgggcgacctgctgctgcacctggaaaagaagcacggcgaggactggggaaaggtgtacgacgaggcctgggagcggattgacaagaaagtggaaggcctgagcaagcacatcaagctggaagaggaacggagaagcgaggacgcccagagcaaggccgccctgaccgactggctgcgggctaaggccagcttcgtgatcgagggcctgaaggaggccgacaaggacgagttctgcagatgcgagctgaagctgcagaagtggtacggggacctgcggggaaagcccttcgccatcgaagccgagaacagcatcctggacatcagcggcttcagcaagcagtacaactgtgccttcatctggcagaaggacggcgtgaagaagctgaacctgtacctgatcatcaactacttcaagggcggcaagctgcggttcaagaagatcaaacctgaagccttcgaagccaacagattctacaccgtgatcaacaaaaagagcggcgagatcgtgcccatggaggtgaacttcaacttcgacgaccccaacctgatcatcctgcctctggcctttggcaagagacagggcagagaattcatctggaacgacctgctgtccctggaaaccggcagcctgaagctggccaacggaagagtgatcgagaagacactgtacaacagaagaacccggcaggatgagcctgccctgttcgtggccctgaccttcgagcggcgggaggtcctggactcctccaatatcaaaccaatgaacctgatcggcgtggcaagaggcgaaaacatccccgccgtgatcgccctgaccgaccccgagggctgcccactgagccggtttaaggatagcctgggaaacccaacccacatcctgagaatcggcgagagctataaggagaagcagcggaccatccaggccaagaaggaggtggagcagcggagagccggcggctacagccggaagtacgccagcaaagccaagaatctggcagacgatatggtgagaaacaccgctagagatctgctgtactacgccgtgacccaggatgccatgctgatcttcgccaacctgagccggggcttcggccggcagggcaagcggaccttcatggccgagagacagtacacacggatggaggactggctgaccgccaagctggcctacgagggcctgagcaagacctacctgtccaagacactggcccagtacacctccaagacatgcagcaactgtgggtttaccatcaccagcgccgactacgacagggtgctggagaagctgaagaagacagcaacaggctggatgaccacaattaacggcaaggagctgaaggtggagggccagattacctactacaacagatacaagagacagaacgtagtcaaggacctgtccgtcgagctggatagactgagcgaagaatctgtgaacaacgacatctcctcctggacaaagggcagaagcggagaagctctgagcctcctgaagaaaagattctcccatagacccgtgcaggagaagttcgtgtgcctgaactgcggcttcgagacacacgcagccgagcaagccgccctgaacatcgccagatcctggctgttcctgcggagccaggagtacaagaaataccagacaaacaagacaaccggcaacaccgataagagagccttcgtcgagacctggcagtccttttaccggaagaagcttaaggaggtgtggaaacctgccgtgcggtctggcggatctggcggaggctccacaagcagccagagccccctgaccttcggcgacgtggccgtggagttcagcggcgaggagtgggcctggctggacagcgcccagaggagcctgcacaggagcgtgatgctggagaactacaggaacctggccagcctgggcctgtgcctgagcaagcccgagatgatcagcagcctggagcagaggaaggagccctgggccgtgaagaggaagagcaccaggggcatgcaccccgacagccagaccctgaccagccccaagaaaaagagaaaagtctaagctgccttctgcggggcttgccttctggccatgcccttcttctctcccttgcacctgtacctcttggtctttgaataaagcctgagtaggaaggctagcaaaaaaaaaaaaaaaaaaaaaaaaaaaaaaaaaaaaaaaaaaaaaaaaaaaaaaaaaaaaaaaaaaaaaaaaaaaaaaaa

SEQ ID NO: 2522 - RNA, 5419 nt, synthetic construct
  source 1..5419: mol_type = other RNA
aggaaataagagagaaaagaagagtaagaagaaatataagagccaccatggcccctaagaagaagcgtaaagtgagccgggtgaacggcagcggcagcggcggcggcatgaaccacgaccaggagttcgacccccctaaggtgtaccctcccgtccccgccgagaagagaaagcccatccgggtcctgagcctgttcgatggcatcgccaccggtctgctggtgctgaaggacctgggcatccaggtggataggtacattgcctccgaggtgtgcgaggactccatcaccgtgggaatggtgcgtcatcagggcaagatcatgtacgtgggcgacgtgcggagcgtgacacagaagcatatccaggagtggggccctttcgacctggtgatcggcggcagcccttgcaatgacctgagcatcgtgaacccagcccggaagggcctgtacgagggaaccggcagactgttcttcgagttttacagactgctgcacgacgcccggcctaaggaaggcgacgaccggcccttcttttggctgttcgagaatgtggtggccatgggagtcagcgacaagcgggatattagccggttcctggagagcaaccccgtgatgatcgatgccaaggaagtgagcgccgcccaccgggccagatacttctggggcaatctgcctggcatgaacagacccctggccagcaccgtgaacgacaagctggagctgcaggagtgcctggagcacggccggatcgccaagttcagcaaggtgagaaccatcaccacccgaagcaacagcatcaaacaaggcaaggaccagcactttcctgtgttcatgaacgagaaggaggacatcctgtggtgtaccgagatggagagagtgttcgggttcccagtccactacacagatgtcagcaacatgtctagactggccagacagagactgctgggaagaagctggtccgtccctgtgatcagacacctgttcgcccctctgaaggagtacttcgcctgcgtgagcagcggcaacagcaacgccaacagccggggccccagcttctctagcggcctggtgccactgtccctgagagggagccacatgggccccatggagatctacaaaaccgtgagcgcctggaagcggcagcctgtgcgcgtgctgagcctgtttcggaatatcgataaagtcctgaaaagcctgggattcctggagagcggctctggctccggcggtggcaccctgaagtacgtggaggatgtgacaaacgtggtcagacgggatgtggagaagtggggccccttcgatctggtgtacggcagcacccaacccctgggcagctcttgtgaccggtgccctggctggtacatgtttcagttccaccggatcctgcagtacgccctgccgagacaggagtcccagcggccattcttttggattttcatggacaacttgctgctgaccgaggatgaccaggaaactaccactcggttcctgcagaccgaagccgtgaccctgcaggacgtgagaggccgggactaccagaacgccatgcgggtgtggtccaacatccctggactgaaaagcaagcacgcacctctgacccctaaagaagaggagtacctgcaggcccaggtgcggagcagaagcaagctggacgcccctaaggtggatctgctggtgaagaattgcctcctgcccctgagagagtacttcaagtatttcagccagaatagtctgcccctgggcggcccaagcagcggcgcccctcctcccagcggcggcagcccagccggctccccaacctctaccgaggagggcacctctgagtccgccacccccgagagcggccctggcacctccaccgagcccagcgagggcagcgcacccggcagccctgccggcagccccacctccacagaggagggaaccagcaccgagcccagcgaaggcagcgccccaggcaccagcaccgagcctagtgagggcggctctggcggcggcagcgcccaggagattaaacggatcaacaagatcagaagaagacttgtgaaagacagcaacaccaagaaggccggcaagacaggccccatgaaaaccctgctggttagagtgatgacacccgatctgagagagcggctggaaaacctgagaaagaagcctgaaaatatcccccagcccatcagcaatacatctagagccaacctgaataagctgctgaccgattacaccgaaatgaagaaggcgatcctgcatgtgtactgggaagagttccagaaggaccctgtgggcctgatgagccgggtggcccagcctgccagcaagaagatcgatcagaacaagctgaaacctgagatggacgagaagggcaacctgaccaccgccggctttgcctgctctcagtgtggccagcccctgttcgtgtacaagctggagcaggtgtctgagaagggcaaggcttacaccaactacttcggacggtgcaatgtggccgagcacgaaaagctgatcctgctggcccagctgaagcccgagaaggatagcgacgaagccgtgacatatagcctgggaaagtttgggcagagggccctggatttctacagcattcatgtgaccaaggagtccacccaccccgtgaagcccctggcccagatcgccggaaacagatacgcctccggacctgtgggaaaggccctgagcgacgcatgtatgggcacaatcgcctccttcctgtctaagtaccaggacatcatcatcgaacaccagaaggtggtgaagggcaaccagaagagactggagagcctgcgggagctggccggcaaggaaaacctggaataccctagcgtgaccctgccacctcagcctcacaccaaggagggcgttgatgcctacaacgaagtgatcgcccgggtgcgaatgtgggtgaacctgaacctgtggcagaagctgaagctaagcagagatgatgccaagcctctgctgagactgaagggattcccttcctttcctctggtcgagagacaggccaacgaagtggactggtgggacatggtgtgtaacgtgaagaagctgatcaacgagaaaaaggaggatggcaaggtgttttggcagaatctggctggctacaagagacaggaagccctgagaccatacctgagcagcgaggaagatcggaagaagggaaagaaattcgctcggtaccagctgggcgacctgctgctgcacctggaaaagaagcacggcgaggactggggaaaggtgtacgacgaggcctgggagcggattgacaagaaagtggaaggcctgagcaagcacatcaagctggaagaggaacggagaagcgaggacgcccagagcaaggccgccctgaccgactggctgcgggctaaggccagcttcgtgatcgagggcctgaaggaggccgacaaggacgagttctgcagatgcgagctgaagctgcagaagtggtacggggacctgcggggaaagcccttcgccatcgaagccgagaacagcatcctggacatcagcggcttcagcaagcagtacaactgtgccttcatctggcagaaggacggcgtgaagaagctgaacctgtacctgatcatcaactacttcaagggcggcaagctgcggttcaagaagatcaaacctgaagccttcgaagccaacagattctacaccgtgatcaacaaaaagagcggcgagatcgtgcccatggaggtgaacttcaacttcgacgaccccaacctgatcatcctgcctctggcctttggcaagagacagggcagagaattcatctggaacgacctgctgtccctggaaaccggcagcctgaagctggccaacggaagagtgatcgagaagacactgtacaacagaagaacccggcaggatgagcctgccctgttcgtggccctgaccttcgagcggcgggaggtcctggactcctccaatatcaaaccaatgaacctgatcggcgtggcaagaggcgaaaacatccccgccgtgatcgccctgaccgaccccgagggctgcccactgagccggtttaaggatagcctgggaaacccaacccacatcctgagaatcggcgagagctataaggagaagcagcggaccatccaggccaagaaggaggtggagcagcggagagccggcggctacagccggaagtacgccagcaaagccaagaatctggcagacgatatggtgagaaacaccgctagagatctgctgtactacgccgtgacccaggatgccatgctgatcttcgccaacctgagccggggcttcggccggcagggcaagcggaccttcatggccgagagacagtacacacggatggaggactggctgaccgccaagctggcctacgagggcctgagcaagacctacctgtccaagacactggcccagtacacctccaagacatgcagcaactgtgggtttaccatcaccagcgccgactacgacagggtgctggagaagctgaagaagacagcaacaggctggatgaccacaattaacggcaaggagctgaaggtggagggccagattacctactacaacagatacaagagacagaacgtagtcaaggacctgtccgtcgagctggatagactgagcgaagaatctgtgaacaacgacatctcctcctggacaaagggcagaagcggagaagctctgagcctcctgaagaaaagattctcccatagacccgtgcaggagaagttcgtgtgcctgaactgcggcttcgagacacacgcagccgagcaagccgccctgaacatcgccagatcctggctgttcctgcggagccaggagtacaagaaataccagacaaacaagacaaccggcaacaccgataagagagccttcgtcgagacctggcagtccttttaccggaagaagcttaaggaggtgtggaaacctgccgtgcggtctggcggatctggcggaggctccacaagcagccagagccccctgaccttcggcgacgtggccgtggagttcagcggcgaggagtgggcctggctggacagcgcccagaggagcctgcacaggagcgtgatgctggagaactacaggaacctggccagcctgggcctgtgcctgagcaagcccgagatgatcagcagcctggagcagaggaaggagccctgggccgtgaagaggaagagcaccaggggcatgaggcccgacagccagaccctgaccagccccaagaaaaagagaaaagtctaagctgccttctgcggggcttgccttctggccatgcccttcttctctcccttgcacctgtacctcttggtctttgaataaagcctgagtaggaaggctagcaaaaaaaaaaaaaaaaaaaaaaaaaaaaaaaaaaaaaaaaaaaaaaaaaaaaaaaaaaaaaaaaaaaaaaaaaaaaaaaa

SEQ ID NO: 2523 - RNA, 5419 nt, synthetic construct
  source 1..5419: mol_type = other RNA
aggaaataagagagaaaagaagagtaagaagaaatataagagccaccatggcccctaagaagaagcgtaaagtgagccgggtgaacggcagcggcagcggcggcggcatgaaccacgaccaggagttcgacccccctaaggtgtaccctcccgtccccgccgagaagagaaagcccatccgggtcctgagcctgttcgatggcatcgccaccggtctgctggtgctgaaggacctgggcatccaggtggataggtacattgcctccgaggtgtgcgaggactccatcaccgtgggaatggtgcgtcatcagggcaagatcatgtacgtgggcgacgtgcggagcgtgacacagaagcatatccaggagtggggccctttcgacctggtgatcggcggcagcccttgcaatgacctgagcatcgtgaacccagcccggaagggcctgtacgagggaaccggcagactgttcttcgagttttacagactgctgcacgacgcccggcctaaggaaggcgacgaccggcccttcttttggctgttcgagaatgtggtggccatgggagtcagcgacaagcgggatattagccggttcctggagagcaaccccgtgatgatcgatgccaaggaagtgagcgccgcccaccgggccagatacttctggggcaatctgcctggcatgaacagacccctggccagcaccgtgaacgacaagctggagctgcaggagtgcctggagcacggccggatcgccaagttcagcaaggtgagaaccatcaccacccgaagcaacagcatcaaacaaggcaaggaccagcactttcctgtgttcatgaacgagaaggaggacatcctgtggtgtaccgagatggagagagtgttcgggttcccagtccactacacagatgtcagcaacatgtctagactggccagacagagactgctgggaagaagctggtccgtccctgtgatcagacacctgttcgcccctctgaaggagtacttcgcctgcgtgagcagcggcaacagcaacgccaacagccggggccccagcttctctagcggcctggtgccactgtccctgagagggagccacatgggccccatggagatctacaaaaccgtgagcgcctggaagcggcagcctgtgcgcgtgctgagcctgtttcggaatatcgataaagtcctgaaaagcctgggattcctggagagcggctctggctccggcggtggcaccctgaagtacgtggaggatgtgacaaacgtggtcagacgggatgtggagaagtggggccccttcgatctggtgtacggcagcacccaacccctgggcagctcttgtgaccggtgccctggctggtacatgtttcagttccaccggatcctgcagtacgccctgccgagacaggagtcccagcggccattcttttggattttcatggacaacttgctgctgaccgaggatgaccaggaaactaccactcggttcctgcagaccgaagccgtgaccctgcaggacgtgagaggccgggactaccagaacgccatgcgggtgtggtccaacatccctggactgaaaagcaagcacgcacctctgacccctaaagaagaggagtacctgcaggcccaggtgcggagcagaagcaagctggacgcccctaaggtggatctgctggtgaagaattgcctcctgcccctgagagagtacttcaagtatttcagccagaatagtctgcccctgggcggcccaagcagcggcgcccctcctcccagcggcggcagcccagccggctccccaacctctaccgaggagggcacctctgagtccgccacccccgagagcggccctggcacctccaccgagcccagcgagggcagcgcacccggcagccctgccggcagccccacctccacagaggagggaaccagcaccgagcccagcgaaggcagcgccccaggcaccagcaccgagcctagtgagggcggctctggcggcggcagcgcccaggagattaaacggatcaacaagatcagaagaagacttgtgaaagacagcaacaccaagaaggccggcaagacaggccccatgaaaaccctgctggttagagtgatgacacccgatctgagagagcggctggaaaacctgagaaagaagcctgaaaatatcccccagcccatcagcaatacatctagagccaacctgaataagctgctgaccgattacaccgaaatgaagaaggcgatcctgcatgtgtactgggaagagttccagaaggaccctgtgggcctgatgagccgggtggcccagcctgccagcaagaagatcgatcagaacaagctgaaacctgagatggacgagaagggcaacctgaccaccgccggctttgcctgctctcagtgtggccagcccctgttcgtgtacaagctggagcaggtgtctgagaagggcaaggcttacaccaactacttcggacggtgcaatgtggccgagcacgaaaagctgatcctgctggcccagctgaagcccgagaaggatagcgacgaagccgtgacatatagcctgggaaagtttgggcagagggccctggatttctacagcattcatgtgaccaaggagtccacccaccccgtgaagcccctggcccagatcgccggaaacagatacgcctccggacctgtgggaaaggccctgagcgacgcatgtatgggcacaatcgcctccttcctgtctaagtaccaggacatcatcatcgaacaccagaaggtggtgaagggcaaccagaagagactggagagcctgcgggagctggccggcaaggaaaacctggaataccctagcgtgaccctgccacctcagcctcacaccaaggagggcgttgatgcctacaacgaagtgatcgcccgggtgcgaatgtgggtgaacctgaacctgtggcagaagctgaagctaagcagagatgatgccaagcctctgctgagactgaagggattcccttcctttcctctggtcgagagacaggccaacgaagtggactggtgggacatggtgtgtaacgtgaagaagctgatcaacgagaaaaaggaggatggcaaggtgttttggcagaatctggctggctacaagagacaggaagccctgagaccatacctgagcagcgaggaagatcggaagaagggaaagaaattcgctcggtaccagctgggcgacctgctgctgcacctggaaaagaagcacggcgaggactggggaaaggtgtacgacgaggcctgggagcggattgacaagaaagtggaaggcctgagcaagcacatcaagctggaagaggaacggagaagcgaggacgcccagagcaaggccgccctgaccgactggctgcgggctaaggccagcttcgtgatcgagggcctgaaggaggccgacaaggacgagttctgcagatgcgagctgaagctgcagaagtggtacggggacctgcggggaaagcccttcgccatcgaagccgagaacagcatcctggacatcagcggcttcagcaagcagtacaactgtgccttcatctggcagaaggacggcgtgaagaagctgaacctgtacctgatcatcaactacttcaagggcggcaagctgcggttcaagaagatcaaacctgaagccttcgaagccaacagattctacaccgtgatcaacaaaaagagcggcgagatcgtgcccatggaggtgaacttcaacttcgacgaccccaacctgatcatcctgcctctggcctttggcaagagacagggcagagaattcatctggaacgacctgctgtccctggaaaccggcagcctgaagctggccaacggaagagtgatcgagaagacactgtacaacagaagaacccggcaggatgagcctgccctgttcgtggccctgaccttcgagcggcgggaggtcctggactcctccaatatcaaaccaatgaacctgatcggcgtggcaagaggcgaaaacatccccgccgtgatcgccctgaccgaccccgagggctgcccactgagccggtttaaggatagcctgggaaacccaacccacatcctgagaatcggcgagagctataaggagaagcagcggaccatccaggccaagaaggaggtggagcagcggagagccggcggctacagccggaagtacgccagcaaagccaagaatctggcagacgatatggtgagaaacaccgctagagatctgctgtactacgccgtgacccaggatgccatgctgatcttcgccaacctgagccggggcttcggccggcagggcaagcggaccttcatggccgagagacagtacacacggatggaggactggctgaccgccaagctggcctacgagggcctgagcaagacctacctgtccaagacactggcccagtacacctccaagacatgcagcaactgtgggtttaccatcaccagcgccgactacgacagggtgctggagaagctgaagaagacagcaacaggctggatgaccacaattaacggcaaggagctgaaggtggagggccagattacctactacaacagatacaagagacagaacgtagtcaaggacctgtccgtcgagctggatagactgagcgaagaatctgtgaacaacgacatctcctcctggacaaagggcagaagcggagaagctctgagcctcctgaagaaaagattctcccatagacccgtgcaggagaagttcgtgtgcctgaactgcggcttcgagacacacgcagccgagcaagccgccctgaacatcgccagatcctggctgttcctgcggagccaggagtacaagaaataccagacaaacaagacaaccggcaacaccgataagagagccttcgtcgagacctggcagtccttttaccggaagaagcttaaggaggtgtggaaacctgccgtgcggtctggcggatctggcggaggctccacaagcatggccttcgaggacgtggccgtgtacttcagccaggaggagtggggcctgctggacaccgcccagagggccctgtacaggagggtgatgctggacaacttcgccctggtggccagcctgggcctgagcaccagcaggcccagggtggtgatccagctggagaggggcgaggagccctgggtgcccagcggcaccgacaccaccctgagcaggaccacctacaggaggaggaaccccggcagcaccagccccaagaaaaagagaaaagtctaagctgccttctgcggggcttgccttctggccatgcccttcttctctcccttgcacctgtacctcttggtctttgaataaagcctgagtaggaaggctagcaaaaaaaaaaaaaaaaaaaaaaaaaaaaaaaaaaaaaaaaaaaaaaaaaaaaaaaaaaaaaaaaaaaaaaaaaaaaaaaa

SEQ ID NO: 2524 - RNA, 5419 nt, synthetic construct
  source 1..5419: mol_type = other RNA
aggaaataagagagaaaagaagagtaagaagaaatataagagccaccatggcccctaagaagaagcgtaaagtgagccgggtgaacggcagcggcagcggcggcggcatgaaccacgaccaggagttcgacccccctaaggtgtaccctcccgtccccgccgagaagagaaagcccatccgggtcctgagcctgttcgatggcatcgccaccggtctgctggtgctgaaggacctgggcatccaggtggataggtacattgcctccgaggtgtgcgaggactccatcaccgtgggaatggtgcgtcatcagggcaagatcatgtacgtgggcgacgtgcggagcgtgacacagaagcatatccaggagtggggccctttcgacctggtgatcggcggcagcccttgcaatgacctgagcatcgtgaacccagcccggaagggcctgtacgagggaaccggcagactgttcttcgagttttacagactgctgcacgacgcccggcctaaggaaggcgacgaccggcccttcttttggctgttcgagaatgtggtggccatgggagtcagcgacaagcgggatattagccggttcctggagagcaaccccgtgatgatcgatgccaaggaagtgagcgccgcccaccgggccagatacttctggggcaatctgcctggcatgaacagacccctggccagcaccgtgaacgacaagctggagctgcaggagtgcctggagcacggccggatcgccaagttcagcaaggtgagaaccatcaccacccgaagcaacagcatcaaacaaggcaaggaccagcactttcctgtgttcatgaacgagaaggaggacatcctgtggtgtaccgagatggagagagtgttcgggttcccagtccactacacagatgtcagcaacatgtctagactggccagacagagactgctgggaagaagctggtccgtccctgtgatcagacacctgttcgcccctctgaaggagtacttcgcctgcgtgagcagcggcaacagcaacgccaacagccggggccccagcttctctagcggcctggtgccactgtccctgagagggagccacatgggccccatggagatctacaaaaccgtgagcgcctggaagcggcagcctgtgcgcgtgctgagcctgtttcggaatatcgataaagtcctgaaaagcctgggattcctggagagcggctctggctccggcggtggcaccctgaagtacgtggaggatgtgacaaacgtggtcagacgggatgtggagaagtggggccccttcgatctggtgtacggcagcacccaacccctgggcagctcttgtgaccggtgccctggctggtacatgtttcagttccaccggatcctgcagtacgccctgccgagacaggagtcccagcggccattcttttggattttcatggacaacttgctgctgaccgaggatgaccaggaaactaccactcggttcctgcagaccgaagccgtgaccctgcaggacgtgagaggccgggactaccagaacgccatgcgggtgtggtccaacatccctggactgaaaagcaagcacgcacctctgacccctaaagaagaggagtacctgcaggcccaggtgcggagcagaagcaagctggacgcccctaaggtggatctgctggtgaagaattgcctcctgcccctgagagagtacttcaagtatttcagccagaatagtctgcccctgggcggcccaagcagcggcgcccctcctcccagcggcggcagcccagccggctccccaacctctaccgaggagggcacctctgagtccgccacccccgagagcggccctggcacctccaccgagcccagcgagggcagcgcacccggcagccctgccggcagccccacctccacagaggagggaaccagcaccgagcccagcgaaggcagcgccccaggcaccagcaccgagcctagtgagggcggctctggcggcggcagcgcccaggagattaaacggatcaacaagatcagaagaagacttgtgaaagacagcaacaccaagaaggccggcaagacaggccccatgaaaaccctgctggttagagtgatgacacccgatctgagagagcggctggaaaacctgagaaagaagcctgaaaatatcccccagcccatcagcaatacatctagagccaacctgaataagctgctgaccgattacaccgaaatgaagaaggcgatcctgcatgtgtactgggaagagttccagaaggaccctgtgggcctgatgagccgggtggcccagcctgccagcaagaagatcgatcagaacaagctgaaacctgagatggacgagaagggcaacctgaccaccgccggctttgcctgctctcagtgtggccagcccctgttcgtgtacaagctggagcaggtgtctgagaagggcaaggcttacaccaactacttcggacggtgcaatgtggccgagcacgaaaagctgatcctgctggcccagctgaagcccgagaaggatagcgacgaagccgtgacatatagcctgggaaagtttgggcagagggccctggatttctacagcattcatgtgaccaaggagtccacccaccccgtgaagcccctggcccagatcgccggaaacagatacgcctccggacctgtgggaaaggccctgagcgacgcatgtatgggcacaatcgcctccttcctgtctaagtaccaggacatcatcatcgaacaccagaaggtggtgaagggcaaccagaagagactggagagcctgcgggagctggccggcaaggaaaacctggaataccctagcgtgaccctgccacctcagcctcacaccaaggagggcgttgatgcctacaacgaagtgatcgcccgggtgcgaatgtgggtgaacctgaacctgtggcagaagctgaagctaagcagagatgatgccaagcctctgctgagactgaagggattcccttcctttcctctggtcgagagacaggccaacgaagtggactggtgggacatggtgtgtaacgtgaagaagctgatcaacgagaaaaaggaggatggcaaggtgttttggcagaatctggctggctacaagagacaggaagccctgagaccatacctgagcagcgaggaagatcggaagaagggaaagaaattcgctcggtaccagctgggcgacctgctgctgcacctggaaaagaagcacggcgaggactggggaaaggtgtacgacgaggcctgggagcggattgacaagaaagtggaaggcctgagcaagcacatcaagctggaagaggaacggagaagcgaggacgcccagagcaaggccgccctgaccgactggctgcgggctaaggccagcttcgtgatcgagggcctgaaggaggccgacaaggacgagttctgcagatgcgagctgaagctgcagaagtggtacggggacctgcggggaaagcccttcgccatcgaagccgagaacagcatcctggacatcagcggcttcagcaagcagtacaactgtgccttcatctggcagaaggacggcgtgaagaagctgaacctgtacctgatcatcaactacttcaagggcggcaagctgcggttcaagaagatcaaacctgaagccttcgaagccaacagattctacaccgtgatcaacaaaaagagcggcgagatcgtgcccatggaggtgaacttcaacttcgacgaccccaacctgatcatcctgcctctggcctttggcaagagacagggcagagaattcatctggaacgacctgctgtccctggaaaccggcagcctgaagctggccaacggaagagtgatcgagaagacactgtacaacagaagaacccggcaggatgagcctgccctgttcgtggccctgaccttcgagcggcgggaggtcctggactcctccaatatcaaaccaatgaacctgatcggcgtggcaagaggcgaaaacatccccgccgtgatcgccctgaccgaccccgagggctgcccactgagccggtttaaggatagcctgggaaacccaacccacatcctgagaatcggcgagagctataaggagaagcagcggaccatccaggccaagaaggaggtggagcagcggagagccggcggctacagccggaagtacgccagcaaagccaagaatctggcagacgatatggtgagaaacaccgctagagatctgctgtactacgccgtgacccaggatgccatgctgatcttcgccaacctgagccggggcttcggccggcagggcaagcggaccttcatggccgagagacagtacacacggatggaggactggctgaccgccaagctggcctacgagggcctgagcaagacctacctgtccaagacactggcccagtacacctccaagacatgcagcaactgtgggtttaccatcaccagcgccgactacgacagggtgctggagaagctgaagaagacagcaacaggctggatgaccacaattaacggcaaggagctgaaggtggagggccagattacctactacaacagatacaagagacagaacgtagtcaaggacctgtccgtcgagctggatagactgagcgaagaatctgtgaacaacgacatctcctcctggacaaagggcagaagcggagaagctctgagcctcctgaagaaaagattctcccatagacccgtgcaggagaagttcgtgtgcctgaactgcggcttcgagacacacgcagccgagcaagccgccctgaacatcgccagatcctggctgttcctgcggagccaggagtacaagaaataccagacaaacaagacaaccggcaacaccgataagagagccttcgtcgagacctggcagtccttttaccggaagaagcttaaggaggtgtggaaacctgccgtgcggtctggcggatctggcggaggctccacaagcagccagagcagcgtgaccttcggcgacgtggccgtggacttcagccaggacgagtgggcctggctggacgccacccagaggagcctgtacaggagcgtgatgctggagaactacaggaacctggtgagcctgggcctgtgcagcagcaagcccgacatgatcagcagcctggagcagaggaaggagccctggaccgtgaagaggaagctgcccggcggcggctgccccgacccccaggccgtgaccagccccaagaaaaagagaaaagtctaagctgccttctgcggggcttgccttctggccatgcccttcttctctcccttgcacctgtacctcttggtctttgaataaagcctgagtaggaaggctagcaaaaaaaaaaaaaaaaaaaaaaaaaaaaaaaaaaaaaaaaaaaaaaaaaaaaaaaaaaaaaaaaaaaaaaaaaaaaaaaa

SEQ ID NO: 2525 - RNA, 5419 nt, synthetic construct
  source 1..5419: mol_type = other RNA
aggaaataagagagaaaagaagagtaagaagaaatataagagccaccatggcccctaagaagaagcgtaaagtgagccgggtgaacggcagcggcagcggcggcggcatgaaccacgaccaggagttcgacccccctaaggtgtaccctcccgtccccgccgagaagagaaagcccatccgggtcctgagcctgttcgatggcatcgccaccggtctgctggtgctgaaggacctgggcatccaggtggataggtacattgcctccgaggtgtgcgaggactccatcaccgtgggaatggtgcgtcatcagggcaagatcatgtacgtgggcgacgtgcggagcgtgacacagaagcatatccaggagtggggccctttcgacctggtgatcggcggcagcccttgcaatgacctgagcatcgtgaacccagcccggaagggcctgtacgagggaaccggcagactgttcttcgagttttacagactgctgcacgacgcccggcctaaggaaggcgacgaccggcccttcttttggctgttcgagaatgtggtggccatgggagtcagcgacaagcgggatattagccggttcctggagagcaaccccgtgatgatcgatgccaaggaagtgagcgccgcccaccgggccagatacttctggggcaatctgcctggcatgaacagacccctggccagcaccgtgaacgacaagctggagctgcaggagtgcctggagcacggccggatcgccaagttcagcaaggtgagaaccatcaccacccgaagcaacagcatcaaacaaggcaaggaccagcactttcctgtgttcatgaacgagaaggaggacatcctgtggtgtaccgagatggagagagtgttcgggttcccagtccactacacagatgtcagcaacatgtctagactggccagacagagactgctgggaagaagctggtccgtccctgtgatcagacacctgttcgcccctctgaaggagtacttcgcctgcgtgagcagcggcaacagcaacgccaacagccggggccccagcttctctagcggcctggtgccactgtccctgagagggagccacatgggccccatggagatctacaaaaccgtgagcgcctggaagcggcagcctgtgcgcgtgctgagcctgtttcggaatatcgataaagtcctgaaaagcctgggattcctggagagcggctctggctccggcggtggcaccctgaagtacgtggaggatgtgacaaacgtggtcagacgggatgtggagaagtggggccccttcgatctggtgtacggcagcacccaacccctgggcagctcttgtgaccggtgccctggctggtacatgtttcagttccaccggatcctgcagtacgccctgccgagacaggagtcccagcggccattcttttggattttcatggacaacttgctgctgaccgaggatgaccaggaaactaccactcggttcctgcagaccgaagccgtgaccctgcaggacgtgagaggccgggactaccagaacgccatgcgggtgtggtccaacatccctggactgaaaagcaagcacgcacctctgacccctaaagaagaggagtacctgcaggcccaggtgcggagcagaagcaagctggacgcccctaaggtggatctgctggtgaagaattgcctcctgcccctgagagagtacttcaagtatttcagccagaatagtctgcccctgggcggcccaagcagcggcgcccctcctcccagcggcggcagcccagccggctccccaacctctaccgaggagggcacctctgagtccgccacccccgagagcggccctggcacctccaccgagcccagcgagggcagcgcacccggcagccctgccggcagccccacctccacagaggagggaaccagcaccgagcccagcgaaggcagcgccccaggcaccagcaccgagcctagtgagggcggctctggcggcggcagcgcccaggagattaaacggatcaacaagatcagaagaagacttgtgaaagacagcaacaccaagaaggccggcaagacaggccccatgaaaaccctgctggttagagtgatgacacccgatctgagagagcggctggaaaacctgagaaagaagcctgaaaatatcccccagcccatcagcaatacatctagagccaacctgaataagctgctgaccgattacaccgaaatgaagaaggcgatcctgcatgtgtactgggaagagttccagaaggaccctgtgggcctgatgagccgggtggcccagcctgccagcaagaagatcgatcagaacaagctgaaacctgagatggacgagaagggcaacctgaccaccgccggctttgcctgctctcagtgtggccagcccctgttcgtgtacaagctggagcaggtgtctgagaagggcaaggcttacaccaactacttcggacggtgcaatgtggccgagcacgaaaagctgatcctgctggcccagctgaagcccgagaaggatagcgacgaagccgtgacatatagcctgggaaagtttgggcagagggccctggatttctacagcattcatgtgaccaaggagtccacccaccccgtgaagcccctggcccagatcgccggaaacagatacgcctccggacctgtgggaaaggccctgagcgacgcatgtatgggcacaatcgcctccttcctgtctaagtaccaggacatcatcatcgaacaccagaaggtggtgaagggcaaccagaagagactggagagcctgcgggagctggccggcaaggaaaacctggaataccctagcgtgaccctgccacctcagcctcacaccaaggagggcgttgatgcctacaacgaagtgatcgcccgggtgcgaatgtgggtgaacctgaacctgtggcagaagctgaagctaagcagagatgatgccaagcctctgctgagactgaagggattcccttcctttcctctggtcgagagacaggccaacgaagtggactggtgggacatggtgtgtaacgtgaagaagctgatcaacgagaaaaaggaggatggcaaggtgttttggcagaatctggctggctacaagagacaggaagccctgagaccatacctgagcagcgaggaagatcggaagaagggaaagaaattcgctcggtaccagctgggcgacctgctgctgcacctggaaaagaagcacggcgaggactggggaaaggtgtacgacgaggcctgggagcggattgacaagaaagtggaaggcctgagcaagcacatcaagctggaagaggaacggagaagcgaggacgcccagagcaaggccgccctgaccgactggctgcgggctaaggccagcttcgtgatcgagggcctgaaggaggccgacaaggacgagttctgcagatgcgagctgaagctgcagaagtggtacggggacctgcggggaaagcccttcgccatcgaagccgagaacagcatcctggacatcagcggcttcagcaagcagtacaactgtgccttcatctggcagaaggacggcgtgaagaagctgaacctgtacctgatcatcaactacttcaagggcggcaagctgcggttcaagaagatcaaacctgaagccttcgaagccaacagattctacaccgtgatcaacaaaaagagcggcgagatcgtgcccatggaggtgaacttcaacttcgacgaccccaacctgatcatcctgcctctggcctttggcaagagacagggcagagaattcatctggaacgacctgctgtccctggaaaccggcagcctgaagctggccaacggaagagtgatcgagaagacactgtacaacagaagaacccggcaggatgagcctgccctgttcgtggccctgaccttcgagcggcgggaggtcctggactcctccaatatcaaaccaatgaacctgatcggcgtggcaagaggcgaaaacatccccgccgtgatcgccctgaccgaccccgagggctgcccactgagccggtttaaggatagcctgggaaacccaacccacatcctgagaatcggcgagagctataaggagaagcagcggaccatccaggccaagaaggaggtggagcagcggagagccggcggctacagccggaagtacgccagcaaagccaagaatctggcagacgatatggtgagaaacaccgctagagatctgctgtactacgccgtgacccaggatgccatgctgatcttcgccaacctgagccggggcttcggccggcagggcaagcggaccttcatggccgagagacagtacacacggatggaggactggctgaccgccaagctggcctacgagggcctgagcaagacctacctgtccaagacactggcccagtacacctccaagacatgcagcaactgtgggtttaccatcaccagcgccgactacgacagggtgctggagaagctgaagaagacagcaacaggctggatgaccacaattaacggcaaggagctgaaggtggagggccagattacctactacaacagatacaagagacagaacgtagtcaaggacctgtccgtcgagctggatagactgagcgaagaatctgtgaacaacgacatctcctcctggacaaagggcagaagcggagaagctctgagcctcctgaagaaaagattctcccatagacccgtgcaggagaagttcgtgtgcctgaactgcggcttcgagacacacgcagccgagcaagccgccctgaacatcgccagatcctggctgttcctgcggagccaggagtacaagaaataccagacaaacaagacaaccggcaacaccgataagagagccttcgtcgagacctggcagtccttttaccggaagaagcttaaggaggtgtggaaacctgccgtgcggtctggcggatctggcggaggctccacaagcagccagggcagcgtgaccttcagggacgtggccatcgacttcagccaggaggagtggaagtggctgcagcccgcccagagggacctgtacaggagggtgatgctggagaactacggccacctggtgagcctgggcctgagcatcagcaagcccgacgtggtgagcctgctggagcagggcaaggagccctggctgggcaagaggaacgtgaagagggacctgttcagcgccagcgagagcagcaccagccccaagaaaaagagaaaagtctaagctgccttctgcggggcttgccttctggccatgcccttcttctctcccttgcacctgtacctcttggtctttgaataaagcctgagtaggaaggctagcaaaaaaaaaaaaaaaaaaaaaaaaaaaaaaaaaaaaaaaaaaaaaaaaaaaaaaaaaaaaaaaaaaaaaaaaaaaaaaaa

SEQ ID NO: 2526 - RNA, 5419 nt, synthetic construct
  source 1..5419: mol_type = other RNA
aggaaataagagagaaaagaagagtaagaagaaatataagagccaccatggcccctaagaagaagcgtaaagtgagccgggtgaacggcagcggcagcggcggcggcatgaaccacgaccaggagttcgacccccctaaggtgtaccctcccgtccccgccgagaagagaaagcccatccgggtcctgagcctgttcgatggcatcgccaccggtctgctggtgctgaaggacctgggcatccaggtggataggtacattgcctccgaggtgtgcgaggactccatcaccgtgggaatggtgcgtcatcagggcaagatcatgtacgtgggcgacgtgcggagcgtgacacagaagcatatccaggagtggggccctttcgacctggtgatcggcggcagcccttgcaatgacctgagcatcgtgaacccagcccggaagggcctgtacgagggaaccggcagactgttcttcgagttttacagactgctgcacgacgcccggcctaaggaaggcgacgaccggcccttcttttggctgttcgagaatgtggtggccatgggagtcagcgacaagcgggatattagccggttcctggagagcaaccccgtgatgatcgatgccaaggaagtgagcgccgcccaccgggccagatacttctggggcaatctgcctggcatgaacagacccctggccagcaccgtgaacgacaagctggagctgcaggagtgcctggagcacggccggatcgccaagttcagcaaggtgagaaccatcaccacccgaagcaacagcatcaaacaaggcaaggaccagcactttcctgtgttcatgaacgagaaggaggacatcctgtggtgtaccgagatggagagagtgttcgggttcccagtccactacacagatgtcagcaacatgtctagactggccagacagagactgctgggaagaagctggtccgtccctgtgatcagacacctgttcgcccctctgaaggagtacttcgcctgcgtgagcagcggcaacagcaacgccaacagccggggccccagcttctctagcggcctggtgccactgtccctgagagggagccacatgggccccatggagatctacaaaaccgtgagcgcctggaagcggcagcctgtgcgcgtgctgagcctgtttcggaatatcgataaagtcctgaaaagcctgggattcctggagagcggctctggctccggcggtggcaccctgaagtacgtggaggatgtgacaaacgtggtcagacgggatgtggagaagtggggccccttcgatctggtgtacggcagcacccaacccctgggcagctcttgtgaccggtgccctggctggtacatgtttcagttccaccggatcctgcagtacgccctgccgagacaggagtcccagcggccattcttttggattttcatggacaacttgctgctgaccgaggatgaccaggaaactaccactcggttcctgcagaccgaagccgtgaccctgcaggacgtgagaggccgggactaccagaacgccatgcgggtgtggtccaacatccctggactgaaaagcaagcacgcacctctgacccctaaagaagaggagtacctgcaggcccaggtgcggagcagaagcaagctggacgcccctaaggtggatctgctggtgaagaattgcctcctgcccctgagagagtacttcaagtatttcagccagaatagtctgcccctgggcggcccaagcagcggcgcccctcctcccagcggcggcagcccagccggctccccaacctctaccgaggagggcacctctgagtccgccacccccgagagcggccctggcacctccaccgagcccagcgagggcagcgcacccggcagccctgccggcagccccacctccacagaggagggaaccagcaccgagcccagcgaaggcagcgccccaggcaccagcaccgagcctagtgagggcggctctggcggcggcagcgcccaggagattaaacggatcaacaagatcagaagaagacttgtgaaagacagcaacaccaagaaggccggcaagacaggccccatgaaaaccctgctggttagagtgatgacacccgatctgagagagcggctggaaaacctgagaaagaagcctgaaaatatcccccagcccatcagcaatacatctagagccaacctgaataagctgctgaccgattacaccgaaatgaagaaggcgatcctgcatgtgtactgggaagagttccagaaggaccctgtgggcctgatgagccgggtggcccagcctgccagcaagaagatcgatcagaacaagctgaaacctgagatggacgagaagggcaacctgaccaccgccggctttgcctgctctcagtgtggccagcccctgttcgtgtacaagctggagcaggtgtctgagaagggcaaggcttacaccaactacttcggacggtgcaatgtggccgagcacgaaaagctgatcctgctggcccagctgaagcccgagaaggatagcgacgaagccgtgacatatagcctgggaaagtttgggcagagggccctggatttctacagcattcatgtgaccaaggagtccacccaccccgtgaagcccctggcccagatcgccggaaacagatacgcctccggacctgtgggaaaggccctgagcgacgcatgtatgggcacaatcgcctccttcctgtctaagtaccaggacatcatcatcgaacaccagaaggtggtgaagggcaaccagaagagactggagagcctgcgggagctggccggcaaggaaaacctggaataccctagcgtgaccctgccacctcagcctcacaccaaggagggcgttgatgcctacaacgaagtgatcgcccgggtgcgaatgtgggtgaacctgaacctgtggcagaagctgaagctaagcagagatgatgccaagcctctgctgagactgaagggattcccttcctttcctctggtcgagagacaggccaacgaagtggactggtgggacatggtgtgtaacgtgaagaagctgatcaacgagaaaaaggaggatggcaaggtgttttggcagaatctggctggctacaagagacaggaagccctgagaccatacctgagcagcgaggaagatcggaagaagggaaagaaattcgctcggtaccagctgggcgacctgctgctgcacctggaaaagaagcacggcgaggactggggaaaggtgtacgacgaggcctgggagcggattgacaagaaagtggaaggcctgagcaagcacatcaagctggaagaggaacggagaagcgaggacgcccagagcaaggccgccctgaccgactggctgcgggctaaggccagcttcgtgatcgagggcctgaaggaggccgacaaggacgagttctgcagatgcgagctgaagctgcagaagtggtacggggacctgcggggaaagcccttcgccatcgaagccgagaacagcatcctggacatcagcggcttcagcaagcagtacaactgtgccttcatctggcagaaggacggcgtgaagaagctgaacctgtacctgatcatcaactacttcaagggcggcaagctgcggttcaagaagatcaaacctgaagccttcgaagccaacagattctacaccgtgatcaacaaaaagagcggcgagatcgtgcccatggaggtgaacttcaacttcgacgaccccaacctgatcatcctgcctctggcctttggcaagagacagggcagagaattcatctggaacgacctgctgtccctggaaaccggcagcctgaagctggccaacggaagagtgatcgagaagacactgtacaacagaagaacccggcaggatgagcctgccctgttcgtggccctgaccttcgagcggcgggaggtcctggactcctccaatatcaaaccaatgaacctgatcggcgtggcaagaggcgaaaacatccccgccgtgatcgccctgaccgaccccgagggctgcccactgagccggtttaaggatagcctgggaaacccaacccacatcctgagaatcggcgagagctataaggagaagcagcggaccatccaggccaagaaggaggtggagcagcggagagccggcggctacagccggaagtacgccagcaaagccaagaatctggcagacgatatggtgagaaacaccgctagagatctgctgtactacgccgtgacccaggatgccatgctgatcttcgccaacctgagccggggcttcggccggcagggcaagcggaccttcatggccgagagacagtacacacggatggaggactggctgaccgccaagctggcctacgagggcctgagcaagacctacctgtccaagacactggcccagtacacctccaagacatgcagcaactgtgggtttaccatcaccagcgccgactacgacagggtgctggagaagctgaagaagacagcaacaggctggatgaccacaattaacggcaaggagctgaaggtggagggccagattacctactacaacagatacaagagacagaacgtagtcaaggacctgtccgtcgagctggatagactgagcgaagaatctgtgaacaacgacatctcctcctggacaaagggcagaagcggagaagctctgagcctcctgaagaaaagattctcccatagacccgtgcaggagaagttcgtgtgcctgaactgcggcttcgagacacacgcagccgagcaagccgccctgaacatcgccagatcctggctgttcctgcggagccaggagtacaagaaataccagacaaacaagacaaccggcaacaccgataagagagccttcgtcgagacctggcagtccttttaccggaagaagcttaaggaggtgtggaaacctgccgtgcggtctggcggatctggcggaggctccacaagcatggccttcgaggacgtggccgtgtacttcagccaggaggagtggggcctgctggacaccgcccagagggccctgtacaggagggtgatgctggacaacttcgccctggtggccagcctgggcctgagcaccaccaggcccagggtggtgatccagctggagaggggcgaggagccctgggtgcccagcggcaccgacatgaccatgagcaggaacgcccacaggaggaggaaccccggcagcaccagccccaagaaaaagagaaaagtctaagctgccttctgcggggcttgccttctggccatgcccttcttctctcccttgcacctgtacctcttggtctttgaataaagcctgagtaggaaggctagcaaaaaaaaaaaaaaaaaaaaaaaaaaaaaaaaaaaaaaaaaaaaaaaaaaaaaaaaaaaaaaaaaaaaaaaaaaaaaaaa

SEQ ID NO: 2527 - RNA, 5419 nt, synthetic construct
  source 1..5419: mol_type = other RNA
aggaaataagagagaaaagaagagtaagaagaaatataagagccaccatggcccctaagaagaagcgtaaagtgagccgggtgaacggcagcggcagcggcggcggcatgaaccacgaccaggagttcgacccccctaaggtgtaccctcccgtccccgccgagaagagaaagcccatccgggtcctgagcctgttcgatggcatcgccaccggtctgctggtgctgaaggacctgggcatccaggtggataggtacattgcctccgaggtgtgcgaggactccatcaccgtgggaatggtgcgtcatcagggcaagatcatgtacgtgggcgacgtgcggagcgtgacacagaagcatatccaggagtggggccctttcgacctggtgatcggcggcagcccttgcaatgacctgagcatcgtgaacccagcccggaagggcctgtacgagggaaccggcagactgttcttcgagttttacagactgctgcacgacgcccggcctaaggaaggcgacgaccggcccttcttttggctgttcgagaatgtggtggccatgggagtcagcgacaagcgggatattagccggttcctggagagcaaccccgtgatgatcgatgccaaggaagtgagcgccgcccaccgggccagatacttctggggcaatctgcctggcatgaacagacccctggccagcaccgtgaacgacaagctggagctgcaggagtgcctggagcacggccggatcgccaagttcagcaaggtgagaaccatcaccacccgaagcaacagcatcaaacaaggcaaggaccagcactttcctgtgttcatgaacgagaaggaggacatcctgtggtgtaccgagatggagagagtgttcgggttcccagtccactacacagatgtcagcaacatgtctagactggccagacagagactgctgggaagaagctggtccgtccctgtgatcagacacctgttcgcccctctgaaggagtacttcgcctgcgtgagcagcggcaacagcaacgccaacagccggggccccagcttctctagcggcctggtgccactgtccctgagagggagccacatgggccccatggagatctacaaaaccgtgagcgcctggaagcggcagcctgtgcgcgtgctgagcctgtttcggaatatcgataaagtcctgaaaagcctgggattcctggagagcggctctggctccggcggtggcaccctgaagtacgtggaggatgtgacaaacgtggtcagacgggatgtggagaagtggggccccttcgatctggtgtacggcagcacccaacccctgggcagctcttgtgaccggtgccctggctggtacatgtttcagttccaccggatcctgcagtacgccctgccgagacaggagtcccagcggccattcttttggattttcatggacaacttgctgctgaccgaggatgaccaggaaactaccactcggttcctgcagaccgaagccgtgaccctgcaggacgtgagaggccgggactaccagaacgccatgcgggtgtggtccaacatccctggactgaaaagcaagcacgcacctctgacccctaaagaagaggagtacctgcaggcccaggtgcggagcagaagcaagctggacgcccctaaggtggatctgctggtgaagaattgcctcctgcccctgagagagtacttcaagtatttcagccagaatagtctgcccctgggcggcccaagcagcggcgcccctcctcccagcggcggcagcccagccggctccccaacctctaccgaggagggcacctctgagtccgccacccccgagagcggccctggcacctccaccgagcccagcgagggcagcgcacccggcagccctgccggcagccccacctccacagaggagggaaccagcaccgagcccagcgaaggcagcgccccaggcaccagcaccgagcctagtgagggcggctctggcggcggcagcgcccaggagattaaacggatcaacaagatcagaagaagacttgtgaaagacagcaacaccaagaaggccggcaagacaggccccatgaaaaccctgctggttagagtgatgacacccgatctgagagagcggctggaaaacctgagaaagaagcctgaaaatatcccccagcccatcagcaatacatctagagccaacctgaataagctgctgaccgattacaccgaaatgaagaaggcgatcctgcatgtgtactgggaagagttccagaaggaccctgtgggcctgatgagccgggtggcccagcctgccagcaagaagatcgatcagaacaagctgaaacctgagatggacgagaagggcaacctgaccaccgccggctttgcctgctctcagtgtggccagcccctgttcgtgtacaagctggagcaggtgtctgagaagggcaaggcttacaccaactacttcggacggtgcaatgtggccgagcacgaaaagctgatcctgctggcccagctgaagcccgagaaggatagcgacgaagccgtgacatatagcctgggaaagtttgggcagagggccctggatttctacagcattcatgtgaccaaggagtccacccaccccgtgaagcccctggcccagatcgccggaaacagatacgcctccggacctgtgggaaaggccctgagcgacgcatgtatgggcacaatcgcctccttcctgtctaagtaccaggacatcatcatcgaacaccagaaggtggtgaagggcaaccagaagagactggagagcctgcgggagctggccggcaaggaaaacctggaataccctagcgtgaccctgccacctcagcctcacaccaaggagggcgttgatgcctacaacgaagtgatcgcccgggtgcgaatgtgggtgaacctgaacctgtggcagaagctgaagctaagcagagatgatgccaagcctctgctgagactgaagggattcccttcctttcctctggtcgagagacaggccaacgaagtggactggtgggacatggtgtgtaacgtgaagaagctgatcaacgagaaaaaggaggatggcaaggtgttttggcagaatctggctggctacaagagacaggaagccctgagaccatacctgagcagcgaggaagatcggaagaagggaaagaaattcgctcggtaccagctgggcgacctgctgctgcacctggaaaagaagcacggcgaggactggggaaaggtgtacgacgaggcctgggagcggattgacaagaaagtggaaggcctgagcaagcacatcaagctggaagaggaacggagaagcgaggacgcccagagcaaggccgccctgaccgactggctgcgggctaaggccagcttcgtgatcgagggcctgaaggaggccgacaaggacgagttctgcagatgcgagctgaagctgcagaagtggtacggggacctgcggggaaagcccttcgccatcgaagccgagaacagcatcctggacatcagcggcttcagcaagcagtacaactgtgccttcatctggcagaaggacggcgtgaagaagctgaacctgtacctgatcatcaactacttcaagggcggcaagctgcggttcaagaagatcaaacctgaagccttcgaagccaacagattctacaccgtgatcaacaaaaagagcggcgagatcgtgcccatggaggtgaacttcaacttcgacgaccccaacctgatcatcctgcctctggcctttggcaagagacagggcagagaattcatctggaacgacctgctgtccctggaaaccggcagcctgaagctggccaacggaagagtgatcgagaagacactgtacaacagaagaacccggcaggatgagcctgccctgttcgtggccctgaccttcgagcggcgggaggtcctggactcctccaatatcaaaccaatgaacctgatcggcgtggcaagaggcgaaaacatccccgccgtgatcgccctgaccgaccccgagggctgcccactgagccggtttaaggatagcctgggaaacccaacccacatcctgagaatcggcgagagctataaggagaagcagcggaccatccaggccaagaaggaggtggagcagcggagagccggcggctacagccggaagtacgccagcaaagccaagaatctggcagacgatatggtgagaaacaccgctagagatctgctgtactacgccgtgacccaggatgccatgctgatcttcgccaacctgagccggggcttcggccggcagggcaagcggaccttcatggccgagagacagtacacacggatggaggactggctgaccgccaagctggcctacgagggcctgagcaagacctacctgtccaagacactggcccagtacacctccaagacatgcagcaactgtgggtttaccatcaccagcgccgactacgacagggtgctggagaagctgaagaagacagcaacaggctggatgaccacaattaacggcaaggagctgaaggtggagggccagattacctactacaacagatacaagagacagaacgtagtcaaggacctgtccgtcgagctggatagactgagcgaagaatctgtgaacaacgacatctcctcctggacaaagggcagaagcggagaagctctgagcctcctgaagaaaagattctcccatagacccgtgcaggagaagttcgtgtgcctgaactgcggcttcgagacacacgcagccgagcaagccgccctgaacatcgccagatcctggctgttcctgcggagccaggagtacaagaaataccagacaaacaagacaaccggcaacaccgataagagagccttcgtcgagacctggcagtccttttaccggaagaagcttaaggaggtgtggaaacctgccgtgcggtctggcggatctggcggaggctccacaagcaagcccggcgccgtgagcttcgccgacgtggccgtgtacttcagccccgaggagtggggctgcctgaggcccgcccagagggccctgtacagggacgtgatgagggagacctacggccacctgggcgccctgggcttccccggccccaagcccgccctgatcagctggatggagcaggagagcgaggcctggagcagcgccgcccaggaccccgagaagggcgagaacctgggcggcgccaggaccagccccaagaaaaagagaaaagtctaagctgccttctgcggggcttgccttctggccatgcccttcttctctcccttgcacctgtacctcttggtctttgaataaagcctgagtaggaaggctagcaaaaaaaaaaaaaaaaaaaaaaaaaaaaaaaaaaaaaaaaaaaaaaaaaaaaaaaaaaaaaaaaaaaaaaaaaaaaaaaa

SEQ ID NO: 2528 - RNA, 5419 nt, synthetic construct
  source 1..5419: mol_type = other RNA
aggaaataagagagaaaagaagagtaagaagaaatataagagccaccatggcccctaagaagaagcgtaaagtgagccgggtgaacggcagcggcagcggcggcggcatgaaccacgaccaggagttcgacccccctaaggtgtaccctcccgtccccgccgagaagagaaagcccatccgggtcctgagcctgttcgatggcatcgccaccggtctgctggtgctgaaggacctgggcatccaggtggataggtacattgcctccgaggtgtgcgaggactccatcaccgtgggaatggtgcgtcatcagggcaagatcatgtacgtgggcgacgtgcggagcgtgacacagaagcatatccaggagtggggccctttcgacctggtgatcggcggcagcccttgcaatgacctgagcatcgtgaacccagcccggaagggcctgtacgagggaaccggcagactgttcttcgagttttacagactgctgcacgacgcccggcctaaggaaggcgacgaccggcccttcttttggctgttcgagaatgtggtggccatgggagtcagcgacaagcgggatattagccggttcctggagagcaaccccgtgatgatcgatgccaaggaagtgagcgccgcccaccgggccagatacttctggggcaatctgcctggcatgaacagacccctggccagcaccgtgaacgacaagctggagctgcaggagtgcctggagcacggccggatcgccaagttcagcaaggtgagaaccatcaccacccgaagcaacagcatcaaacaaggcaaggaccagcactttcctgtgttcatgaacgagaaggaggacatcctgtggtgtaccgagatggagagagtgttcgggttcccagtccactacacagatgtcagcaacatgtctagactggccagacagagactgctgggaagaagctggtccgtccctgtgatcagacacctgttcgcccctctgaaggagtacttcgcctgcgtgagcagcggcaacagcaacgccaacagccggggccccagcttctctagcggcctggtgccactgtccctgagagggagccacatgggccccatggagatctacaaaaccgtgagcgcctggaagcggcagcctgtgcgcgtgctgagcctgtttcggaatatcgataaagtcctgaaaagcctgggattcctggagagcggctctggctccggcggtggcaccctgaagtacgtggaggatgtgacaaacgtggtcagacgggatgtggagaagtggggccccttcgatctggtgtacggcagcacccaacccctgggcagctcttgtgaccggtgccctggctggtacatgtttcagttccaccggatcctgcagtacgccctgccgagacaggagtcccagcggccattcttttggattttcatggacaacttgctgctgaccgaggatgaccaggaaactaccactcggttcctgcagaccgaagccgtgaccctgcaggacgtgagaggccgggactaccagaacgccatgcgggtgtggtccaacatccctggactgaaaagcaagcacgcacctctgacccctaaagaagaggagtacctgcaggcccaggtgcggagcagaagcaagctggacgcccctaaggtggatctgctggtgaagaattgcctcctgcccctgagagagtacttcaagtatttcagccagaatagtctgcccctgggcggcccaagcagcggcgcccctcctcccagcggcggcagcccagccggctccccaacctctaccgaggagggcacctctgagtccgccacccccgagagcggccctggcacctccaccgagcccagcgagggcagcgcacccggcagccctgccggcagccccacctccacagaggagggaaccagcaccgagcccagcgaaggcagcgccccaggcaccagcaccgagcctagtgagggcggctctggcggcggcagcgcccaggagattaaacggatcaacaagatcagaagaagacttgtgaaagacagcaacaccaagaaggccggcaagacaggccccatgaaaaccctgctggttagagtgatgacacccgatctgagagagcggctggaaaacctgagaaagaagcctgaaaatatcccccagcccatcagcaatacatctagagccaacctgaataagctgctgaccgattacaccgaaatgaagaaggcgatcctgcatgtgtactgggaagagttccagaaggaccctgtgggcctgatgagccgggtggcccagcctgccagcaagaagatcgatcagaacaagctgaaacctgagatggacgagaagggcaacctgaccaccgccggctttgcctgctctcagtgtggccagcccctgttcgtgtacaagctggagcaggtgtctgagaagggcaaggcttacaccaactacttcggacggtgcaatgtggccgagcacgaaaagctgatcctgctggcccagctgaagcccgagaaggatagcgacgaagccgtgacatatagcctgggaaagtttgggcagagggccctggatttctacagcattcatgtgaccaaggagtccacccaccccgtgaagcccctggcccagatcgccggaaacagatacgcctccggacctgtgggaaaggccctgagcgacgcatgtatgggcacaatcgcctccttcctgtctaagtaccaggacatcatcatcgaacaccagaaggtggtgaagggcaaccagaagagactggagagcctgcgggagctggccggcaaggaaaacctggaataccctagcgtgaccctgccacctcagcctcacaccaaggagggcgttgatgcctacaacgaagtgatcgcccgggtgcgaatgtgggtgaacctgaacctgtggcagaagctgaagctaagcagagatgatgccaagcctctgctgagactgaagggattcccttcctttcctctggtcgagagacaggccaacgaagtggactggtgggacatggtgtgtaacgtgaagaagctgatcaacgagaaaaaggaggatggcaaggtgttttggcagaatctggctggctacaagagacaggaagccctgagaccatacctgagcagcgaggaagatcggaagaagggaaagaaattcgctcggtaccagctgggcgacctgctgctgcacctggaaaagaagcacggcgaggactggggaaaggtgtacgacgaggcctgggagcggattgacaagaaagtggaaggcctgagcaagcacatcaagctggaagaggaacggagaagcgaggacgcccagagcaaggccgccctgaccgactggctgcgggctaaggccagcttcgtgatcgagggcctgaaggaggccgacaaggacgagttctgcagatgcgagctgaagctgcagaagtggtacggggacctgcggggaaagcccttcgccatcgaagccgagaacagcatcctggacatcagcggcttcagcaagcagtacaactgtgccttcatctggcagaaggacggcgtgaagaagctgaacctgtacctgatcatcaactacttcaagggcggcaagctgcggttcaagaagatcaaacctgaagccttcgaagccaacagattctacaccgtgatcaacaaaaagagcggcgagatcgtgcccatggaggtgaacttcaacttcgacgaccccaacctgatcatcctgcctctggcctttggcaagagacagggcagagaattcatctggaacgacctgctgtccctggaaaccggcagcctgaagctggccaacggaagagtgatcgagaagacactgtacaacagaagaacccggcaggatgagcctgccctgttcgtggccctgaccttcgagcggcgggaggtcctggactcctccaatatcaaaccaatgaacctgatcggcgtggcaagaggcgaaaacatccccgccgtgatcgccctgaccgaccccgagggctgcccactgagccggtttaaggatagcctgggaaacccaacccacatcctgagaatcggcgagagctataaggagaagcagcggaccatccaggccaagaaggaggtggagcagcggagagccggcggctacagccggaagtacgccagcaaagccaagaatctggcagacgatatggtgagaaacaccgctagagatctgctgtactacgccgtgacccaggatgccatgctgatcttcgccaacctgagccggggcttcggccggcagggcaagcggaccttcatggccgagagacagtacacacggatggaggactggctgaccgccaagctggcctacgagggcctgagcaagacctacctgtccaagacactggcccagtacacctccaagacatgcagcaactgtgggtttaccatcaccagcgccgactacgacagggtgctggagaagctgaagaagacagcaacaggctggatgaccacaattaacggcaaggagctgaaggtggagggccagattacctactacaacagatacaagagacagaacgtagtcaaggacctgtccgtcgagctggatagactgagcgaagaatctgtgaacaacgacatctcctcctggacaaagggcagaagcggagaagctctgagcctcctgaagaaaagattctcccatagacccgtgcaggagaagttcgtgtgcctgaactgcggcttcgagacacacgcagccgagcaagccgccctgaacatcgccagatcctggctgttcctgcggagccaggagtacaagaaataccagacaaacaagacaaccggcaacaccgataagagagccttcgtcgagacctggcagtccttttaccggaagaagcttaaggaggtgtggaaacctgccgtgcggtctggcggatctggcggaggctccacaagcaagcccggcgccgtgagcttcgccgacgtggccgtgtacttcagccccgaggagtggggctgcctgaggcccgcccagagggccctgtacagggacgtgatgagggagacctacggccacctgggcgccctgggcttccccggccccaagcccgccctgatcagctggatggagcaggagagcgaggcctggagccccgccgcccaggaccccgagaagggcgagaggctgggcggcgccaggaccagccccaagaaaaagagaaaagtctaagctgccttctgcggggcttgccttctggccatgcccttcttctctcccttgcacctgtacctcttggtctttgaataaagcctgagtaggaaggctagcaaaaaaaaaaaaaaaaaaaaaaaaaaaaaaaaaaaaaaaaaaaaaaaaaaaaaaaaaaaaaaaaaaaaaaaaaaaaaaaa

SEQ ID NO: 2529 - RNA, 5419 nt, synthetic construct
  source 1..5419: mol_type = other RNA
aggaaataagagagaaaagaagagtaagaagaaatataagagccaccatggcccctaagaagaagcgtaaagtgagccgggtgaacggcagcggcagcggcggcggcatgaaccacgaccaggagttcgacccccctaaggtgtaccctcccgtccccgccgagaagagaaagcccatccgggtcctgagcctgttcgatggcatcgccaccggtctgctggtgctgaaggacctgggcatccaggtggataggtacattgcctccgaggtgtgcgaggactccatcaccgtgggaatggtgcgtcatcagggcaagatcatgtacgtgggcgacgtgcggagcgtgacacagaagcatatccaggagtggggccctttcgacctggtgatcggcggcagcccttgcaatgacctgagcatcgtgaacccagcccggaagggcctgtacgagggaaccggcagactgttcttcgagttttacagactgctgcacgacgcccggcctaaggaaggcgacgaccggcccttcttttggctgttcgagaatgtggtggccatgggagtcagcgacaagcgggatattagccggttcctggagagcaaccccgtgatgatcgatgccaaggaagtgagcgccgcccaccgggccagatacttctggggcaatctgcctggcatgaacagacccctggccagcaccgtgaacgacaagctggagctgcaggagtgcctggagcacggccggatcgccaagttcagcaaggtgagaaccatcaccacccgaagcaacagcatcaaacaaggcaaggaccagcactttcctgtgttcatgaacgagaaggaggacatcctgtggtgtaccgagatggagagagtgttcgggttcccagtccactacacagatgtcagcaacatgtctagactggccagacagagactgctgggaagaagctggtccgtccctgtgatcagacacctgttcgcccctctgaaggagtacttcgcctgcgtgagcagcggcaacagcaacgccaacagccggggccccagcttctctagcggcctggtgccactgtccctgagagggagccacatgggccccatggagatctacaaaaccgtgagcgcctggaagcggcagcctgtgcgcgtgctgagcctgtttcggaatatcgataaagtcctgaaaagcctgggattcctggagagcggctctggctccggcggtggcaccctgaagtacgtggaggatgtgacaaacgtggtcagacgggatgtggagaagtggggccccttcgatctggtgtacggcagcacccaacccctgggcagctcttgtgaccggtgccctggctggtacatgtttcagttccaccggatcctgcagtacgccctgccgagacaggagtcccagcggccattcttttggattttcatggacaacttgctgctgaccgaggatgaccaggaaactaccactcggttcctgcagaccgaagccgtgaccctgcaggacgtgagaggccgggactaccagaacgccatgcgggtgtggtccaacatccctggactgaaaagcaagcacgcacctctgacccctaaagaagaggagtacctgcaggcccaggtgcggagcagaagcaagctggacgcccctaaggtggatctgctggtgaagaattgcctcctgcccctgagagagtacttcaagtatttcagccagaatagtctgcccctgggcggcccaagcagcggcgcccctcctcccagcggcggcagcccagccggctccccaacctctaccgaggagggcacctctgagtccgccacccccgagagcggccctggcacctccaccgagcccagcgagggcagcgcacccggcagccctgccggcagccccacctccacagaggagggaaccagcaccgagcccagcgaaggcagcgccccaggcaccagcaccgagcctagtgagggcggctctggcggcggcagcgcccaggagattaaacggatcaacaagatcagaagaagacttgtgaaagacagcaacaccaagaaggccggcaagacaggccccatgaaaaccctgctggttagagtgatgacacccgatctgagagagcggctggaaaacctgagaaagaagcctgaaaatatcccccagcccatcagcaatacatctagagccaacctgaataagctgctgaccgattacaccgaaatgaagaaggcgatcctgcatgtgtactgggaagagttccagaaggaccctgtgggcctgatgagccgggtggcccagcctgccagcaagaagatcgatcagaacaagctgaaacctgagatggacgagaagggcaacctgaccaccgccggctttgcctgctctcagtgtggccagcccctgttcgtgtacaagctggagcaggtgtctgagaagggcaaggcttacaccaactacttcggacggtgcaatgtggccgagcacgaaaagctgatcctgctggcccagctgaagcccgagaaggatagcgacgaagccgtgacatatagcctgggaaagtttgggcagagggccctggatttctacagcattcatgtgaccaaggagtccacccaccccgtgaagcccctggcccagatcgccggaaacagatacgcctccggacctgtgggaaaggccctgagcgacgcatgtatgggcacaatcgcctccttcctgtctaagtaccaggacatcatcatcgaacaccagaaggtggtgaagggcaaccagaagagactggagagcctgcgggagctggccggcaaggaaaacctggaataccctagcgtgaccctgccacctcagcctcacaccaaggagggcgttgatgcctacaacgaagtgatcgcccgggtgcgaatgtgggtgaacctgaacctgtggcagaagctgaagctaagcagagatgatgccaagcctctgctgagactgaagggattcccttcctttcctctggtcgagagacaggccaacgaagtggactggtgggacatggtgtgtaacgtgaagaagctgatcaacgagaaaaaggaggatggcaaggtgttttggcagaatctggctggctacaagagacaggaagccctgagaccatacctgagcagcgaggaagatcggaagaagggaaagaaattcgctcggtaccagctgggcgacctgctgctgcacctggaaaagaagcacggcgaggactggggaaaggtgtacgacgaggcctgggagcggattgacaagaaagtggaaggcctgagcaagcacatcaagctggaagaggaacggagaagcgaggacgcccagagcaaggccgccctgaccgactggctgcgggctaaggccagcttcgtgatcgagggcctgaaggaggccgacaaggacgagttctgcagatgcgagctgaagctgcagaagtggtacggggacctgcggggaaagcccttcgccatcgaagccgagaacagcatcctggacatcagcggcttcagcaagcagtacaactgtgccttcatctggcagaaggacggcgtgaagaagctgaacctgtacctgatcatcaactacttcaagggcggcaagctgcggttcaagaagatcaaacctgaagccttcgaagccaacagattctacaccgtgatcaacaaaaagagcggcgagatcgtgcccatggaggtgaacttcaacttcgacgaccccaacctgatcatcctgcctctggcctttggcaagagacagggcagagaattcatctggaacgacctgctgtccctggaaaccggcagcctgaagctggccaacggaagagtgatcgagaagacactgtacaacagaagaacccggcaggatgagcctgccctgttcgtggccctgaccttcgagcggcgggaggtcctggactcctccaatatcaaaccaatgaacctgatcggcgtggcaagaggcgaaaacatccccgccgtgatcgccctgaccgaccccgagggctgcccactgagccggtttaaggatagcctgggaaacccaacccacatcctgagaatcggcgagagctataaggagaagcagcggaccatccaggccaagaaggaggtggagcagcggagagccggcggctacagccggaagtacgccagcaaagccaagaatctggcagacgatatggtgagaaacaccgctagagatctgctgtactacgccgtgacccaggatgccatgctgatcttcgccaacctgagccggggcttcggccggcagggcaagcggaccttcatggccgagagacagtacacacggatggaggactggctgaccgccaagctggcctacgagggcctgagcaagacctacctgtccaagacactggcccagtacacctccaagacatgcagcaactgtgggtttaccatcaccagcgccgactacgacagggtgctggagaagctgaagaagacagcaacaggctggatgaccacaattaacggcaaggagctgaaggtggagggccagattacctactacaacagatacaagagacagaacgtagtcaaggacctgtccgtcgagctggatagactgagcgaagaatctgtgaacaacgacatctcctcctggacaaagggcagaagcggagaagctctgagcctcctgaagaaaagattctcccatagacccgtgcaggagaagttcgtgtgcctgaactgcggcttcgagacacacgcagccgagcaagccgccctgaacatcgccagatcctggctgttcctgcggagccaggagtacaagaaataccagacaaacaagacaaccggcaacaccgataagagagccttcgtcgagacctggcagtccttttaccggaagaagcttaaggaggtgtggaaacctgccgtgcggtctggcggatctggcggaggctccacaagcatggtgagcttcgaggacgtggccgtgctgctgagccaggaggagtgggactgcctgatccccgcccagaggggcctgtacagggacgtgatgctggagacctacggcaacctggtgagcctgggcctgcaggccagcaagcccgacgtgatcagcaggctggagcagggcgacgagccctggaccacccacaccctgaggatgcagggcagctggagctggaggcacaagagggagggctgcaccagccccaagaaaaagagaaaagtctaagctgccttctgcggggcttgccttctggccatgcccttcttctctcccttgcacctgtacctcttggtctttgaataaagcctgagtaggaaggctagcaaaaaaaaaaaaaaaaaaaaaaaaaaaaaaaaaaaaaaaaaaaaaaaaaaaaaaaaaaaaaaaaaaaaaaaaaaaaaaaa

SEQ ID NO: 2530 - RNA, 5419 nt, synthetic construct
  source 1..5419: mol_type = other RNA
aggaaataagagagaaaagaagagtaagaagaaatataagagccaccatggcccctaagaagaagcgtaaagtgagccgggtgaacggcagcggcagcggcggcggcatgaaccacgaccaggagttcgacccccctaaggtgtaccctcccgtccccgccgagaagagaaagcccatccgggtcctgagcctgttcgatggcatcgccaccggtctgctggtgctgaaggacctgggcatccaggtggataggtacattgcctccgaggtgtgcgaggactccatcaccgtgggaatggtgcgtcatcagggcaagatcatgtacgtgggcgacgtgcggagcgtgacacagaagcatatccaggagtggggccctttcgacctggtgatcggcggcagcccttgcaatgacctgagcatcgtgaacccagcccggaagggcctgtacgagggaaccggcagactgttcttcgagttttacagactgctgcacgacgcccggcctaaggaaggcgacgaccggcccttcttttggctgttcgagaatgtggtggccatgggagtcagcgacaagcgggatattagccggttcctggagagcaaccccgtgatgatcgatgccaaggaagtgagcgccgcccaccgggccagatacttctggggcaatctgcctggcatgaacagacccctggccagcaccgtgaacgacaagctggagctgcaggagtgcctggagcacggccggatcgccaagttcagcaaggtgagaaccatcaccacccgaagcaacagcatcaaacaaggcaaggaccagcactttcctgtgttcatgaacgagaaggaggacatcctgtggtgtaccgagatggagagagtgttcgggttcccagtccactacacagatgtcagcaacatgtctagactggccagacagagactgctgggaagaagctggtccgtccctgtgatcagacacctgttcgcccctctgaaggagtacttcgcctgcgtgagcagcggcaacagcaacgccaacagccggggccccagcttctctagcggcctggtgccactgtccctgagagggagccacatgggccccatggagatctacaaaaccgtgagcgcctggaagcggcagcctgtgcgcgtgctgagcctgtttcggaatatcgataaagtcctgaaaagcctgggattcctggagagcggctctggctccggcggtggcaccctgaagtacgtggaggatgtgacaaacgtggtcagacgggatgtggagaagtggggccccttcgatctggtgtacggcagcacccaacccctgggcagctcttgtgaccggtgccctggctggtacatgtttcagttccaccggatcctgcagtacgccctgccgagacaggagtcccagcggccattcttttggattttcatggacaacttgctgctgaccgaggatgaccaggaaactaccactcggttcctgcagaccgaagccgtgaccctgcaggacgtgagaggccgggactaccagaacgccatgcgggtgtggtccaacatccctggactgaaaagcaagcacgcacctctgacccctaaagaagaggagtacctgcaggcccaggtgcggagcagaagcaagctggacgcccctaaggtggatctgctggtgaagaattgcctcctgcccctgagagagtacttcaagtatttcagccagaatagtctgcccctgggcggcccaagcagcggcgcccctcctcccagcggcggcagcccagccggctccccaacctctaccgaggagggcacctctgagtccgccacccccgagagcggccctggcacctccaccgagcccagcgagggcagcgcacccggcagccctgccggcagccccacctccacagaggagggaaccagcaccgagcccagcgaaggcagcgccccaggcaccagcaccgagcctagtgagggcggctctggcggcggcagcgcccaggagattaaacggatcaacaagatcagaagaagacttgtgaaagacagcaacaccaagaaggccggcaagacaggccccatgaaaaccctgctggttagagtgatgacacccgatctgagagagcggctggaaaacctgagaaagaagcctgaaaatatcccccagcccatcagcaatacatctagagccaacctgaataagctgctgaccgattacaccgaaatgaagaaggcgatcctgcatgtgtactgggaagagttccagaaggaccctgtgggcctgatgagccgggtggcccagcctgccagcaagaagatcgatcagaacaagctgaaacctgagatggacgagaagggcaacctgaccaccgccggctttgcctgctctcagtgtggccagcccctgttcgtgtacaagctggagcaggtgtctgagaagggcaaggcttacaccaactacttcggacggtgcaatgtggccgagcacgaaaagctgatcctgctggcccagctgaagcccgagaaggatagcgacgaagccgtgacatatagcctgggaaagtttgggcagagggccctggatttctacagcattcatgtgaccaaggagtccacccaccccgtgaagcccctggcccagatcgccggaaacagatacgcctccggacctgtgggaaaggccctgagcgacgcatgtatgggcacaatcgcctccttcctgtctaagtaccaggacatcatcatcgaacaccagaaggtggtgaagggcaaccagaagagactggagagcctgcgggagctggccggcaaggaaaacctggaataccctagcgtgaccctgccacctcagcctcacaccaaggagggcgttgatgcctacaacgaagtgatcgcccgggtgcgaatgtgggtgaacctgaacctgtggcagaagctgaagctaagcagagatgatgccaagcctctgctgagactgaagggattcccttcctttcctctggtcgagagacaggccaacgaagtggactggtgggacatggtgtgtaacgtgaagaagctgatcaacgagaaaaaggaggatggcaaggtgttttggcagaatctggctggctacaagagacaggaagccctgagaccatacctgagcagcgaggaagatcggaagaagggaaagaaattcgctcggtaccagctgggcgacctgctgctgcacctggaaaagaagcacggcgaggactggggaaaggtgtacgacgaggcctgggagcggattgacaagaaagtggaaggcctgagcaagcacatcaagctggaagaggaacggagaagcgaggacgcccagagcaaggccgccctgaccgactggctgcgggctaaggccagcttcgtgatcgagggcctgaaggaggccgacaaggacgagttctgcagatgcgagctgaagctgcagaagtggtacggggacctgcggggaaagcccttcgccatcgaagccgagaacagcatcctggacatcagcggcttcagcaagcagtacaactgtgccttcatctggcagaaggacggcgtgaagaagctgaacctgtacctgatcatcaactacttcaagggcggcaagctgcggttcaagaagatcaaacctgaagccttcgaagccaacagattctacaccgtgatcaacaaaaagagcggcgagatcgtgcccatggaggtgaacttcaacttcgacgaccccaacctgatcatcctgcctctggcctttggcaagagacagggcagagaattcatctggaacgacctgctgtccctggaaaccggcagcctgaagctggccaacggaagagtgatcgagaagacactgtacaacagaagaacccggcaggatgagcctgccctgttcgtggccctgaccttcgagcggcgggaggtcctggactcctccaatatcaaaccaatgaacctgatcggcgtggcaagaggcgaaaacatccccgccgtgatcgccctgaccgaccccgagggctgcccactgagccggtttaaggatagcctgggaaacccaacccacatcctgagaatcggcgagagctataaggagaagcagcggaccatccaggccaagaaggaggtggagcagcggagagccggcggctacagccggaagtacgccagcaaagccaagaatctggcagacgatatggtgagaaacaccgctagagatctgctgtactacgccgtgacccaggatgccatgctgatcttcgccaacctgagccggggcttcggccggcagggcaagcggaccttcatggccgagagacagtacacacggatggaggactggctgaccgccaagctggcctacgagggcctgagcaagacctacctgtccaagacactggcccagtacacctccaagacatgcagcaactgtgggtttaccatcaccagcgccgactacgacagggtgctggagaagctgaagaagacagcaacaggctggatgaccacaattaacggcaaggagctgaaggtggagggccagattacctactacaacagatacaagagacagaacgtagtcaaggacctgtccgtcgagctggatagactgagcgaagaatctgtgaacaacgacatctcctcctggacaaagggcagaagcggagaagctctgagcctcctgaagaaaagattctcccatagacccgtgcaggagaagttcgtgtgcctgaactgcggcttcgagacacacgcagccgagcaagccgccctgaacatcgccagatcctggctgttcctgcggagccaggagtacaagaaataccagacaaacaagacaaccggcaacaccgataagagagccttcgtcgagacctggcagtccttttaccggaagaagcttaaggaggtgtggaaacctgccgtgcggtctggcggatctggcggaggctccacaagccaggccgaggtgaccttcgaggacgtggccgtgctgttcagcagggaggagtggggcaggctgggccccgcccagaggggcctgtacagggacgtgatgctggagacctacaggaacctggtgagcctgggcgccggccccgccggccccaagcccggcgtgatcacccagctggagaggggcgacgagccctgggtgctggacgcccagggcgccaagggcaaggagaggctgagggtgagcaccagccccaagaaaaagagaaaagtctaagctgccttctgcggggcttgccttctggccatgcccttcttctctcccttgcacctgtacctcttggtctttgaataaagcctgagtaggaaggctagcaaaaaaaaaaaaaaaaaaaaaaaaaaaaaaaaaaaaaaaaaaaaaaaaaaaaaaaaaaaaaaaaaaaaaaaaaaaaaaaa

SEQ ID NO: 2531 - RNA, 5419 nt, synthetic construct
  source 1..5419: mol_type = other RNA
aggaaataagagagaaaagaagagtaagaagaaatataagagccaccatggcccctaagaagaagcgtaaagtgagccgggtgaacggcagcggcagcggcggcggcatgaaccacgaccaggagttcgacccccctaaggtgtaccctcccgtccccgccgagaagagaaagcccatccgggtcctgagcctgttcgatggcatcgccaccggtctgctggtgctgaaggacctgggcatccaggtggataggtacattgcctccgaggtgtgcgaggactccatcaccgtgggaatggtgcgtcatcagggcaagatcatgtacgtgggcgacgtgcggagcgtgacacagaagcatatccaggagtggggccctttcgacctggtgatcggcggcagcccttgcaatgacctgagcatcgtgaacccagcccggaagggcctgtacgagggaaccggcagactgttcttcgagttttacagactgctgcacgacgcccggcctaaggaaggcgacgaccggcccttcttttggctgttcgagaatgtggtggccatgggagtcagcgacaagcgggatattagccggttcctggagagcaaccccgtgatgatcgatgccaaggaagtgagcgccgcccaccgggccagatacttctggggcaatctgcctggcatgaacagacccctggccagcaccgtgaacgacaagctggagctgcaggagtgcctggagcacggccggatcgccaagttcagcaaggtgagaaccatcaccacccgaagcaacagcatcaaacaaggcaaggaccagcactttcctgtgttcatgaacgagaaggaggacatcctgtggtgtaccgagatggagagagtgttcgggttcccagtccactacacagatgtcagcaacatgtctagactggccagacagagactgctgggaagaagctggtccgtccctgtgatcagacacctgttcgcccctctgaaggagtacttcgcctgcgtgagcagcggcaacagcaacgccaacagccggggccccagcttctctagcggcctggtgccactgtccctgagagggagccacatgggccccatggagatctacaaaaccgtgagcgcctggaagcggcagcctgtgcgcgtgctgagcctgtttcggaatatcgataaagtcctgaaaagcctgggattcctggagagcggctctggctccggcggtggcaccctgaagtacgtggaggatgtgacaaacgtggtcagacgggatgtggagaagtggggccccttcgatctggtgtacggcagcacccaacccctgggcagctcttgtgaccggtgccctggctggtacatgtttcagttccaccggatcctgcagtacgccctgccgagacaggagtcccagcggccattcttttggattttcatggacaacttgctgctgaccgaggatgaccaggaaactaccactcggttcctgcagaccgaagccgtgaccctgcaggacgtgagaggccgggactaccagaacgccatgcgggtgtggtccaacatccctggactgaaaagcaagcacgcacctctgacccctaaagaagaggagtacctgcaggcccaggtgcggagcagaagcaagctggacgcccctaaggtggatctgctggtgaagaattgcctcctgcccctgagagagtacttcaagtatttcagccagaatagtctgcccctgggcggcccaagcagcggcgcccctcctcccagcggcggcagcccagccggctccccaacctctaccgaggagggcacctctgagtccgccacccccgagagcggccctggcacctccaccgagcccagcgagggcagcgcacccggcagccctgccggcagccccacctccacagaggagggaaccagcaccgagcccagcgaaggcagcgccccaggcaccagcaccgagcctagtgagggcggctctggcggcggcagcgcccaggagattaaacggatcaacaagatcagaagaagacttgtgaaagacagcaacaccaagaaggccggcaagacaggccccatgaaaaccctgctggttagagtgatgacacccgatctgagagagcggctggaaaacctgagaaagaagcctgaaaatatcccccagcccatcagcaatacatctagagccaacctgaataagctgctgaccgattacaccgaaatgaagaaggcgatcctgcatgtgtactgggaagagttccagaaggaccctgtgggcctgatgagccgggtggcccagcctgccagcaagaagatcgatcagaacaagctgaaacctgagatggacgagaagggcaacctgaccaccgccggctttgcctgctctcagtgtggccagcccctgttcgtgtacaagctggagcaggtgtctgagaagggcaaggcttacaccaactacttcggacggtgcaatgtggccgagcacgaaaagctgatcctgctggcccagctgaagcccgagaaggatagcgacgaagccgtgacatatagcctgggaaagtttgggcagagggccctggatttctacagcattcatgtgaccaaggagtccacccaccccgtgaagcccctggcccagatcgccggaaacagatacgcctccggacctgtgggaaaggccctgagcgacgcatgtatgggcacaatcgcctccttcctgtctaagtaccaggacatcatcatcgaacaccagaaggtggtgaagggcaaccagaagagactggagagcctgcgggagctggccggcaaggaaaacctggaataccctagcgtgaccctgccacctcagcctcacaccaaggagggcgttgatgcctacaacgaagtgatcgcccgggtgcgaatgtgggtgaacctgaacctgtggcagaagctgaagctaagcagagatgatgccaagcctctgctgagactgaagggattcccttcctttcctctggtcgagagacaggccaacgaagtggactggtgggacatggtgtgtaacgtgaagaagctgatcaacgagaaaaaggaggatggcaaggtgttttggcagaatctggctggctacaagagacaggaagccctgagaccatacctgagcagcgaggaagatcggaagaagggaaagaaattcgctcggtaccagctgggcgacctgctgctgcacctggaaaagaagcacggcgaggactggggaaaggtgtacgacgaggcctgggagcggattgacaagaaagtggaaggcctgagcaagcacatcaagctggaagaggaacggagaagcgaggacgcccagagcaaggccgccctgaccgactggctgcgggctaaggccagcttcgtgatcgagggcctgaaggaggccgacaaggacgagttctgcagatgcgagctgaagctgcagaagtggtacggggacctgcggggaaagcccttcgccatcgaagccgagaacagcatcctggacatcagcggcttcagcaagcagtacaactgtgccttcatctggcagaaggacggcgtgaagaagctgaacctgtacctgatcatcaactacttcaagggcggcaagctgcggttcaagaagatcaaacctgaagccttcgaagccaacagattctacaccgtgatcaacaaaaagagcggcgagatcgtgcccatggaggtgaacttcaacttcgacgaccccaacctgatcatcctgcctctggcctttggcaagagacagggcagagaattcatctggaacgacctgctgtccctggaaaccggcagcctgaagctggccaacggaagagtgatcgagaagacactgtacaacagaagaacccggcaggatgagcctgccctgttcgtggccctgaccttcgagcggcgggaggtcctggactcctccaatatcaaaccaatgaacctgatcggcgtggcaagaggcgaaaacatccccgccgtgatcgccctgaccgaccccgagggctgcccactgagccggtttaaggatagcctgggaaacccaacccacatcctgagaatcggcgagagctataaggagaagcagcggaccatccaggccaagaaggaggtggagcagcggagagccggcggctacagccggaagtacgccagcaaagccaagaatctggcagacgatatggtgagaaacaccgctagagatctgctgtactacgccgtgacccaggatgccatgctgatcttcgccaacctgagccggggcttcggccggcagggcaagcggaccttcatggccgagagacagtacacacggatggaggactggctgaccgccaagctggcctacgagggcctgagcaagacctacctgtccaagacactggcccagtacacctccaagacatgcagcaactgtgggtttaccatcaccagcgccgactacgacagggtgctggagaagctgaagaagacagcaacaggctggatgaccacaattaacggcaaggagctgaaggtggagggccagattacctactacaacagatacaagagacagaacgtagtcaaggacctgtccgtcgagctggatagactgagcgaagaatctgtgaacaacgacatctcctcctggacaaagggcagaagcggagaagctctgagcctcctgaagaaaagattctcccatagacccgtgcaggagaagttcgtgtgcctgaactgcggcttcgagacacacgcagccgagcaagccgccctgaacatcgccagatcctggctgttcctgcggagccaggagtacaagaaataccagacaaacaagacaaccggcaacaccgataagagagccttcgtcgagacctggcagtccttttaccggaagaagcttaaggaggtgtggaaacctgccgtgcggtctggcggatctggcggaggctccacaagcagccaggagagcgtggccttcgaggacgtggccgtgtacttcaccaccaaggagtgggccatcatggtgcccgccgagagggccctgtacagggacgtgatgctggagaactacgaggccgtggccttcgtggtgccccccaccagcaagcccgccctggtgagccacctggagcagggcaaggagagctgcttcatcaggccccagggcgtgctgagcaggagcgactggagggccggcctgaccagccccaagaaaaagagaaaagtctaagctgccttctgcggggcttgccttctggccatgcccttcttctctcccttgcacctgtacctcttggtctttgaataaagcctgagtaggaaggctagcaaaaaaaaaaaaaaaaaaaaaaaaaaaaaaaaaaaaaaaaaaaaaaaaaaaaaaaaaaaaaaaaaaaaaaaaaaaaaaaa

SEQ ID NO: 2532 - RNA, 5419 nt, synthetic construct
  source 1..5419: mol_type = other RNA
aggaaataagagagaaaagaagagtaagaagaaatataagagccaccatggcccctaagaagaagcgtaaagtgagccgggtgaacggcagcggcagcggcggcggcatgaaccacgaccaggagttcgacccccctaaggtgtaccctcccgtccccgccgagaagagaaagcccatccgggtcctgagcctgttcgatggcatcgccaccggtctgctggtgctgaaggacctgggcatccaggtggataggtacattgcctccgaggtgtgcgaggactccatcaccgtgggaatggtgcgtcatcagggcaagatcatgtacgtgggcgacgtgcggagcgtgacacagaagcatatccaggagtggggccctttcgacctggtgatcggcggcagcccttgcaatgacctgagcatcgtgaacccagcccggaagggcctgtacgagggaaccggcagactgttcttcgagttttacagactgctgcacgacgcccggcctaaggaaggcgacgaccggcccttcttttggctgttcgagaatgtggtggccatgggagtcagcgacaagcgggatattagccggttcctggagagcaaccccgtgatgatcgatgccaaggaagtgagcgccgcccaccgggccagatacttctggggcaatctgcctggcatgaacagacccctggccagcaccgtgaacgacaagctggagctgcaggagtgcctggagcacggccggatcgccaagttcagcaaggtgagaaccatcaccacccgaagcaacagcatcaaacaaggcaaggaccagcactttcctgtgttcatgaacgagaaggaggacatcctgtggtgtaccgagatggagagagtgttcgggttcccagtccactacacagatgtcagcaacatgtctagactggccagacagagactgctgggaagaagctggtccgtccctgtgatcagacacctgttcgcccctctgaaggagtacttcgcctgcgtgagcagcggcaacagcaacgccaacagccggggccccagcttctctagcggcctggtgccactgtccctgagagggagccacatgggccccatggagatctacaaaaccgtgagcgcctggaagcggcagcctgtgcgcgtgctgagcctgtttcggaatatcgataaagtcctgaaaagcctgggattcctggagagcggctctggctccggcggtggcaccctgaagtacgtggaggatgtgacaaacgtggtcagacgggatgtggagaagtggggccccttcgatctggtgtacggcagcacccaacccctgggcagctcttgtgaccggtgccctggctggtacatgtttcagttccaccggatcctgcagtacgccctgccgagacaggagtcccagcggccattcttttggattttcatggacaacttgctgctgaccgaggatgaccaggaaactaccactcggttcctgcagaccgaagccgtgaccctgcaggacgtgagaggccgggactaccagaacgccatgcgggtgtggtccaacatccctggactgaaaagcaagcacgcacctctgacccctaaagaagaggagtacctgcaggcccaggtgcggagcagaagcaagctggacgcccctaaggtggatctgctggtgaagaattgcctcctgcccctgagagagtacttcaagtatttcagccagaatagtctgcccctgggcggcccaagcagcggcgcccctcctcccagcggcggcagcccagccggctccccaacctctaccgaggagggcacctctgagtccgccacccccgagagcggccctggcacctccaccgagcccagcgagggcagcgcacccggcagccctgccggcagccccacctccacagaggagggaaccagcaccgagcccagcgaaggcagcgccccaggcaccagcaccgagcctagtgagggcggctctggcggcggcagcgcccaggagattaaacggatcaacaagatcagaagaagacttgtgaaagacagcaacaccaagaaggccggcaagacaggccccatgaaaaccctgctggttagagtgatgacacccgatctgagagagcggctggaaaacctgagaaagaagcctgaaaatatcccccagcccatcagcaatacatctagagccaacctgaataagctgctgaccgattacaccgaaatgaagaaggcgatcctgcatgtgtactgggaagagttccagaaggaccctgtgggcctgatgagccgggtggcccagcctgccagcaagaagatcgatcagaacaagctgaaacctgagatggacgagaagggcaacctgaccaccgccggctttgcctgctctcagtgtggccagcccctgttcgtgtacaagctggagcaggtgtctgagaagggcaaggcttacaccaactacttcggacggtgcaatgtggccgagcacgaaaagctgatcctgctggcccagctgaagcccgagaaggatagcgacgaagccgtgacatatagcctgggaaagtttgggcagagggccctggatttctacagcattcatgtgaccaaggagtccacccaccccgtgaagcccctggcccagatcgccggaaacagatacgcctccggacctgtgggaaaggccctgagcgacgcatgtatgggcacaatcgcctccttcctgtctaagtaccaggacatcatcatcgaacaccagaaggtggtgaagggcaaccagaagagactggagagcctgcgggagctggccggcaaggaaaacctggaataccctagcgtgaccctgccacctcagcctcacaccaaggagggcgttgatgcctacaacgaagtgatcgcccgggtgcgaatgtgggtgaacctgaacctgtggcagaagctgaagctaagcagagatgatgccaagcctctgctgagactgaagggattcccttcctttcctctggtcgagagacaggccaacgaagtggactggtgggacatggtgtgtaacgtgaagaagctgatcaacgagaaaaaggaggatggcaaggtgttttggcagaatctggctggctacaagagacaggaagccctgagaccatacctgagcagcgaggaagatcggaagaagggaaagaaattcgctcggtaccagctgggcgacctgctgctgcacctggaaaagaagcacggcgaggactggggaaaggtgtacgacgaggcctgggagcggattgacaagaaagtggaaggcctgagcaagcacatcaagctggaagaggaacggagaagcgaggacgcccagagcaaggccgccctgaccgactggctgcgggctaaggccagcttcgtgatcgagggcctgaaggaggccgacaaggacgagttctgcagatgcgagctgaagctgcagaagtggtacggggacctgcggggaaagcccttcgccatcgaagccgagaacagcatcctggacatcagcggcttcagcaagcagtacaactgtgccttcatctggcagaaggacggcgtgaagaagctgaacctgtacctgatcatcaactacttcaagggcggcaagctgcggttcaagaagatcaaacctgaagccttcgaagccaacagattctacaccgtgatcaacaaaaagagcggcgagatcgtgcccatggaggtgaacttcaacttcgacgaccccaacctgatcatcctgcctctggcctttggcaagagacagggcagagaattcatctggaacgacctgctgtccctggaaaccggcagcctgaagctggccaacggaagagtgatcgagaagacactgtacaacagaagaacccggcaggatgagcctgccctgttcgtggccctgaccttcgagcggcgggaggtcctggactcctccaatatcaaaccaatgaacctgatcggcgtggcaagaggcgaaaacatccccgccgtgatcgccctgaccgaccccgagggctgcccactgagccggtttaaggatagcctgggaaacccaacccacatcctgagaatcggcgagagctataaggagaagcagcggaccatccaggccaagaaggaggtggagcagcggagagccggcggctacagccggaagtacgccagcaaagccaagaatctggcagacgatatggtgagaaacaccgctagagatctgctgtactacgccgtgacccaggatgccatgctgatcttcgccaacctgagccggggcttcggccggcagggcaagcggaccttcatggccgagagacagtacacacggatggaggactggctgaccgccaagctggcctacgagggcctgagcaagacctacctgtccaagacactggcccagtacacctccaagacatgcagcaactgtgggtttaccatcaccagcgccgactacgacagggtgctggagaagctgaagaagacagcaacaggctggatgaccacaattaacggcaaggagctgaaggtggagggccagattacctactacaacagatacaagagacagaacgtagtcaaggacctgtccgtcgagctggatagactgagcgaagaatctgtgaacaacgacatctcctcctggacaaagggcagaagcggagaagctctgagcctcctgaagaaaagattctcccatagacccgtgcaggagaagttcgtgtgcctgaactgcggcttcgagacacacgcagccgagcaagccgccctgaacatcgccagatcctggctgttcctgcggagccaggagtacaagaaataccagacaaacaagacaaccggcaacaccgataagagagccttcgtcgagacctggcagtccttttaccggaagaagcttaaggaggtgtggaaacctgccgtgcggtctggcggatctggcggaggctccacaagcagcacccccgtgaccttcgaggacgtggtggtgtacttcaccgccgccgagtgggtgcacctgaccaactggcagagggacttctaccaggccgtgatgatggagacctacgagctggtggccagcgtggccggcgacggcgtgcccatggccgaggacgaggagggcggcgtggagaggcccgtgtggcagtacatccccaggggcaagaggaggaggaagaccccccagcccagggccgacaccagccccaagaaaaagagaaaagtctaagctgccttctgcggggcttgccttctggccatgcccttcttctctcccttgcacctgtacctcttggtctttgaataaagcctgagtaggaaggctagcaaaaaaaaaaaaaaaaaaaaaaaaaaaaaaaaaaaaaaaaaaaaaaaaaaaaaaaaaaaaaaaaaaaaaaaaaaaaaaaa

SEQ ID NO: 2533 - RNA, 5419 nt, synthetic construct
  source 1..5419: mol_type = other RNA
aggaaataagagagaaaagaagagtaagaagaaatataagagccaccatggcccctaagaagaagcgtaaagtgagccgggtgaacggcagcggcagcggcggcggcatgaaccacgaccaggagttcgacccccctaaggtgtaccctcccgtccccgccgagaagagaaagcccatccgggtcctgagcctgttcgatggcatcgccaccggtctgctggtgctgaaggacctgggcatccaggtggataggtacattgcctccgaggtgtgcgaggactccatcaccgtgggaatggtgcgtcatcagggcaagatcatgtacgtgggcgacgtgcggagcgtgacacagaagcatatccaggagtggggccctttcgacctggtgatcggcggcagcccttgcaatgacctgagcatcgtgaacccagcccggaagggcctgtacgagggaaccggcagactgttcttcgagttttacagactgctgcacgacgcccggcctaaggaaggcgacgaccggcccttcttttggctgttcgagaatgtggtggccatgggagtcagcgacaagcgggatattagccggttcctggagagcaaccccgtgatgatcgatgccaaggaagtgagcgccgcccaccgggccagatacttctggggcaatctgcctggcatgaacagacccctggccagcaccgtgaacgacaagctggagctgcaggagtgcctggagcacggccggatcgccaagttcagcaaggtgagaaccatcaccacccgaagcaacagcatcaaacaaggcaaggaccagcactttcctgtgttcatgaacgagaaggaggacatcctgtggtgtaccgagatggagagagtgttcgggttcccagtccactacacagatgtcagcaacatgtctagactggccagacagagactgctgggaagaagctggtccgtccctgtgatcagacacctgttcgcccctctgaaggagtacttcgcctgcgtgagcagcggcaacagcaacgccaacagccggggccccagcttctctagcggcctggtgccactgtccctgagagggagccacatgggccccatggagatctacaaaaccgtgagcgcctggaagcggcagcctgtgcgcgtgctgagcctgtttcggaatatcgataaagtcctgaaaagcctgggattcctggagagcggctctggctccggcggtggcaccctgaagtacgtggaggatgtgacaaacgtggtcagacgggatgtggagaagtggggccccttcgatctggtgtacggcagcacccaacccctgggcagctcttgtgaccggtgccctggctggtacatgtttcagttccaccggatcctgcagtacgccctgccgagacaggagtcccagcggccattcttttggattttcatggacaacttgctgctgaccgaggatgaccaggaaactaccactcggttcctgcagaccgaagccgtgaccctgcaggacgtgagaggccgggactaccagaacgccatgcgggtgtggtccaacatccctggactgaaaagcaagcacgcacctctgacccctaaagaagaggagtacctgcaggcccaggtgcggagcagaagcaagctggacgcccctaaggtggatctgctggtgaagaattgcctcctgcccctgagagagtacttcaagtatttcagccagaatagtctgcccctgggcggcccaagcagcggcgcccctcctcccagcggcggcagcccagccggctccccaacctctaccgaggagggcacctctgagtccgccacccccgagagcggccctggcacctccaccgagcccagcgagggcagcgcacccggcagccctgccggcagccccacctccacagaggagggaaccagcaccgagcccagcgaaggcagcgccccaggcaccagcaccgagcctagtgagggcggctctggcggcggcagcgcccaggagattaaacggatcaacaagatcagaagaagacttgtgaaagacagcaacaccaagaaggccggcaagacaggccccatgaaaaccctgctggttagagtgatgacacccgatctgagagagcggctggaaaacctgagaaagaagcctgaaaatatcccccagcccatcagcaatacatctagagccaacctgaataagctgctgaccgattacaccgaaatgaagaaggcgatcctgcatgtgtactgggaagagttccagaaggaccctgtgggcctgatgagccgggtggcccagcctgccagcaagaagatcgatcagaacaagctgaaacctgagatggacgagaagggcaacctgaccaccgccggctttgcctgctctcagtgtggccagcccctgttcgtgtacaagctggagcaggtgtctgagaagggcaaggcttacaccaactacttcggacggtgcaatgtggccgagcacgaaaagctgatcctgctggcccagctgaagcccgagaaggatagcgacgaagccgtgacatatagcctgggaaagtttgggcagagggccctggatttctacagcattcatgtgaccaaggagtccacccaccccgtgaagcccctggcccagatcgccggaaacagatacgcctccggacctgtgggaaaggccctgagcgacgcatgtatgggcacaatcgcctccttcctgtctaagtaccaggacatcatcatcgaacaccagaaggtggtgaagggcaaccagaagagactggagagcctgcgggagctggccggcaaggaaaacctggaataccctagcgtgaccctgccacctcagcctcacaccaaggagggcgttgatgcctacaacgaagtgatcgcccgggtgcgaatgtgggtgaacctgaacctgtggcagaagctgaagctaagcagagatgatgccaagcctctgctgagactgaagggattcccttcctttcctctggtcgagagacaggccaacgaagtggactggtgggacatggtgtgtaacgtgaagaagctgatcaacgagaaaaaggaggatggcaaggtgttttggcagaatctggctggctacaagagacaggaagccctgagaccatacctgagcagcgaggaagatcggaagaagggaaagaaattcgctcggtaccagctgggcgacctgctgctgcacctggaaaagaagcacggcgaggactggggaaaggtgtacgacgaggcctgggagcggattgacaagaaagtggaaggcctgagcaagcacatcaagctggaagaggaacggagaagcgaggacgcccagagcaaggccgccctgaccgactggctgcgggctaaggccagcttcgtgatcgagggcctgaaggaggccgacaaggacgagttctgcagatgcgagctgaagctgcagaagtggtacggggacctgcggggaaagcccttcgccatcgaagccgagaacagcatcctggacatcagcggcttcagcaagcagtacaactgtgccttcatctggcagaaggacggcgtgaagaagctgaacctgtacctgatcatcaactacttcaagggcggcaagctgcggttcaagaagatcaaacctgaagccttcgaagccaacagattctacaccgtgatcaacaaaaagagcggcgagatcgtgcccatggaggtgaacttcaacttcgacgaccccaacctgatcatcctgcctctggcctttggcaagagacagggcagagaattcatctggaacgacctgctgtccctggaaaccggcagcctgaagctggccaacggaagagtgatcgagaagacactgtacaacagaagaacccggcaggatgagcctgccctgttcgtggccctgaccttcgagcggcgggaggtcctggactcctccaatatcaaaccaatgaacctgatcggcgtggcaagaggcgaaaacatccccgccgtgatcgccctgaccgaccccgagggctgcccactgagccggtttaaggatagcctgggaaacccaacccacatcctgagaatcggcgagagctataaggagaagcagcggaccatccaggccaagaaggaggtggagcagcggagagccggcggctacagccggaagtacgccagcaaagccaagaatctggcagacgatatggtgagaaacaccgctagagatctgctgtactacgccgtgacccaggatgccatgctgatcttcgccaacctgagccggggcttcggccggcagggcaagcggaccttcatggccgagagacagtacacacggatggaggactggctgaccgccaagctggcctacgagggcctgagcaagacctacctgtccaagacactggcccagtacacctccaagacatgcagcaactgtgggtttaccatcaccagcgccgactacgacagggtgctggagaagctgaagaagacagcaacaggctggatgaccacaattaacggcaaggagctgaaggtggagggccagattacctactacaacagatacaagagacagaacgtagtcaaggacctgtccgtcgagctggatagactgagcgaagaatctgtgaacaacgacatctcctcctggacaaagggcagaagcggagaagctctgagcctcctgaagaaaagattctcccatagacccgtgcaggagaagttcgtgtgcctgaactgcggcttcgagacacacgcagccgagcaagccgccctgaacatcgccagatcctggctgttcctgcggagccaggagtacaagaaataccagacaaacaagacaaccggcaacaccgataagagagccttcgtcgagacctggcagtccttttaccggaagaagcttaaggaggtgtggaaacctgccgtgcggtctggcggatctggcggaggctccacaagcaagcccggcgccgtgagcttcgccgacgtggccgtgtacttcagccccgaggagtggggctgcctgaggcccgcccagagggccctgtacagggacgtgatgagggagacctacggccacctgggcgccctgggcttccccggccccaagcccgccctgatcagctggatggagcaggagagcgaggcctggagccccgccgcccaggaccccgaggagggcgagagcctgggcggcgccctgaccagccccaagaaaaagagaaaagtctaagctgccttctgcggggcttgccttctggccatgcccttcttctctcccttgcacctgtacctcttggtctttgaataaagcctgagtaggaaggctagcaaaaaaaaaaaaaaaaaaaaaaaaaaaaaaaaaaaaaaaaaaaaaaaaaaaaaaaaaaaaaaaaaaaaaaaaaaaaaaaa

SEQ ID NO: 2534 - RNA, 5419 nt, synthetic construct
  source 1..5419: mol_type = other RNA
aggaaataagagagaaaagaagagtaagaagaaatataagagccaccatggcccctaagaagaagcgtaaagtgagccgggtgaacggcagcggcagcggcggcggcatgaaccacgaccaggagttcgacccccctaaggtgtaccctcccgtccccgccgagaagagaaagcccatccgggtcctgagcctgttcgatggcatcgccaccggtctgctggtgctgaaggacctgggcatccaggtggataggtacattgcctccgaggtgtgcgaggactccatcaccgtgggaatggtgcgtcatcagggcaagatcatgtacgtgggcgacgtgcggagcgtgacacagaagcatatccaggagtggggccctttcgacctggtgatcggcggcagcccttgcaatgacctgagcatcgtgaacccagcccggaagggcctgtacgagggaaccggcagactgttcttcgagttttacagactgctgcacgacgcccggcctaaggaaggcgacgaccggcccttcttttggctgttcgagaatgtggtggccatgggagtcagcgacaagcgggatattagccggttcctggagagcaaccccgtgatgatcgatgccaaggaagtgagcgccgcccaccgggccagatacttctggggcaatctgcctggcatgaacagacccctggccagcaccgtgaacgacaagctggagctgcaggagtgcctggagcacggccggatcgccaagttcagcaaggtgagaaccatcaccacccgaagcaacagcatcaaacaaggcaaggaccagcactttcctgtgttcatgaacgagaaggaggacatcctgtggtgtaccgagatggagagagtgttcgggttcccagtccactacacagatgtcagcaacatgtctagactggccagacagagactgctgggaagaagctggtccgtccctgtgatcagacacctgttcgcccctctgaaggagtacttcgcctgcgtgagcagcggcaacagcaacgccaacagccggggccccagcttctctagcggcctggtgccactgtccctgagagggagccacatgggccccatggagatctacaaaaccgtgagcgcctggaagcggcagcctgtgcgcgtgctgagcctgtttcggaatatcgataaagtcctgaaaagcctgggattcctggagagcggctctggctccggcggtggcaccctgaagtacgtggaggatgtgacaaacgtggtcagacgggatgtggagaagtggggccccttcgatctggtgtacggcagcacccaacccctgggcagctcttgtgaccggtgccctggctggtacatgtttcagttccaccggatcctgcagtacgccctgccgagacaggagtcccagcggccattcttttggattttcatggacaacttgctgctgaccgaggatgaccaggaaactaccactcggttcctgcagaccgaagccgtgaccctgcaggacgtgagaggccgggactaccagaacgccatgcgggtgtggtccaacatccctggactgaaaagcaagcacgcacctctgacccctaaagaagaggagtacctgcaggcccaggtgcggagcagaagcaagctggacgcccctaaggtggatctgctggtgaagaattgcctcctgcccctgagagagtacttcaagtatttcagccagaatagtctgcccctgggcggcccaagcagcggcgcccctcctcccagcggcggcagcccagccggctccccaacctctaccgaggagggcacctctgagtccgccacccccgagagcggccctggcacctccaccgagcccagcgagggcagcgcacccggcagccctgccggcagccccacctccacagaggagggaaccagcaccgagcccagcgaaggcagcgccccaggcaccagcaccgagcctagtgagggcggctctggcggcggcagcgcccaggagattaaacggatcaacaagatcagaagaagacttgtgaaagacagcaacaccaagaaggccggcaagacaggccccatgaaaaccctgctggttagagtgatgacacccgatctgagagagcggctggaaaacctgagaaagaagcctgaaaatatcccccagcccatcagcaatacatctagagccaacctgaataagctgctgaccgattacaccgaaatgaagaaggcgatcctgcatgtgtactgggaagagttccagaaggaccctgtgggcctgatgagccgggtggcccagcctgccagcaagaagatcgatcagaacaagctgaaacctgagatggacgagaagggcaacctgaccaccgccggctttgcctgctctcagtgtggccagcccctgttcgtgtacaagctggagcaggtgtctgagaagggcaaggcttacaccaactacttcggacggtgcaatgtggccgagcacgaaaagctgatcctgctggcccagctgaagcccgagaaggatagcgacgaagccgtgacatatagcctgggaaagtttgggcagagggccctggatttctacagcattcatgtgaccaaggagtccacccaccccgtgaagcccctggcccagatcgccggaaacagatacgcctccggacctgtgggaaaggccctgagcgacgcatgtatgggcacaatcgcctccttcctgtctaagtaccaggacatcatcatcgaacaccagaaggtggtgaagggcaaccagaagagactggagagcctgcgggagctggccggcaaggaaaacctggaataccctagcgtgaccctgccacctcagcctcacaccaaggagggcgttgatgcctacaacgaagtgatcgcccgggtgcgaatgtgggtgaacctgaacctgtggcagaagctgaagctaagcagagatgatgccaagcctctgctgagactgaagggattcccttcctttcctctggtcgagagacaggccaacgaagtggactggtgggacatggtgtgtaacgtgaagaagctgatcaacgagaaaaaggaggatggcaaggtgttttggcagaatctggctggctacaagagacaggaagccctgagaccatacctgagcagcgaggaagatcggaagaagggaaagaaattcgctcggtaccagctgggcgacctgctgctgcacctggaaaagaagcacggcgaggactggggaaaggtgtacgacgaggcctgggagcggattgacaagaaagtggaaggcctgagcaagcacatcaagctggaagaggaacggagaagcgaggacgcccagagcaaggccgccctgaccgactggctgcgggctaaggccagcttcgtgatcgagggcctgaaggaggccgacaaggacgagttctgcagatgcgagctgaagctgcagaagtggtacggggacctgcggggaaagcccttcgccatcgaagccgagaacagcatcctggacatcagcggcttcagcaagcagtacaactgtgccttcatctggcagaaggacggcgtgaagaagctgaacctgtacctgatcatcaactacttcaagggcggcaagctgcggttcaagaagatcaaacctgaagccttcgaagccaacagattctacaccgtgatcaacaaaaagagcggcgagatcgtgcccatggaggtgaacttcaacttcgacgaccccaacctgatcatcctgcctctggcctttggcaagagacagggcagagaattcatctggaacgacctgctgtccctggaaaccggcagcctgaagctggccaacggaagagtgatcgagaagacactgtacaacagaagaacccggcaggatgagcctgccctgttcgtggccctgaccttcgagcggcgggaggtcctggactcctccaatatcaaaccaatgaacctgatcggcgtggcaagaggcgaaaacatccccgccgtgatcgccctgaccgaccccgagggctgcccactgagccggtttaaggatagcctgggaaacccaacccacatcctgagaatcggcgagagctataaggagaagcagcggaccatccaggccaagaaggaggtggagcagcggagagccggcggctacagccggaagtacgccagcaaagccaagaatctggcagacgatatggtgagaaacaccgctagagatctgctgtactacgccgtgacccaggatgccatgctgatcttcgccaacctgagccggggcttcggccggcagggcaagcggaccttcatggccgagagacagtacacacggatggaggactggctgaccgccaagctggcctacgagggcctgagcaagacctacctgtccaagacactggcccagtacacctccaagacatgcagcaactgtgggtttaccatcaccagcgccgactacgacagggtgctggagaagctgaagaagacagcaacaggctggatgaccacaattaacggcaaggagctgaaggtggagggccagattacctactacaacagatacaagagacagaacgtagtcaaggacctgtccgtcgagctggatagactgagcgaagaatctgtgaacaacgacatctcctcctggacaaagggcagaagcggagaagctctgagcctcctgaagaaaagattctcccatagacccgtgcaggagaagttcgtgtgcctgaactgcggcttcgagacacacgcagccgagcaagccgccctgaacatcgccagatcctggctgttcctgcggagccaggagtacaagaaataccagacaaacaagacaaccggcaacaccgataagagagccttcgtcgagacctggcagtccttttaccggaagaagcttaaggaggtgtggaaacctgccgtgcggtctggcggatctggcggaggctccacaagcaagcccggcgccgtgagcttcgccgacgtggccgtgtacttcagccccgaggagtggggctgcctgaggcccgcccagagggccctgtacagggacgtgatgagggagacctacggccacctgggcgccctgggcttccccggccccaagcccgccctgatcagctggatggagcaggagagcgaggcctggagccccgacgcccaggaccccgaggagggcgagagcctgggcggcgccctgaccagccccaagaaaaagagaaaagtctaagctgccttctgcggggcttgccttctggccatgcccttcttctctcccttgcacctgtacctcttggtctttgaataaagcctgagtaggaaggctagcaaaaaaaaaaaaaaaaaaaaaaaaaaaaaaaaaaaaaaaaaaaaaaaaaaaaaaaaaaaaaaaaaaaaaaaaaaaaaaaa

SEQ ID NO: 2535 - RNA, 5419 nt, synthetic construct
  source 1..5419: mol_type = other RNA
aggaaataagagagaaaagaagagtaagaagaaatataagagccaccatggcccctaagaagaagcgtaaagtgagccgggtgaacggcagcggcagcggcggcggcatgaaccacgaccaggagttcgacccccctaaggtgtaccctcccgtccccgccgagaagagaaagcccatccgggtcctgagcctgttcgatggcatcgccaccggtctgctggtgctgaaggacctgggcatccaggtggataggtacattgcctccgaggtgtgcgaggactccatcaccgtgggaatggtgcgtcatcagggcaagatcatgtacgtgggcgacgtgcggagcgtgacacagaagcatatccaggagtggggccctttcgacctggtgatcggcggcagcccttgcaatgacctgagcatcgtgaacccagcccggaagggcctgtacgagggaaccggcagactgttcttcgagttttacagactgctgcacgacgcccggcctaaggaaggcgacgaccggcccttcttttggctgttcgagaatgtggtggccatgggagtcagcgacaagcgggatattagccggttcctggagagcaaccccgtgatgatcgatgccaaggaagtgagcgccgcccaccgggccagatacttctggggcaatctgcctggcatgaacagacccctggccagcaccgtgaacgacaagctggagctgcaggagtgcctggagcacggccggatcgccaagttcagcaaggtgagaaccatcaccacccgaagcaacagcatcaaacaaggcaaggaccagcactttcctgtgttcatgaacgagaaggaggacatcctgtggtgtaccgagatggagagagtgttcgggttcccagtccactacacagatgtcagcaacatgtctagactggccagacagagactgctgggaagaagctggtccgtccctgtgatcagacacctgttcgcccctctgaaggagtacttcgcctgcgtgagcagcggcaacagcaacgccaacagccggggccccagcttctctagcggcctggtgccactgtccctgagagggagccacatgggccccatggagatctacaaaaccgtgagcgcctggaagcggcagcctgtgcgcgtgctgagcctgtttcggaatatcgataaagtcctgaaaagcctgggattcctggagagcggctctggctccggcggtggcaccctgaagtacgtggaggatgtgacaaacgtggtcagacgggatgtggagaagtggggccccttcgatctggtgtacggcagcacccaacccctgggcagctcttgtgaccggtgccctggctggtacatgtttcagttccaccggatcctgcagtacgccctgccgagacaggagtcccagcggccattcttttggattttcatggacaacttgctgctgaccgaggatgaccaggaaactaccactcggttcctgcagaccgaagccgtgaccctgcaggacgtgagaggccgggactaccagaacgccatgcgggtgtggtccaacatccctggactgaaaagcaagcacgcacctctgacccctaaagaagaggagtacctgcaggcccaggtgcggagcagaagcaagctggacgcccctaaggtggatctgctggtgaagaattgcctcctgcccctgagagagtacttcaagtatttcagccagaatagtctgcccctgggcggcccaagcagcggcgcccctcctcccagcggcggcagcccagccggctccccaacctctaccgaggagggcacctctgagtccgccacccccgagagcggccctggcacctccaccgagcccagcgagggcagcgcacccggcagccctgccggcagccccacctccacagaggagggaaccagcaccgagcccagcgaaggcagcgccccaggcaccagcaccgagcctagtgagggcggctctggcggcggcagcgcccaggagattaaacggatcaacaagatcagaagaagacttgtgaaagacagcaacaccaagaaggccggcaagacaggccccatgaaaaccctgctggttagagtgatgacacccgatctgagagagcggctggaaaacctgagaaagaagcctgaaaatatcccccagcccatcagcaatacatctagagccaacctgaataagctgctgaccgattacaccgaaatgaagaaggcgatcctgcatgtgtactgggaagagttccagaaggaccctgtgggcctgatgagccgggtggcccagcctgccagcaagaagatcgatcagaacaagctgaaacctgagatggacgagaagggcaacctgaccaccgccggctttgcctgctctcagtgtggccagcccctgttcgtgtacaagctggagcaggtgtctgagaagggcaaggcttacaccaactacttcggacggtgcaatgtggccgagcacgaaaagctgatcctgctggcccagctgaagcccgagaaggatagcgacgaagccgtgacatatagcctgggaaagtttgggcagagggccctggatttctacagcattcatgtgaccaaggagtccacccaccccgtgaagcccctggcccagatcgccggaaacagatacgcctccggacctgtgggaaaggccctgagcgacgcatgtatgggcacaatcgcctccttcctgtctaagtaccaggacatcatcatcgaacaccagaaggtggtgaagggcaaccagaagagactggagagcctgcgggagctggccggcaaggaaaacctggaataccctagcgtgaccctgccacctcagcctcacaccaaggagggcgttgatgcctacaacgaagtgatcgcccgggtgcgaatgtgggtgaacctgaacctgtggcagaagctgaagctaagcagagatgatgccaagcctctgctgagactgaagggattcccttcctttcctctggtcgagagacaggccaacgaagtggactggtgggacatggtgtgtaacgtgaagaagctgatcaacgagaaaaaggaggatggcaaggtgttttggcagaatctggctggctacaagagacaggaagccctgagaccatacctgagcagcgaggaagatcggaagaagggaaagaaattcgctcggtaccagctgggcgacctgctgctgcacctggaaaagaagcacggcgaggactggggaaaggtgtacgacgaggcctgggagcggattgacaagaaagtggaaggcctgagcaagcacatcaagctggaagaggaacggagaagcgaggacgcccagagcaaggccgccctgaccgactggctgcgggctaaggccagcttcgtgatcgagggcctgaaggaggccgacaaggacgagttctgcagatgcgagctgaagctgcagaagtggtacggggacctgcggggaaagcccttcgccatcgaagccgagaacagcatcctggacatcagcggcttcagcaagcagtacaactgtgccttcatctggcagaaggacggcgtgaagaagctgaacctgtacctgatcatcaactacttcaagggcggcaagctgcggttcaagaagatcaaacctgaagccttcgaagccaacagattctacaccgtgatcaacaaaaagagcggcgagatcgtgcccatggaggtgaacttcaacttcgacgaccccaacctgatcatcctgcctctggcctttggcaagagacagggcagagaattcatctggaacgacctgctgtccctggaaaccggcagcctgaagctggccaacggaagagtgatcgagaagacactgtacaacagaagaacccggcaggatgagcctgccctgttcgtggccctgaccttcgagcggcgggaggtcctggactcctccaatatcaaaccaatgaacctgatcggcgtggcaagaggcgaaaacatccccgccgtgatcgccctgaccgaccccgagggctgcccactgagccggtttaaggatagcctgggaaacccaacccacatcctgagaatcggcgagagctataaggagaagcagcggaccatccaggccaagaaggaggtggagcagcggagagccggcggctacagccggaagtacgccagcaaagccaagaatctggcagacgatatggtgagaaacaccgctagagatctgctgtactacgccgtgacccaggatgccatgctgatcttcgccaacctgagccggggcttcggccggcagggcaagcggaccttcatggccgagagacagtacacacggatggaggactggctgaccgccaagctggcctacgagggcctgagcaagacctacctgtccaagacactggcccagtacacctccaagacatgcagcaactgtgggtttaccatcaccagcgccgactacgacagggtgctggagaagctgaagaagacagcaacaggctggatgaccacaattaacggcaaggagctgaaggtggagggccagattacctactacaacagatacaagagacagaacgtagtcaaggacctgtccgtcgagctggatagactgagcgaagaatctgtgaacaacgacatctcctcctggacaaagggcagaagcggagaagctctgagcctcctgaagaaaagattctcccatagacccgtgcaggagaagttcgtgtgcctgaactgcggcttcgagacacacgcagccgagcaagccgccctgaacatcgccagatcctggctgttcctgcggagccaggagtacaagaaataccagacaaacaagacaaccggcaacaccgataagagagccttcgtcgagacctggcagtccttttaccggaagaagcttaaggaggtgtggaaacctgccgtgcggtctggcggatctggcggaggctccacaagcatggccttcgaggacgtggccgtgtacttcagccaggaggagtggggcctgctggacaccgcccagagggccctgtacaggagggtgatgctggagaacttcaccctggtgaccagcctgggcctgagcaccagcaggccccacgtggtgatccagctggagaggggcgaggagccctgggtgcccagcggcaaggacatgaccctggccaggaacacctacaggaggctgaacgccggcgagaccagccccaagaaaaagagaaaagtctaagctgccttctgcggggcttgccttctggccatgcccttcttctctcccttgcacctgtacctcttggtctttgaataaagcctgagtaggaaggctagcaaaaaaaaaaaaaaaaaaaaaaaaaaaaaaaaaaaaaaaaaaaaaaaaaaaaaaaaaaaaaaaaaaaaaaaaaaaaaaaa

SEQ ID NO: 2536 - RNA, 5419 nt, synthetic construct
  source 1..5419: mol_type = other RNA
aggaaataagagagaaaagaagagtaagaagaaatataagagccaccatggcccctaagaagaagcgtaaagtgagccgggtgaacggcagcggcagcggcggcggcatgaaccacgaccaggagttcgacccccctaaggtgtaccctcccgtccccgccgagaagagaaagcccatccgggtcctgagcctgttcgatggcatcgccaccggtctgctggtgctgaaggacctgggcatccaggtggataggtacattgcctccgaggtgtgcgaggactccatcaccgtgggaatggtgcgtcatcagggcaagatcatgtacgtgggcgacgtgcggagcgtgacacagaagcatatccaggagtggggccctttcgacctggtgatcggcggcagcccttgcaatgacctgagcatcgtgaacccagcccggaagggcctgtacgagggaaccggcagactgttcttcgagttttacagactgctgcacgacgcccggcctaaggaaggcgacgaccggcccttcttttggctgttcgagaatgtggtggccatgggagtcagcgacaagcgggatattagccggttcctggagagcaaccccgtgatgatcgatgccaaggaagtgagcgccgcccaccgggccagatacttctggggcaatctgcctggcatgaacagacccctggccagcaccgtgaacgacaagctggagctgcaggagtgcctggagcacggccggatcgccaagttcagcaaggtgagaaccatcaccacccgaagcaacagcatcaaacaaggcaaggaccagcactttcctgtgttcatgaacgagaaggaggacatcctgtggtgtaccgagatggagagagtgttcgggttcccagtccactacacagatgtcagcaacatgtctagactggccagacagagactgctgggaagaagctggtccgtccctgtgatcagacacctgttcgcccctctgaaggagtacttcgcctgcgtgagcagcggcaacagcaacgccaacagccggggccccagcttctctagcggcctggtgccactgtccctgagagggagccacatgggccccatggagatctacaaaaccgtgagcgcctggaagcggcagcctgtgcgcgtgctgagcctgtttcggaatatcgataaagtcctgaaaagcctgggattcctggagagcggctctggctccggcggtggcaccctgaagtacgtggaggatgtgacaaacgtggtcagacgggatgtggagaagtggggccccttcgatctggtgtacggcagcacccaacccctgggcagctcttgtgaccggtgccctggctggtacatgtttcagttccaccggatcctgcagtacgccctgccgagacaggagtcccagcggccattcttttggattttcatggacaacttgctgctgaccgaggatgaccaggaaactaccactcggttcctgcagaccgaagccgtgaccctgcaggacgtgagaggccgggactaccagaacgccatgcgggtgtggtccaacatccctggactgaaaagcaagcacgcacctctgacccctaaagaagaggagtacctgcaggcccaggtgcggagcagaagcaagctggacgcccctaaggtggatctgctggtgaagaattgcctcctgcccctgagagagtacttcaagtatttcagccagaatagtctgcccctgggcggcccaagcagcggcgcccctcctcccagcggcggcagcccagccggctccccaacctctaccgaggagggcacctctgagtccgccacccccgagagcggccctggcacctccaccgagcccagcgagggcagcgcacccggcagccctgccggcagccccacctccacagaggagggaaccagcaccgagcccagcgaaggcagcgccccaggcaccagcaccgagcctagtgagggcggctctggcggcggcagcgcccaggagattaaacggatcaacaagatcagaagaagacttgtgaaagacagcaacaccaagaaggccggcaagacaggccccatgaaaaccctgctggttagagtgatgacacccgatctgagagagcggctggaaaacctgagaaagaagcctgaaaatatcccccagcccatcagcaatacatctagagccaacctgaataagctgctgaccgattacaccgaaatgaagaaggcgatcctgcatgtgtactgggaagagttccagaaggaccctgtgggcctgatgagccgggtggcccagcctgccagcaagaagatcgatcagaacaagctgaaacctgagatggacgagaagggcaacctgaccaccgccggctttgcctgctctcagtgtggccagcccctgttcgtgtacaagctggagcaggtgtctgagaagggcaaggcttacaccaactacttcggacggtgcaatgtggccgagcacgaaaagctgatcctgctggcccagctgaagcccgagaaggatagcgacgaagccgtgacatatagcctgggaaagtttgggcagagggccctggatttctacagcattcatgtgaccaaggagtccacccaccccgtgaagcccctggcccagatcgccggaaacagatacgcctccggacctgtgggaaaggccctgagcgacgcatgtatgggcacaatcgcctccttcctgtctaagtaccaggacatcatcatcgaacaccagaaggtggtgaagggcaaccagaagagactggagagcctgcgggagctggccggcaaggaaaacctggaataccctagcgtgaccctgccacctcagcctcacaccaaggagggcgttgatgcctacaacgaagtgatcgcccgggtgcgaatgtgggtgaacctgaacctgtggcagaagctgaagctaagcagagatgatgccaagcctctgctgagactgaagggattcccttcctttcctctggtcgagagacaggccaacgaagtggactggtgggacatggtgtgtaacgtgaagaagctgatcaacgagaaaaaggaggatggcaaggtgttttggcagaatctggctggctacaagagacaggaagccctgagaccatacctgagcagcgaggaagatcggaagaagggaaagaaattcgctcggtaccagctgggcgacctgctgctgcacctggaaaagaagcacggcgaggactggggaaaggtgtacgacgaggcctgggagcggattgacaagaaagtggaaggcctgagcaagcacatcaagctggaagaggaacggagaagcgaggacgcccagagcaaggccgccctgaccgactggctgcgggctaaggccagcttcgtgatcgagggcctgaaggaggccgacaaggacgagttctgcagatgcgagctgaagctgcagaagtggtacggggacctgcggggaaagcccttcgccatcgaagccgagaacagcatcctggacatcagcggcttcagcaagcagtacaactgtgccttcatctggcagaaggacggcgtgaagaagctgaacctgtacctgatcatcaactacttcaagggcggcaagctgcggttcaagaagatcaaacctgaagccttcgaagccaacagattctacaccgtgatcaacaaaaagagcggcgagatcgtgcccatggaggtgaacttcaacttcgacgaccccaacctgatcatcctgcctctggcctttggcaagagacagggcagagaattcatctggaacgacctgctgtccctggaaaccggcagcctgaagctggccaacggaagagtgatcgagaagacactgtacaacagaagaacccggcaggatgagcctgccctgttcgtggccctgaccttcgagcggcgggaggtcctggactcctccaatatcaaaccaatgaacctgatcggcgtggcaagaggcgaaaacatccccgccgtgatcgccctgaccgaccccgagggctgcccactgagccggtttaaggatagcctgggaaacccaacccacatcctgagaatcggcgagagctataaggagaagcagcggaccatccaggccaagaaggaggtggagcagcggagagccggcggctacagccggaagtacgccagcaaagccaagaatctggcagacgatatggtgagaaacaccgctagagatctgctgtactacgccgtgacccaggatgccatgctgatcttcgccaacctgagccggggcttcggccggcagggcaagcggaccttcatggccgagagacagtacacacggatggaggactggctgaccgccaagctggcctacgagggcctgagcaagacctacctgtccaagacactggcccagtacacctccaagacatgcagcaactgtgggtttaccatcaccagcgccgactacgacagggtgctggagaagctgaagaagacagcaacaggctggatgaccacaattaacggcaaggagctgaaggtggagggccagattacctactacaacagatacaagagacagaacgtagtcaaggacctgtccgtcgagctggatagactgagcgaagaatctgtgaacaacgacatctcctcctggacaaagggcagaagcggagaagctctgagcctcctgaagaaaagattctcccatagacccgtgcaggagaagttcgtgtgcctgaactgcggcttcgagacacacgcagccgagcaagccgccctgaacatcgccagatcctggctgttcctgcggagccaggagtacaagaaataccagacaaacaagacaaccggcaacaccgataagagagccttcgtcgagacctggcagtccttttaccggaagaagcttaaggaggtgtggaaacctgccgtgcggtctggcggatctggcggaggctccacaagcatggccttcgaggacgtggccgtgtacttcagccaggaggagtggggcctgctggacaccgcccagagggccctgtacaggagggtgatgctggacaacttcgccctggtggccagcctgggcctgagcaccagcaggcccagggtggtgatccagctggagaggggcgaggagccctgggtgcccagcggcaccgacaccgtgctgagcaggaacacctacaggaggaggaaccccggcagcaccagccccaagaaaaagagaaaagtctaagctgccttctgcggggcttgccttctggccatgcccttcttctctcccttgcacctgtacctcttggtctttgaataaagcctgagtaggaaggctagcaaaaaaaaaaaaaaaaaaaaaaaaaaaaaaaaaaaaaaaaaaaaaaaaaaaaaaaaaaaaaaaaaaaaaaaaaaaaaaaa

SEQ ID NO: 2537 - RNA, 5419 nt, synthetic construct
  source 1..5419: mol_type = other RNA
aggaaataagagagaaaagaagagtaagaagaaatataagagccaccatggcccctaagaagaagcgtaaagtgagccgggtgaacggcagcggcagcggcggcggcatgaaccacgaccaggagttcgacccccctaaggtgtaccctcccgtccccgccgagaagagaaagcccatccgggtcctgagcctgttcgatggcatcgccaccggtctgctggtgctgaaggacctgggcatccaggtggataggtacattgcctccgaggtgtgcgaggactccatcaccgtgggaatggtgcgtcatcagggcaagatcatgtacgtgggcgacgtgcggagcgtgacacagaagcatatccaggagtggggccctttcgacctggtgatcggcggcagcccttgcaatgacctgagcatcgtgaacccagcccggaagggcctgtacgagggaaccggcagactgttcttcgagttttacagactgctgcacgacgcccggcctaaggaaggcgacgaccggcccttcttttggctgttcgagaatgtggtggccatgggagtcagcgacaagcgggatattagccggttcctggagagcaaccccgtgatgatcgatgccaaggaagtgagcgccgcccaccgggccagatacttctggggcaatctgcctggcatgaacagacccctggccagcaccgtgaacgacaagctggagctgcaggagtgcctggagcacggccggatcgccaagttcagcaaggtgagaaccatcaccacccgaagcaacagcatcaaacaaggcaaggaccagcactttcctgtgttcatgaacgagaaggaggacatcctgtggtgtaccgagatggagagagtgttcgggttcccagtccactacacagatgtcagcaacatgtctagactggccagacagagactgctgggaagaagctggtccgtccctgtgatcagacacctgttcgcccctctgaaggagtacttcgcctgcgtgagcagcggcaacagcaacgccaacagccggggccccagcttctctagcggcctggtgccactgtccctgagagggagccacatgggccccatggagatctacaaaaccgtgagcgcctggaagcggcagcctgtgcgcgtgctgagcctgtttcggaatatcgataaagtcctgaaaagcctgggattcctggagagcggctctggctccggcggtggcaccctgaagtacgtggaggatgtgacaaacgtggtcagacgggatgtggagaagtggggccccttcgatctggtgtacggcagcacccaacccctgggcagctcttgtgaccggtgccctggctggtacatgtttcagttccaccggatcctgcagtacgccctgccgagacaggagtcccagcggccattcttttggattttcatggacaacttgctgctgaccgaggatgaccaggaaactaccactcggttcctgcagaccgaagccgtgaccctgcaggacgtgagaggccgggactaccagaacgccatgcgggtgtggtccaacatccctggactgaaaagcaagcacgcacctctgacccctaaagaagaggagtacctgcaggcccaggtgcggagcagaagcaagctggacgcccctaaggtggatctgctggtgaagaattgcctcctgcccctgagagagtacttcaagtatttcagccagaatagtctgcccctgggcggcccaagcagcggcgcccctcctcccagcggcggcagcccagccggctccccaacctctaccgaggagggcacctctgagtccgccacccccgagagcggccctggcacctccaccgagcccagcgagggcagcgcacccggcagccctgccggcagccccacctccacagaggagggaaccagcaccgagcccagcgaaggcagcgccccaggcaccagcaccgagcctagtgagggcggctctggcggcggcagcgcccaggagattaaacggatcaacaagatcagaagaagacttgtgaaagacagcaacaccaagaaggccggcaagacaggccccatgaaaaccctgctggttagagtgatgacacccgatctgagagagcggctggaaaacctgagaaagaagcctgaaaatatcccccagcccatcagcaatacatctagagccaacctgaataagctgctgaccgattacaccgaaatgaagaaggcgatcctgcatgtgtactgggaagagttccagaaggaccctgtgggcctgatgagccgggtggcccagcctgccagcaagaagatcgatcagaacaagctgaaacctgagatggacgagaagggcaacctgaccaccgccggctttgcctgctctcagtgtggccagcccctgttcgtgtacaagctggagcaggtgtctgagaagggcaaggcttacaccaactacttcggacggtgcaatgtggccgagcacgaaaagctgatcctgctggcccagctgaagcccgagaaggatagcgacgaagccgtgacatatagcctgggaaagtttgggcagagggccctggatttctacagcattcatgtgaccaaggagtccacccaccccgtgaagcccctggcccagatcgccggaaacagatacgcctccggacctgtgggaaaggccctgagcgacgcatgtatgggcacaatcgcctccttcctgtctaagtaccaggacatcatcatcgaacaccagaaggtggtgaagggcaaccagaagagactggagagcctgcgggagctggccggcaaggaaaacctggaataccctagcgtgaccctgccacctcagcctcacaccaaggagggcgttgatgcctacaacgaagtgatcgcccgggtgcgaatgtgggtgaacctgaacctgtggcagaagctgaagctaagcagagatgatgccaagcctctgctgagactgaagggattcccttcctttcctctggtcgagagacaggccaacgaagtggactggtgggacatggtgtgtaacgtgaagaagctgatcaacgagaaaaaggaggatggcaaggtgttttggcagaatctggctggctacaagagacaggaagccctgagaccatacctgagcagcgaggaagatcggaagaagggaaagaaattcgctcggtaccagctgggcgacctgctgctgcacctggaaaagaagcacggcgaggactggggaaaggtgtacgacgaggcctgggagcggattgacaagaaagtggaaggcctgagcaagcacatcaagctggaagaggaacggagaagcgaggacgcccagagcaaggccgccctgaccgactggctgcgggctaaggccagcttcgtgatcgagggcctgaaggaggccgacaaggacgagttctgcagatgcgagctgaagctgcagaagtggtacggggacctgcggggaaagcccttcgccatcgaagccgagaacagcatcctggacatcagcggcttcagcaagcagtacaactgtgccttcatctggcagaaggacggcgtgaagaagctgaacctgtacctgatcatcaactacttcaagggcggcaagctgcggttcaagaagatcaaacctgaagccttcgaagccaacagattctacaccgtgatcaacaaaaagagcggcgagatcgtgcccatggaggtgaacttcaacttcgacgaccccaacctgatcatcctgcctctggcctttggcaagagacagggcagagaattcatctggaacgacctgctgtccctggaaaccggcagcctgaagctggccaacggaagagtgatcgagaagacactgtacaacagaagaacccggcaggatgagcctgccctgttcgtggccctgaccttcgagcggcgggaggtcctggactcctccaatatcaaaccaatgaacctgatcggcgtggcaagaggcgaaaacatccccgccgtgatcgccctgaccgaccccgagggctgcccactgagccggtttaaggatagcctgggaaacccaacccacatcctgagaatcggcgagagctataaggagaagcagcggaccatccaggccaagaaggaggtggagcagcggagagccggcggctacagccggaagtacgccagcaaagccaagaatctggcagacgatatggtgagaaacaccgctagagatctgctgtactacgccgtgacccaggatgccatgctgatcttcgccaacctgagccggggcttcggccggcagggcaagcggaccttcatggccgagagacagtacacacggatggaggactggctgaccgccaagctggcctacgagggcctgagcaagacctacctgtccaagacactggcccagtacacctccaagacatgcagcaactgtgggtttaccatcaccagcgccgactacgacagggtgctggagaagctgaagaagacagcaacaggctggatgaccacaattaacggcaaggagctgaaggtggagggccagattacctactacaacagatacaagagacagaacgtagtcaaggacctgtccgtcgagctggatagactgagcgaagaatctgtgaacaacgacatctcctcctggacaaagggcagaagcggagaagctctgagcctcctgaagaaaagattctcccatagacccgtgcaggagaagttcgtgtgcctgaactgcggcttcgagacacacgcagccgagcaagccgccctgaacatcgccagatcctggctgttcctgcggagccaggagtacaagaaataccagacaaacaagacaaccggcaacaccgataagagagccttcgtcgagacctggcagtccttttaccggaagaagcttaaggaggtgtggaaacctgccgtgcggtctggcggatctggcggaggctccacaagcaagcccggcgccgtgagcttcgccgacgtggccgtgtacttcagccccgaggagtggggctgcctgaggcccgcccagagggccctgtacagggacgtgatgagggagacctacggccacctgggcgccctgggcttccccggccccaagcccgccctgatcagctggatggagcaggagaccgaggcctggagccccgccgcccaggaccccgagaagggcgagaggctgggcggcgccaggaccagccccaagaaaaagagaaaagtctaagctgccttctgcggggcttgccttctggccatgcccttcttctctcccttgcacctgtacctcttggtctttgaataaagcctgagtaggaaggctagcaaaaaaaaaaaaaaaaaaaaaaaaaaaaaaaaaaaaaaaaaaaaaaaaaaaaaaaaaaaaaaaaaaaaaaaaaaaaaaaa

SEQ ID NO: 2538 - RNA, 5419 nt, synthetic construct
  source 1..5419: mol_type = other RNA
aggaaataagagagaaaagaagagtaagaagaaatataagagccaccatggcccctaagaagaagcgtaaagtgagccgggtgaacggcagcggcagcggcggcggcatgaaccacgaccaggagttcgacccccctaaggtgtaccctcccgtccccgccgagaagagaaagcccatccgggtcctgagcctgttcgatggcatcgccaccggtctgctggtgctgaaggacctgggcatccaggtggataggtacattgcctccgaggtgtgcgaggactccatcaccgtgggaatggtgcgtcatcagggcaagatcatgtacgtgggcgacgtgcggagcgtgacacagaagcatatccaggagtggggccctttcgacctggtgatcggcggcagcccttgcaatgacctgagcatcgtgaacccagcccggaagggcctgtacgagggaaccggcagactgttcttcgagttttacagactgctgcacgacgcccggcctaaggaaggcgacgaccggcccttcttttggctgttcgagaatgtggtggccatgggagtcagcgacaagcgggatattagccggttcctggagagcaaccccgtgatgatcgatgccaaggaagtgagcgccgcccaccgggccagatacttctggggcaatctgcctggcatgaacagacccctggccagcaccgtgaacgacaagctggagctgcaggagtgcctggagcacggccggatcgccaagttcagcaaggtgagaaccatcaccacccgaagcaacagcatcaaacaaggcaaggaccagcactttcctgtgttcatgaacgagaaggaggacatcctgtggtgtaccgagatggagagagtgttcgggttcccagtccactacacagatgtcagcaacatgtctagactggccagacagagactgctgggaagaagctggtccgtccctgtgatcagacacctgttcgcccctctgaaggagtacttcgcctgcgtgagcagcggcaacagcaacgccaacagccggggccccagcttctctagcggcctggtgccactgtccctgagagggagccacatgggccccatggagatctacaaaaccgtgagcgcctggaagcggcagcctgtgcgcgtgctgagcctgtttcggaatatcgataaagtcctgaaaagcctgggattcctggagagcggctctggctccggcggtggcaccctgaagtacgtggaggatgtgacaaacgtggtcagacgggatgtggagaagtggggccccttcgatctggtgtacggcagcacccaacccctgggcagctcttgtgaccggtgccctggctggtacatgtttcagttccaccggatcctgcagtacgccctgccgagacaggagtcccagcggccattcttttggattttcatggacaacttgctgctgaccgaggatgaccaggaaactaccactcggttcctgcagaccgaagccgtgaccctgcaggacgtgagaggccgggactaccagaacgccatgcgggtgtggtccaacatccctggactgaaaagcaagcacgcacctctgacccctaaagaagaggagtacctgcaggcccaggtgcggagcagaagcaagctggacgcccctaaggtggatctgctggtgaagaattgcctcctgcccctgagagagtacttcaagtatttcagccagaatagtctgcccctgggcggcccaagcagcggcgcccctcctcccagcggcggcagcccagccggctccccaacctctaccgaggagggcacctctgagtccgccacccccgagagcggccctggcacctccaccgagcccagcgagggcagcgcacccggcagccctgccggcagccccacctccacagaggagggaaccagcaccgagcccagcgaaggcagcgccccaggcaccagcaccgagcctagtgagggcggctctggcggcggcagcgcccaggagattaaacggatcaacaagatcagaagaagacttgtgaaagacagcaacaccaagaaggccggcaagacaggccccatgaaaaccctgctggttagagtgatgacacccgatctgagagagcggctggaaaacctgagaaagaagcctgaaaatatcccccagcccatcagcaatacatctagagccaacctgaataagctgctgaccgattacaccgaaatgaagaaggcgatcctgcatgtgtactgggaagagttccagaaggaccctgtgggcctgatgagccgggtggcccagcctgccagcaagaagatcgatcagaacaagctgaaacctgagatggacgagaagggcaacctgaccaccgccggctttgcctgctctcagtgtggccagcccctgttcgtgtacaagctggagcaggtgtctgagaagggcaaggcttacaccaactacttcggacggtgcaatgtggccgagcacgaaaagctgatcctgctggcccagctgaagcccgagaaggatagcgacgaagccgtgacatatagcctgggaaagtttgggcagagggccctggatttctacagcattcatgtgaccaaggagtccacccaccccgtgaagcccctggcccagatcgccggaaacagatacgcctccggacctgtgggaaaggccctgagcgacgcatgtatgggcacaatcgcctccttcctgtctaagtaccaggacatcatcatcgaacaccagaaggtggtgaagggcaaccagaagagactggagagcctgcgggagctggccggcaaggaaaacctggaataccctagcgtgaccctgccacctcagcctcacaccaaggagggcgttgatgcctacaacgaagtgatcgcccgggtgcgaatgtgggtgaacctgaacctgtggcagaagctgaagctaagcagagatgatgccaagcctctgctgagactgaagggattcccttcctttcctctggtcgagagacaggccaacgaagtggactggtgggacatggtgtgtaacgtgaagaagctgatcaacgagaaaaaggaggatggcaaggtgttttggcagaatctggctggctacaagagacaggaagccctgagaccatacctgagcagcgaggaagatcggaagaagggaaagaaattcgctcggtaccagctgggcgacctgctgctgcacctggaaaagaagcacggcgaggactggggaaaggtgtacgacgaggcctgggagcggattgacaagaaagtggaaggcctgagcaagcacatcaagctggaagaggaacggagaagcgaggacgcccagagcaaggccgccctgaccgactggctgcgggctaaggccagcttcgtgatcgagggcctgaaggaggccgacaaggacgagttctgcagatgcgagctgaagctgcagaagtggtacggggacctgcggggaaagcccttcgccatcgaagccgagaacagcatcctggacatcagcggcttcagcaagcagtacaactgtgccttcatctggcagaaggacggcgtgaagaagctgaacctgtacctgatcatcaactacttcaagggcggcaagctgcggttcaagaagatcaaacctgaagccttcgaagccaacagattctacaccgtgatcaacaaaaagagcggcgagatcgtgcccatggaggtgaacttcaacttcgacgaccccaacctgatcatcctgcctctggcctttggcaagagacagggcagagaattcatctggaacgacctgctgtccctggaaaccggcagcctgaagctggccaacggaagagtgatcgagaagacactgtacaacagaagaacccggcaggatgagcctgccctgttcgtggccctgaccttcgagcggcgggaggtcctggactcctccaatatcaaaccaatgaacctgatcggcgtggcaagaggcgaaaacatccccgccgtgatcgccctgaccgaccccgagggctgcccactgagccggtttaaggatagcctgggaaacccaacccacatcctgagaatcggcgagagctataaggagaagcagcggaccatccaggccaagaaggaggtggagcagcggagagccggcggctacagccggaagtacgccagcaaagccaagaatctggcagacgatatggtgagaaacaccgctagagatctgctgtactacgccgtgacccaggatgccatgctgatcttcgccaacctgagccggggcttcggccggcagggcaagcggaccttcatggccgagagacagtacacacggatggaggactggctgaccgccaagctggcctacgagggcctgagcaagacctacctgtccaagacactggcccagtacacctccaagacatgcagcaactgtgggtttaccatcaccagcgccgactacgacagggtgctggagaagctgaagaagacagcaacaggctggatgaccacaattaacggcaaggagctgaaggtggagggccagattacctactacaacagatacaagagacagaacgtagtcaaggacctgtccgtcgagctggatagactgagcgaagaatctgtgaacaacgacatctcctcctggacaaagggcagaagcggagaagctctgagcctcctgaagaaaagattctcccatagacccgtgcaggagaagttcgtgtgcctgaactgcggcttcgagacacacgcagccgagcaagccgccctgaacatcgccagatcctggctgttcctgcggagccaggagtacaagaaataccagacaaacaagacaaccggcaacaccgataagagagccttcgtcgagacctggcagtccttttaccggaagaagcttaaggaggtgtggaaacctgccgtgcggtctggcggatctggcggaggctccacaagcatggccttcgaggacgtggccgtgtacttcagccaggaggagtggggcctgctggacaccgcccagagggccctgtacaggagggtgatgctggacaacttcgccctggtggccagcctgggcctgagcaccagcaggcccagggtggtgatccagctggagaggggcgaggagccctgggtgcccagcggcaaggacatgaccctggccaggaacacctacggcaggctgaacagcggcagcaccagccccaagaaaaagagaaaagtctaagctgccttctgcggggcttgccttctggccatgcccttcttctctcccttgcacctgtacctcttggtctttgaataaagcctgagtaggaaggctagcaaaaaaaaaaaaaaaaaaaaaaaaaaaaaaaaaaaaaaaaaaaaaaaaaaaaaaaaaaaaaaaaaaaaaaaaaaaaaaaa

SEQ ID NO: 2539 - RNA, 5419 nt, synthetic construct
  source 1..5419: mol_type = other RNA
aggaaataagagagaaaagaagagtaagaagaaatataagagccaccatggcccctaagaagaagcgtaaagtgagccgggtgaacggcagcggcagcggcggcggcatgaaccacgaccaggagttcgacccccctaaggtgtaccctcccgtccccgccgagaagagaaagcccatccgggtcctgagcctgttcgatggcatcgccaccggtctgctggtgctgaaggacctgggcatccaggtggataggtacattgcctccgaggtgtgcgaggactccatcaccgtgggaatggtgcgtcatcagggcaagatcatgtacgtgggcgacgtgcggagcgtgacacagaagcatatccaggagtggggccctttcgacctggtgatcggcggcagcccttgcaatgacctgagcatcgtgaacccagcccggaagggcctgtacgagggaaccggcagactgttcttcgagttttacagactgctgcacgacgcccggcctaaggaaggcgacgaccggcccttcttttggctgttcgagaatgtggtggccatgggagtcagcgacaagcgggatattagccggttcctggagagcaaccccgtgatgatcgatgccaaggaagtgagcgccgcccaccgggccagatacttctggggcaatctgcctggcatgaacagacccctggccagcaccgtgaacgacaagctggagctgcaggagtgcctggagcacggccggatcgccaagttcagcaaggtgagaaccatcaccacccgaagcaacagcatcaaacaaggcaaggaccagcactttcctgtgttcatgaacgagaaggaggacatcctgtggtgtaccgagatggagagagtgttcgggttcccagtccactacacagatgtcagcaacatgtctagactggccagacagagactgctgggaagaagctggtccgtccctgtgatcagacacctgttcgcccctctgaaggagtacttcgcctgcgtgagcagcggcaacagcaacgccaacagccggggccccagcttctctagcggcctggtgccactgtccctgagagggagccacatgggccccatggagatctacaaaaccgtgagcgcctggaagcggcagcctgtgcgcgtgctgagcctgtttcggaatatcgataaagtcctgaaaagcctgggattcctggagagcggctctggctccggcggtggcaccctgaagtacgtggaggatgtgacaaacgtggtcagacgggatgtggagaagtggggccccttcgatctggtgtacggcagcacccaacccctgggcagctcttgtgaccggtgccctggctggtacatgtttcagttccaccggatcctgcagtacgccctgccgagacaggagtcccagcggccattcttttggattttcatggacaacttgctgctgaccgaggatgaccaggaaactaccactcggttcctgcagaccgaagccgtgaccctgcaggacgtgagaggccgggactaccagaacgccatgcgggtgtggtccaacatccctggactgaaaagcaagcacgcacctctgacccctaaagaagaggagtacctgcaggcccaggtgcggagcagaagcaagctggacgcccctaaggtggatctgctggtgaagaattgcctcctgcccctgagagagtacttcaagtatttcagccagaatagtctgcccctgggcggcccaagcagcggcgcccctcctcccagcggcggcagcccagccggctccccaacctctaccgaggagggcacctctgagtccgccacccccgagagcggccctggcacctccaccgagcccagcgagggcagcgcacccggcagccctgccggcagccccacctccacagaggagggaaccagcaccgagcccagcgaaggcagcgccccaggcaccagcaccgagcctagtgagggcggctctggcggcggcagcgcccaggagattaaacggatcaacaagatcagaagaagacttgtgaaagacagcaacaccaagaaggccggcaagacaggccccatgaaaaccctgctggttagagtgatgacacccgatctgagagagcggctggaaaacctgagaaagaagcctgaaaatatcccccagcccatcagcaatacatctagagccaacctgaataagctgctgaccgattacaccgaaatgaagaaggcgatcctgcatgtgtactgggaagagttccagaaggaccctgtgggcctgatgagccgggtggcccagcctgccagcaagaagatcgatcagaacaagctgaaacctgagatggacgagaagggcaacctgaccaccgccggctttgcctgctctcagtgtggccagcccctgttcgtgtacaagctggagcaggtgtctgagaagggcaaggcttacaccaactacttcggacggtgcaatgtggccgagcacgaaaagctgatcctgctggcccagctgaagcccgagaaggatagcgacgaagccgtgacatatagcctgggaaagtttgggcagagggccctggatttctacagcattcatgtgaccaaggagtccacccaccccgtgaagcccctggcccagatcgccggaaacagatacgcctccggacctgtgggaaaggccctgagcgacgcatgtatgggcacaatcgcctccttcctgtctaagtaccaggacatcatcatcgaacaccagaaggtggtgaagggcaaccagaagagactggagagcctgcgggagctggccggcaaggaaaacctggaataccctagcgtgaccctgccacctcagcctcacaccaaggagggcgttgatgcctacaacgaagtgatcgcccgggtgcgaatgtgggtgaacctgaacctgtggcagaagctgaagctaagcagagatgatgccaagcctctgctgagactgaagggattcccttcctttcctctggtcgagagacaggccaacgaagtggactggtgggacatggtgtgtaacgtgaagaagctgatcaacgagaaaaaggaggatggcaaggtgttttggcagaatctggctggctacaagagacaggaagccctgagaccatacctgagcagcgaggaagatcggaagaagggaaagaaattcgctcggtaccagctgggcgacctgctgctgcacctggaaaagaagcacggcgaggactggggaaaggtgtacgacgaggcctgggagcggattgacaagaaagtggaaggcctgagcaagcacatcaagctggaagaggaacggagaagcgaggacgcccagagcaaggccgccctgaccgactggctgcgggctaaggccagcttcgtgatcgagggcctgaaggaggccgacaaggacgagttctgcagatgcgagctgaagctgcagaagtggtacggggacctgcggggaaagcccttcgccatcgaagccgagaacagcatcctggacatcagcggcttcagcaagcagtacaactgtgccttcatctggcagaaggacggcgtgaagaagctgaacctgtacctgatcatcaactacttcaagggcggcaagctgcggttcaagaagatcaaacctgaagccttcgaagccaacagattctacaccgtgatcaacaaaaagagcggcgagatcgtgcccatggaggtgaacttcaacttcgacgaccccaacctgatcatcctgcctctggcctttggcaagagacagggcagagaattcatctggaacgacctgctgtccctggaaaccggcagcctgaagctggccaacggaagagtgatcgagaagacactgtacaacagaagaacccggcaggatgagcctgccctgttcgtggccctgaccttcgagcggcgggaggtcctggactcctccaatatcaaaccaatgaacctgatcggcgtggcaagaggcgaaaacatccccgccgtgatcgccctgaccgaccccgagggctgcccactgagccggtttaaggatagcctgggaaacccaacccacatcctgagaatcggcgagagctataaggagaagcagcggaccatccaggccaagaaggaggtggagcagcggagagccggcggctacagccggaagtacgccagcaaagccaagaatctggcagacgatatggtgagaaacaccgctagagatctgctgtactacgccgtgacccaggatgccatgctgatcttcgccaacctgagccggggcttcggccggcagggcaagcggaccttcatggccgagagacagtacacacggatggaggactggctgaccgccaagctggcctacgagggcctgagcaagacctacctgtccaagacactggcccagtacacctccaagacatgcagcaactgtgggtttaccatcaccagcgccgactacgacagggtgctggagaagctgaagaagacagcaacaggctggatgaccacaattaacggcaaggagctgaaggtggagggccagattacctactacaacagatacaagagacagaacgtagtcaaggacctgtccgtcgagctggatagactgagcgaagaatctgtgaacaacgacatctcctcctggacaaagggcagaagcggagaagctctgagcctcctgaagaaaagattctcccatagacccgtgcaggagaagttcgtgtgcctgaactgcggcttcgagacacacgcagccgagcaagccgccctgaacatcgccagatcctggctgttcctgcggagccaggagtacaagaaataccagacaaacaagacaaccggcaacaccgataagagagccttcgtcgagacctggcagtccttttaccggaagaagcttaaggaggtgtggaaacctgccgtgcggtctggcggatctggcggaggctccacaagcagccagagccccctgaccttcggcgacgtggccgtggagttcagcggcgaggagtgggcctggctggacagcgcccagaggagcctgcacaggagcgtgatgctggagaactacaggaacctggccagcctgggcctgtgcctgagcaagcccgagatgatcagcagcctggagcagaggaaggagccctgggccgtgaagaggaagctgaccggcggcgagtgccccgacagccagaccctgaccagccccaagaaaaagagaaaagtctaagctgccttctgcggggcttgccttctggccatgcccttcttctctcccttgcacctgtacctcttggtctttgaataaagcctgagtaggaaggctagcaaaaaaaaaaaaaaaaaaaaaaaaaaaaaaaaaaaaaaaaaaaaaaaaaaaaaaaaaaaaaaaaaaaaaaaaaaaaaaaa

SEQ ID NO: 2540 - RNA, 5419 nt, synthetic construct
  source 1..5419: mol_type = other RNA
aggaaataagagagaaaagaagagtaagaagaaatataagagccaccatggcccctaagaagaagcgtaaagtgagccgggtgaacggcagcggcagcggcggcggcatgaaccacgaccaggagttcgacccccctaaggtgtaccctcccgtccccgccgagaagagaaagcccatccgggtcctgagcctgttcgatggcatcgccaccggtctgctggtgctgaaggacctgggcatccaggtggataggtacattgcctccgaggtgtgcgaggactccatcaccgtgggaatggtgcgtcatcagggcaagatcatgtacgtgggcgacgtgcggagcgtgacacagaagcatatccaggagtggggccctttcgacctggtgatcggcggcagcccttgcaatgacctgagcatcgtgaacccagcccggaagggcctgtacgagggaaccggcagactgttcttcgagttttacagactgctgcacgacgcccggcctaaggaaggcgacgaccggcccttcttttggctgttcgagaatgtggtggccatgggagtcagcgacaagcgggatattagccggttcctggagagcaaccccgtgatgatcgatgccaaggaagtgagcgccgcccaccgggccagatacttctggggcaatctgcctggcatgaacagacccctggccagcaccgtgaacgacaagctggagctgcaggagtgcctggagcacggccggatcgccaagttcagcaaggtgagaaccatcaccacccgaagcaacagcatcaaacaaggcaaggaccagcactttcctgtgttcatgaacgagaaggaggacatcctgtggtgtaccgagatggagagagtgttcgggttcccagtccactacacagatgtcagcaacatgtctagactggccagacagagactgctgggaagaagctggtccgtccctgtgatcagacacctgttcgcccctctgaaggagtacttcgcctgcgtgagcagcggcaacagcaacgccaacagccggggccccagcttctctagcggcctggtgccactgtccctgagagggagccacatgggccccatggagatctacaaaaccgtgagcgcctggaagcggcagcctgtgcgcgtgctgagcctgtttcggaatatcgataaagtcctgaaaagcctgggattcctggagagcggctctggctccggcggtggcaccctgaagtacgtggaggatgtgacaaacgtggtcagacgggatgtggagaagtggggccccttcgatctggtgtacggcagcacccaacccctgggcagctcttgtgaccggtgccctggctggtacatgtttcagttccaccggatcctgcagtacgccctgccgagacaggagtcccagcggccattcttttggattttcatggacaacttgctgctgaccgaggatgaccaggaaactaccactcggttcctgcagaccgaagccgtgaccctgcaggacgtgagaggccgggactaccagaacgccatgcgggtgtggtccaacatccctggactgaaaagcaagcacgcacctctgacccctaaagaagaggagtacctgcaggcccaggtgcggagcagaagcaagctggacgcccctaaggtggatctgctggtgaagaattgcctcctgcccctgagagagtacttcaagtatttcagccagaatagtctgcccctgggcggcccaagcagcggcgcccctcctcccagcggcggcagcccagccggctccccaacctctaccgaggagggcacctctgagtccgccacccccgagagcggccctggcacctccaccgagcccagcgagggcagcgcacccggcagccctgccggcagccccacctccacagaggagggaaccagcaccgagcccagcgaaggcagcgccccaggcaccagcaccgagcctagtgagggcggctctggcggcggcagcgcccaggagattaaacggatcaacaagatcagaagaagacttgtgaaagacagcaacaccaagaaggccggcaagacaggccccatgaaaaccctgctggttagagtgatgacacccgatctgagagagcggctggaaaacctgagaaagaagcctgaaaatatcccccagcccatcagcaatacatctagagccaacctgaataagctgctgaccgattacaccgaaatgaagaaggcgatcctgcatgtgtactgggaagagttccagaaggaccctgtgggcctgatgagccgggtggcccagcctgccagcaagaagatcgatcagaacaagctgaaacctgagatggacgagaagggcaacctgaccaccgccggctttgcctgctctcagtgtggccagcccctgttcgtgtacaagctggagcaggtgtctgagaagggcaaggcttacaccaactacttcggacggtgcaatgtggccgagcacgaaaagctgatcctgctggcccagctgaagcccgagaaggatagcgacgaagccgtgacatatagcctgggaaagtttgggcagagggccctggatttctacagcattcatgtgaccaaggagtccacccaccccgtgaagcccctggcccagatcgccggaaacagatacgcctccggacctgtgggaaaggccctgagcgacgcatgtatgggcacaatcgcctccttcctgtctaagtaccaggacatcatcatcgaacaccagaaggtggtgaagggcaaccagaagagactggagagcctgcgggagctggccggcaaggaaaacctggaataccctagcgtgaccctgccacctcagcctcacaccaaggagggcgttgatgcctacaacgaagtgatcgcccgggtgcgaatgtgggtgaacctgaacctgtggcagaagctgaagctaagcagagatgatgccaagcctctgctgagactgaagggattcccttcctttcctctggtcgagagacaggccaacgaagtggactggtgggacatggtgtgtaacgtgaagaagctgatcaacgagaaaaaggaggatggcaaggtgttttggcagaatctggctggctacaagagacaggaagccctgagaccatacctgagcagcgaggaagatcggaagaagggaaagaaattcgctcggtaccagctgggcgacctgctgctgcacctggaaaagaagcacggcgaggactggggaaaggtgtacgacgaggcctgggagcggattgacaagaaagtggaaggcctgagcaagcacatcaagctggaagaggaacggagaagcgaggacgcccagagcaaggccgccctgaccgactggctgcgggctaaggccagcttcgtgatcgagggcctgaaggaggccgacaaggacgagttctgcagatgcgagctgaagctgcagaagtggtacggggacctgcggggaaagcccttcgccatcgaagccgagaacagcatcctggacatcagcggcttcagcaagcagtacaactgtgccttcatctggcagaaggacggcgtgaagaagctgaacctgtacctgatcatcaactacttcaagggcggcaagctgcggttcaagaagatcaaacctgaagccttcgaagccaacagattctacaccgtgatcaacaaaaagagcggcgagatcgtgcccatggaggtgaacttcaacttcgacgaccccaacctgatcatcctgcctctggcctttggcaagagacagggcagagaattcatctggaacgacctgctgtccctggaaaccggcagcctgaagctggccaacggaagagtgatcgagaagacactgtacaacagaagaacccggcaggatgagcctgccctgttcgtggccctgaccttcgagcggcgggaggtcctggactcctccaatatcaaaccaatgaacctgatcggcgtggcaagaggcgaaaacatccccgccgtgatcgccctgaccgaccccgagggctgcccactgagccggtttaaggatagcctgggaaacccaacccacatcctgagaatcggcgagagctataaggagaagcagcggaccatccaggccaagaaggaggtggagcagcggagagccggcggctacagccggaagtacgccagcaaagccaagaatctggcagacgatatggtgagaaacaccgctagagatctgctgtactacgccgtgacccaggatgccatgctgatcttcgccaacctgagccggggcttcggccggcagggcaagcggaccttcatggccgagagacagtacacacggatggaggactggctgaccgccaagctggcctacgagggcctgagcaagacctacctgtccaagacactggcccagtacacctccaagacatgcagcaactgtgggtttaccatcaccagcgccgactacgacagggtgctggagaagctgaagaagacagcaacaggctggatgaccacaattaacggcaaggagctgaaggtggagggccagattacctactacaacagatacaagagacagaacgtagtcaaggacctgtccgtcgagctggatagactgagcgaagaatctgtgaacaacgacatctcctcctggacaaagggcagaagcggagaagctctgagcctcctgaagaaaagattctcccatagacccgtgcaggagaagttcgtgtgcctgaactgcggcttcgagacacacgcagccgagcaagccgccctgaacatcgccagatcctggctgttcctgcggagccaggagtacaagaaataccagacaaacaagacaaccggcaacaccgataagagagccttcgtcgagacctggcagtccttttaccggaagaagcttaaggaggtgtggaaacctgccgtgcggtctggcggatctggcggaggctccacaagcagccagagccccctgaccttcggcgacgtggccgtggagttcagcggcgaggagtgggcctggctggacagcgcccagaggagcctgcacaggagcgtgatgctggagaactacaggaacctggccagcctgggcctgtgcctgagcaagcccgagatgatcagcagcctggagcagaggaaggagccctgggccgtgaagaggaagagcaccggcggcgagtgcgccgacagccagaccctgaccagccccaagaaaaagagaaaagtctaagctgccttctgcggggcttgccttctggccatgcccttcttctctcccttgcacctgtacctcttggtctttgaataaagcctgagtaggaaggctagcaaaaaaaaaaaaaaaaaaaaaaaaaaaaaaaaaaaaaaaaaaaaaaaaaaaaaaaaaaaaaaaaaaaaaaaaaaaaaaaa

SEQ ID NO: 2541 - RNA, 5419 nt, synthetic construct
  source 1..5419: mol_type = other RNA
aggaaataagagagaaaagaagagtaagaagaaatataagagccaccatggcccctaagaagaagcgtaaagtgagccgggtgaacggcagcggcagcggcggcggcatgaaccacgaccaggagttcgacccccctaaggtgtaccctcccgtccccgccgagaagagaaagcccatccgggtcctgagcctgttcgatggcatcgccaccggtctgctggtgctgaaggacctgggcatccaggtggataggtacattgcctccgaggtgtgcgaggactccatcaccgtgggaatggtgcgtcatcagggcaagatcatgtacgtgggcgacgtgcggagcgtgacacagaagcatatccaggagtggggccctttcgacctggtgatcggcggcagcccttgcaatgacctgagcatcgtgaacccagcccggaagggcctgtacgagggaaccggcagactgttcttcgagttttacagactgctgcacgacgcccggcctaaggaaggcgacgaccggcccttcttttggctgttcgagaatgtggtggccatgggagtcagcgacaagcgggatattagccggttcctggagagcaaccccgtgatgatcgatgccaaggaagtgagcgccgcccaccgggccagatacttctggggcaatctgcctggcatgaacagacccctggccagcaccgtgaacgacaagctggagctgcaggagtgcctggagcacggccggatcgccaagttcagcaaggtgagaaccatcaccacccgaagcaacagcatcaaacaaggcaaggaccagcactttcctgtgttcatgaacgagaaggaggacatcctgtggtgtaccgagatggagagagtgttcgggttcccagtccactacacagatgtcagcaacatgtctagactggccagacagagactgctgggaagaagctggtccgtccctgtgatcagacacctgttcgcccctctgaaggagtacttcgcctgcgtgagcagcggcaacagcaacgccaacagccggggccccagcttctctagcggcctggtgccactgtccctgagagggagccacatgggccccatggagatctacaaaaccgtgagcgcctggaagcggcagcctgtgcgcgtgctgagcctgtttcggaatatcgataaagtcctgaaaagcctgggattcctggagagcggctctggctccggcggtggcaccctgaagtacgtggaggatgtgacaaacgtggtcagacgggatgtggagaagtggggccccttcgatctggtgtacggcagcacccaacccctgggcagctcttgtgaccggtgccctggctggtacatgtttcagttccaccggatcctgcagtacgccctgccgagacaggagtcccagcggccattcttttggattttcatggacaacttgctgctgaccgaggatgaccaggaaactaccactcggttcctgcagaccgaagccgtgaccctgcaggacgtgagaggccgggactaccagaacgccatgcgggtgtggtccaacatccctggactgaaaagcaagcacgcacctctgacccctaaagaagaggagtacctgcaggcccaggtgcggagcagaagcaagctggacgcccctaaggtggatctgctggtgaagaattgcctcctgcccctgagagagtacttcaagtatttcagccagaatagtctgcccctgggcggcccaagcagcggcgcccctcctcccagcggcggcagcccagccggctccccaacctctaccgaggagggcacctctgagtccgccacccccgagagcggccctggcacctccaccgagcccagcgagggcagcgcacccggcagccctgccggcagccccacctccacagaggagggaaccagcaccgagcccagcgaaggcagcgccccaggcaccagcaccgagcctagtgagggcggctctggcggcggcagcgcccaggagattaaacggatcaacaagatcagaagaagacttgtgaaagacagcaacaccaagaaggccggcaagacaggccccatgaaaaccctgctggttagagtgatgacacccgatctgagagagcggctggaaaacctgagaaagaagcctgaaaatatcccccagcccatcagcaatacatctagagccaacctgaataagctgctgaccgattacaccgaaatgaagaaggcgatcctgcatgtgtactgggaagagttccagaaggaccctgtgggcctgatgagccgggtggcccagcctgccagcaagaagatcgatcagaacaagctgaaacctgagatggacgagaagggcaacctgaccaccgccggctttgcctgctctcagtgtggccagcccctgttcgtgtacaagctggagcaggtgtctgagaagggcaaggcttacaccaactacttcggacggtgcaatgtggccgagcacgaaaagctgatcctgctggcccagctgaagcccgagaaggatagcgacgaagccgtgacatatagcctgggaaagtttgggcagagggccctggatttctacagcattcatgtgaccaaggagtccacccaccccgtgaagcccctggcccagatcgccggaaacagatacgcctccggacctgtgggaaaggccctgagcgacgcatgtatgggcacaatcgcctccttcctgtctaagtaccaggacatcatcatcgaacaccagaaggtggtgaagggcaaccagaagagactggagagcctgcgggagctggccggcaaggaaaacctggaataccctagcgtgaccctgccacctcagcctcacaccaaggagggcgttgatgcctacaacgaagtgatcgcccgggtgcgaatgtgggtgaacctgaacctgtggcagaagctgaagctaagcagagatgatgccaagcctctgctgagactgaagggattcccttcctttcctctggtcgagagacaggccaacgaagtggactggtgggacatggtgtgtaacgtgaagaagctgatcaacgagaaaaaggaggatggcaaggtgttttggcagaatctggctggctacaagagacaggaagccctgagaccatacctgagcagcgaggaagatcggaagaagggaaagaaattcgctcggtaccagctgggcgacctgctgctgcacctggaaaagaagcacggcgaggactggggaaaggtgtacgacgaggcctgggagcggattgacaagaaagtggaaggcctgagcaagcacatcaagctggaagaggaacggagaagcgaggacgcccagagcaaggccgccctgaccgactggctgcgggctaaggccagcttcgtgatcgagggcctgaaggaggccgacaaggacgagttctgcagatgcgagctgaagctgcagaagtggtacggggacctgcggggaaagcccttcgccatcgaagccgagaacagcatcctggacatcagcggcttcagcaagcagtacaactgtgccttcatctggcagaaggacggcgtgaagaagctgaacctgtacctgatcatcaactacttcaagggcggcaagctgcggttcaagaagatcaaacctgaagccttcgaagccaacagattctacaccgtgatcaacaaaaagagcggcgagatcgtgcccatggaggtgaacttcaacttcgacgaccccaacctgatcatcctgcctctggcctttggcaagagacagggcagagaattcatctggaacgacctgctgtccctggaaaccggcagcctgaagctggccaacggaagagtgatcgagaagacactgtacaacagaagaacccggcaggatgagcctgccctgttcgtggccctgaccttcgagcggcgggaggtcctggactcctccaatatcaaaccaatgaacctgatcggcgtggcaagaggcgaaaacatccccgccgtgatcgccctgaccgaccccgagggctgcccactgagccggtttaaggatagcctgggaaacccaacccacatcctgagaatcggcgagagctataaggagaagcagcggaccatccaggccaagaaggaggtggagcagcggagagccggcggctacagccggaagtacgccagcaaagccaagaatctggcagacgatatggtgagaaacaccgctagagatctgctgtactacgccgtgacccaggatgccatgctgatcttcgccaacctgagccggggcttcggccggcagggcaagcggaccttcatggccgagagacagtacacacggatggaggactggctgaccgccaagctggcctacgagggcctgagcaagacctacctgtccaagacactggcccagtacacctccaagacatgcagcaactgtgggtttaccatcaccagcgccgactacgacagggtgctggagaagctgaagaagacagcaacaggctggatgaccacaattaacggcaaggagctgaaggtggagggccagattacctactacaacagatacaagagacagaacgtagtcaaggacctgtccgtcgagctggatagactgagcgaagaatctgtgaacaacgacatctcctcctggacaaagggcagaagcggagaagctctgagcctcctgaagaaaagattctcccatagacccgtgcaggagaagttcgtgtgcctgaactgcggcttcgagacacacgcagccgagcaagccgccctgaacatcgccagatcctggctgttcctgcggagccaggagtacaagaaataccagacaaacaagacaaccggcaacaccgataagagagccttcgtcgagacctggcagtccttttaccggaagaagcttaaggaggtgtggaaacctgccgtgcggtctggcggatctggcggaggctccacaagcgacagggtgaagttcaccttcagcgacgtggccgtgtacttcagcgaggaggagtggcagctgctggaggagcagcagaaggagctgtaccagaacgtgatgaaggagaactacaccaccctgatgagcctgggctacaccaccgtgaagcccgacgtgatcagcaagatcgagcagggcaagcagcccctggtgagcagccccagcggcagcaagggcaggagggccatcggcaggcccagcaccagccccaagaaaaagagaaaagtctaagctgccttctgcggggcttgccttctggccatgcccttcttctctcccttgcacctgtacctcttggtctttgaataaagcctgagtaggaaggctagcaaaaaaaaaaaaaaaaaaaaaaaaaaaaaaaaaaaaaaaaaaaaaaaaaaaaaaaaaaaaaaaaaaaaaaaaaaaaaaaa

SEQ ID NO: 2542 - RNA, 5419 nt, synthetic construct
  source 1..5419: mol_type = other RNA
aggaaataagagagaaaagaagagtaagaagaaatataagagccaccatggcccctaagaagaagcgtaaagtgagccgggtgaacggcagcggcagcggcggcggcatgaaccacgaccaggagttcgacccccctaaggtgtaccctcccgtccccgccgagaagagaaagcccatccgggtcctgagcctgttcgatggcatcgccaccggtctgctggtgctgaaggacctgggcatccaggtggataggtacattgcctccgaggtgtgcgaggactccatcaccgtgggaatggtgcgtcatcagggcaagatcatgtacgtgggcgacgtgcggagcgtgacacagaagcatatccaggagtggggccctttcgacctggtgatcggcggcagcccttgcaatgacctgagcatcgtgaacccagcccggaagggcctgtacgagggaaccggcagactgttcttcgagttttacagactgctgcacgacgcccggcctaaggaaggcgacgaccggcccttcttttggctgttcgagaatgtggtggccatgggagtcagcgacaagcgggatattagccggttcctggagagcaaccccgtgatgatcgatgccaaggaagtgagcgccgcccaccgggccagatacttctggggcaatctgcctggcatgaacagacccctggccagcaccgtgaacgacaagctggagctgcaggagtgcctggagcacggccggatcgccaagttcagcaaggtgagaaccatcaccacccgaagcaacagcatcaaacaaggcaaggaccagcactttcctgtgttcatgaacgagaaggaggacatcctgtggtgtaccgagatggagagagtgttcgggttcccagtccactacacagatgtcagcaacatgtctagactggccagacagagactgctgggaagaagctggtccgtccctgtgatcagacacctgttcgcccctctgaaggagtacttcgcctgcgtgagcagcggcaacagcaacgccaacagccggggccccagcttctctagcggcctggtgccactgtccctgagagggagccacatgggccccatggagatctacaaaaccgtgagcgcctggaagcggcagcctgtgcgcgtgctgagcctgtttcggaatatcgataaagtcctgaaaagcctgggattcctggagagcggctctggctccggcggtggcaccctgaagtacgtggaggatgtgacaaacgtggtcagacgggatgtggagaagtggggccccttcgatctggtgtacggcagcacccaacccctgggcagctcttgtgaccggtgccctggctggtacatgtttcagttccaccggatcctgcagtacgccctgccgagacaggagtcccagcggccattcttttggattttcatggacaacttgctgctgaccgaggatgaccaggaaactaccactcggttcctgcagaccgaagccgtgaccctgcaggacgtgagaggccgggactaccagaacgccatgcgggtgtggtccaacatccctggactgaaaagcaagcacgcacctctgacccctaaagaagaggagtacctgcaggcccaggtgcggagcagaagcaagctggacgcccctaaggtggatctgctggtgaagaattgcctcctgcccctgagagagtacttcaagtatttcagccagaatagtctgcccctgggcggcccaagcagcggcgcccctcctcccagcggcggcagcccagccggctccccaacctctaccgaggagggcacctctgagtccgccacccccgagagcggccctggcacctccaccgagcccagcgagggcagcgcacccggcagccctgccggcagccccacctccacagaggagggaaccagcaccgagcccagcgaaggcagcgccccaggcaccagcaccgagcctagtgagggcggctctggcggcggcagcgcccaggagattaaacggatcaacaagatcagaagaagacttgtgaaagacagcaacaccaagaaggccggcaagacaggccccatgaaaaccctgctggttagagtgatgacacccgatctgagagagcggctggaaaacctgagaaagaagcctgaaaatatcccccagcccatcagcaatacatctagagccaacctgaataagctgctgaccgattacaccgaaatgaagaaggcgatcctgcatgtgtactgggaagagttccagaaggaccctgtgggcctgatgagccgggtggcccagcctgccagcaagaagatcgatcagaacaagctgaaacctgagatggacgagaagggcaacctgaccaccgccggctttgcctgctctcagtgtggccagcccctgttcgtgtacaagctggagcaggtgtctgagaagggcaaggcttacaccaactacttcggacggtgcaatgtggccgagcacgaaaagctgatcctgctggcccagctgaagcccgagaaggatagcgacgaagccgtgacatatagcctgggaaagtttgggcagagggccctggatttctacagcattcatgtgaccaaggagtccacccaccccgtgaagcccctggcccagatcgccggaaacagatacgcctccggacctgtgggaaaggccctgagcgacgcatgtatgggcacaatcgcctccttcctgtctaagtaccaggacatcatcatcgaacaccagaaggtggtgaagggcaaccagaagagactggagagcctgcgggagctggccggcaaggaaaacctggaataccctagcgtgaccctgccacctcagcctcacaccaaggagggcgttgatgcctacaacgaagtgatcgcccgggtgcgaatgtgggtgaacctgaacctgtggcagaagctgaagctaagcagagatgatgccaagcctctgctgagactgaagggattcccttcctttcctctggtcgagagacaggccaacgaagtggactggtgggacatggtgtgtaacgtgaagaagctgatcaacgagaaaaaggaggatggcaaggtgttttggcagaatctggctggctacaagagacaggaagccctgagaccatacctgagcagcgaggaagatcggaagaagggaaagaaattcgctcggtaccagctgggcgacctgctgctgcacctggaaaagaagcacggcgaggactggggaaaggtgtacgacgaggcctgggagcggattgacaagaaagtggaaggcctgagcaagcacatcaagctggaagaggaacggagaagcgaggacgcccagagcaaggccgccctgaccgactggctgcgggctaaggccagcttcgtgatcgagggcctgaaggaggccgacaaggacgagttctgcagatgcgagctgaagctgcagaagtggtacggggacctgcggggaaagcccttcgccatcgaagccgagaacagcatcctggacatcagcggcttcagcaagcagtacaactgtgccttcatctggcagaaggacggcgtgaagaagctgaacctgtacctgatcatcaactacttcaagggcggcaagctgcggttcaagaagatcaaacctgaagccttcgaagccaacagattctacaccgtgatcaacaaaaagagcggcgagatcgtgcccatggaggtgaacttcaacttcgacgaccccaacctgatcatcctgcctctggcctttggcaagagacagggcagagaattcatctggaacgacctgctgtccctggaaaccggcagcctgaagctggccaacggaagagtgatcgagaagacactgtacaacagaagaacccggcaggatgagcctgccctgttcgtggccctgaccttcgagcggcgggaggtcctggactcctccaatatcaaaccaatgaacctgatcggcgtggcaagaggcgaaaacatccccgccgtgatcgccctgaccgaccccgagggctgcccactgagccggtttaaggatagcctgggaaacccaacccacatcctgagaatcggcgagagctataaggagaagcagcggaccatccaggccaagaaggaggtggagcagcggagagccggcggctacagccggaagtacgccagcaaagccaagaatctggcagacgatatggtgagaaacaccgctagagatctgctgtactacgccgtgacccaggatgccatgctgatcttcgccaacctgagccggggcttcggccggcagggcaagcggaccttcatggccgagagacagtacacacggatggaggactggctgaccgccaagctggcctacgagggcctgagcaagacctacctgtccaagacactggcccagtacacctccaagacatgcagcaactgtgggtttaccatcaccagcgccgactacgacagggtgctggagaagctgaagaagacagcaacaggctggatgaccacaattaacggcaaggagctgaaggtggagggccagattacctactacaacagatacaagagacagaacgtagtcaaggacctgtccgtcgagctggatagactgagcgaagaatctgtgaacaacgacatctcctcctggacaaagggcagaagcggagaagctctgagcctcctgaagaaaagattctcccatagacccgtgcaggagaagttcgtgtgcctgaactgcggcttcgagacacacgcagccgagcaagccgccctgaacatcgccagatcctggctgttcctgcggagccaggagtacaagaaataccagacaaacaagacaaccggcaacaccgataagagagccttcgtcgagacctggcagtccttttaccggaagaagcttaaggaggtgtggaaacctgccgtgcggtctggcggatctggcggaggctccacaagcgccctgaggagcgtgatgttcagcgacatcagcatcgacttcagccccgaggagtgggactgcctggacctggagcagaaggacctgtacagggacgtgatgctggagaactacagcaacctggtgagcctgggctgcttcatcagcaagcccgacgtgatcagcctgctggagcagggcaaggagccctggaaggtggtgaggaagaggaggggccagtgccccgacctgcagaccaagtacaccagccccaagaaaaagagaaaagtctaagctgccttctgcggggcttgccttctggccatgcccttcttctctcccttgcacctgtacctcttggtctttgaataaagcctgagtaggaaggctagcaaaaaaaaaaaaaaaaaaaaaaaaaaaaaaaaaaaaaaaaaaaaaaaaaaaaaaaaaaaaaaaaaaaaaaaaaaaaaaaa

SEQ ID NO: 2543 - RNA, 5419 nt, synthetic construct
  source 1..5419: mol_type = other RNA
aggaaataagagagaaaagaagagtaagaagaaatataagagccaccatggcccctaagaagaagcgtaaagtgagccgggtgaacggcagcggcagcggcggcggcatgaaccacgaccaggagttcgacccccctaaggtgtaccctcccgtccccgccgagaagagaaagcccatccgggtcctgagcctgttcgatggcatcgccaccggtctgctggtgctgaaggacctgggcatccaggtggataggtacattgcctccgaggtgtgcgaggactccatcaccgtgggaatggtgcgtcatcagggcaagatcatgtacgtgggcgacgtgcggagcgtgacacagaagcatatccaggagtggggccctttcgacctggtgatcggcggcagcccttgcaatgacctgagcatcgtgaacccagcccggaagggcctgtacgagggaaccggcagactgttcttcgagttttacagactgctgcacgacgcccggcctaaggaaggcgacgaccggcccttcttttggctgttcgagaatgtggtggccatgggagtcagcgacaagcgggatattagccggttcctggagagcaaccccgtgatgatcgatgccaaggaagtgagcgccgcccaccgggccagatacttctggggcaatctgcctggcatgaacagacccctggccagcaccgtgaacgacaagctggagctgcaggagtgcctggagcacggccggatcgccaagttcagcaaggtgagaaccatcaccacccgaagcaacagcatcaaacaaggcaaggaccagcactttcctgtgttcatgaacgagaaggaggacatcctgtggtgtaccgagatggagagagtgttcgggttcccagtccactacacagatgtcagcaacatgtctagactggccagacagagactgctgggaagaagctggtccgtccctgtgatcagacacctgttcgcccctctgaaggagtacttcgcctgcgtgagcagcggcaacagcaacgccaacagccggggccccagcttctctagcggcctggtgccactgtccctgagagggagccacatgggccccatggagatctacaaaaccgtgagcgcctggaagcggcagcctgtgcgcgtgctgagcctgtttcggaatatcgataaagtcctgaaaagcctgggattcctggagagcggctctggctccggcggtggcaccctgaagtacgtggaggatgtgacaaacgtggtcagacgggatgtggagaagtggggccccttcgatctggtgtacggcagcacccaacccctgggcagctcttgtgaccggtgccctggctggtacatgtttcagttccaccggatcctgcagtacgccctgccgagacaggagtcccagcggccattcttttggattttcatggacaacttgctgctgaccgaggatgaccaggaaactaccactcggttcctgcagaccgaagccgtgaccctgcaggacgtgagaggccgggactaccagaacgccatgcgggtgtggtccaacatccctggactgaaaagcaagcacgcacctctgacccctaaagaagaggagtacctgcaggcccaggtgcggagcagaagcaagctggacgcccctaaggtggatctgctggtgaagaattgcctcctgcccctgagagagtacttcaagtatttcagccagaatagtctgcccctgggcggcccaagcagcggcgcccctcctcccagcggcggcagcccagccggctccccaacctctaccgaggagggcacctctgagtccgccacccccgagagcggccctggcacctccaccgagcccagcgagggcagcgcacccggcagccctgccggcagccccacctccacagaggagggaaccagcaccgagcccagcgaaggcagcgccccaggcaccagcaccgagcctagtgagggcggctctggcggcggcagcgcccaggagattaaacggatcaacaagatcagaagaagacttgtgaaagacagcaacaccaagaaggccggcaagacaggccccatgaaaaccctgctggttagagtgatgacacccgatctgagagagcggctggaaaacctgagaaagaagcctgaaaatatcccccagcccatcagcaatacatctagagccaacctgaataagctgctgaccgattacaccgaaatgaagaaggcgatcctgcatgtgtactgggaagagttccagaaggaccctgtgggcctgatgagccgggtggcccagcctgccagcaagaagatcgatcagaacaagctgaaacctgagatggacgagaagggcaacctgaccaccgccggctttgcctgctctcagtgtggccagcccctgttcgtgtacaagctggagcaggtgtctgagaagggcaaggcttacaccaactacttcggacggtgcaatgtggccgagcacgaaaagctgatcctgctggcccagctgaagcccgagaaggatagcgacgaagccgtgacatatagcctgggaaagtttgggcagagggccctggatttctacagcattcatgtgaccaaggagtccacccaccccgtgaagcccctggcccagatcgccggaaacagatacgcctccggacctgtgggaaaggccctgagcgacgcatgtatgggcacaatcgcctccttcctgtctaagtaccaggacatcatcatcgaacaccagaaggtggtgaagggcaaccagaagagactggagagcctgcgggagctggccggcaaggaaaacctggaataccctagcgtgaccctgccacctcagcctcacaccaaggagggcgttgatgcctacaacgaagtgatcgcccgggtgcgaatgtgggtgaacctgaacctgtggcagaagctgaagctaagcagagatgatgccaagcctctgctgagactgaagggattcccttcctttcctctggtcgagagacaggccaacgaagtggactggtgggacatggtgtgtaacgtgaagaagctgatcaacgagaaaaaggaggatggcaaggtgttttggcagaatctggctggctacaagagacaggaagccctgagaccatacctgagcagcgaggaagatcggaagaagggaaagaaattcgctcggtaccagctgggcgacctgctgctgcacctggaaaagaagcacggcgaggactggggaaaggtgtacgacgaggcctgggagcggattgacaagaaagtggaaggcctgagcaagcacatcaagctggaagaggaacggagaagcgaggacgcccagagcaaggccgccctgaccgactggctgcgggctaaggccagcttcgtgatcgagggcctgaaggaggccgacaaggacgagttctgcagatgcgagctgaagctgcagaagtggtacggggacctgcggggaaagcccttcgccatcgaagccgagaacagcatcctggacatcagcggcttcagcaagcagtacaactgtgccttcatctggcagaaggacggcgtgaagaagctgaacctgtacctgatcatcaactacttcaagggcggcaagctgcggttcaagaagatcaaacctgaagccttcgaagccaacagattctacaccgtgatcaacaaaaagagcggcgagatcgtgcccatggaggtgaacttcaacttcgacgaccccaacctgatcatcctgcctctggcctttggcaagagacagggcagagaattcatctggaacgacctgctgtccctggaaaccggcagcctgaagctggccaacggaagagtgatcgagaagacactgtacaacagaagaacccggcaggatgagcctgccctgttcgtggccctgaccttcgagcggcgggaggtcctggactcctccaatatcaaaccaatgaacctgatcggcgtggcaagaggcgaaaacatccccgccgtgatcgccctgaccgaccccgagggctgcccactgagccggtttaaggatagcctgggaaacccaacccacatcctgagaatcggcgagagctataaggagaagcagcggaccatccaggccaagaaggaggtggagcagcggagagccggcggctacagccggaagtacgccagcaaagccaagaatctggcagacgatatggtgagaaacaccgctagagatctgctgtactacgccgtgacccaggatgccatgctgatcttcgccaacctgagccggggcttcggccggcagggcaagcggaccttcatggccgagagacagtacacacggatggaggactggctgaccgccaagctggcctacgagggcctgagcaagacctacctgtccaagacactggcccagtacacctccaagacatgcagcaactgtgggtttaccatcaccagcgccgactacgacagggtgctggagaagctgaagaagacagcaacaggctggatgaccacaattaacggcaaggagctgaaggtggagggccagattacctactacaacagatacaagagacagaacgtagtcaaggacctgtccgtcgagctggatagactgagcgaagaatctgtgaacaacgacatctcctcctggacaaagggcagaagcggagaagctctgagcctcctgaagaaaagattctcccatagacccgtgcaggagaagttcgtgtgcctgaactgcggcttcgagacacacgcagccgagcaagccgccctgaacatcgccagatcctggctgttcctgcggagccaggagtacaagaaataccagacaaacaagacaaccggcaacaccgataagagagccttcgtcgagacctggcagtccttttaccggaagaagcttaaggaggtgtggaaacctgccgtgcggtctggcggatctggcggaggctccacaagcgccagggtggccgtgatgttcagcgacgtgagcatcgccttcagccaggaggagtgggagtacctggacctggcccagagggacctgtacaaggacgtgatgatggagaactacaggaacgtggccagcctggccggctgcttcatcagcaagcccgacgtgatcagcctgctggagcagggcaaggagccctggaaggtggtgaggaagaggaggaggaaccccgacctggagaccaaggacaccagccccaagaaaaagagaaaagtctaagctgccttctgcggggcttgccttctggccatgcccttcttctctcccttgcacctgtacctcttggtctttgaataaagcctgagtaggaaggctagcaaaaaaaaaaaaaaaaaaaaaaaaaaaaaaaaaaaaaaaaaaaaaaaaaaaaaaaaaaaaaaaaaaaaaaaaaaaaaaaa

SEQ ID NO: 2544 - RNA, 5419 nt, synthetic construct
  source 1..5419: mol_type = other RNA
aggaaataagagagaaaagaagagtaagaagaaatataagagccaccatggcccctaagaagaagcgtaaagtgagccgggtgaacggcagcggcagcggcggcggcatgaaccacgaccaggagttcgacccccctaaggtgtaccctcccgtccccgccgagaagagaaagcccatccgggtcctgagcctgttcgatggcatcgccaccggtctgctggtgctgaaggacctgggcatccaggtggataggtacattgcctccgaggtgtgcgaggactccatcaccgtgggaatggtgcgtcatcagggcaagatcatgtacgtgggcgacgtgcggagcgtgacacagaagcatatccaggagtggggccctttcgacctggtgatcggcggcagcccttgcaatgacctgagcatcgtgaacccagcccggaagggcctgtacgagggaaccggcagactgttcttcgagttttacagactgctgcacgacgcccggcctaaggaaggcgacgaccggcccttcttttggctgttcgagaatgtggtggccatgggagtcagcgacaagcgggatattagccggttcctggagagcaaccccgtgatgatcgatgccaaggaagtgagcgccgcccaccgggccagatacttctggggcaatctgcctggcatgaacagacccctggccagcaccgtgaacgacaagctggagctgcaggagtgcctggagcacggccggatcgccaagttcagcaaggtgagaaccatcaccacccgaagcaacagcatcaaacaaggcaaggaccagcactttcctgtgttcatgaacgagaaggaggacatcctgtggtgtaccgagatggagagagtgttcgggttcccagtccactacacagatgtcagcaacatgtctagactggccagacagagactgctgggaagaagctggtccgtccctgtgatcagacacctgttcgcccctctgaaggagtacttcgcctgcgtgagcagcggcaacagcaacgccaacagccggggccccagcttctctagcggcctggtgccactgtccctgagagggagccacatgggccccatggagatctacaaaaccgtgagcgcctggaagcggcagcctgtgcgcgtgctgagcctgtttcggaatatcgataaagtcctgaaaagcctgggattcctggagagcggctctggctccggcggtggcaccctgaagtacgtggaggatgtgacaaacgtggtcagacgggatgtggagaagtggggccccttcgatctggtgtacggcagcacccaacccctgggcagctcttgtgaccggtgccctggctggtacatgtttcagttccaccggatcctgcagtacgccctgccgagacaggagtcccagcggccattcttttggattttcatggacaacttgctgctgaccgaggatgaccaggaaactaccactcggttcctgcagaccgaagccgtgaccctgcaggacgtgagaggccgggactaccagaacgccatgcgggtgtggtccaacatccctggactgaaaagcaagcacgcacctctgacccctaaagaagaggagtacctgcaggcccaggtgcggagcagaagcaagctggacgcccctaaggtggatctgctggtgaagaattgcctcctgcccctgagagagtacttcaagtatttcagccagaatagtctgcccctgggcggcccaagcagcggcgcccctcctcccagcggcggcagcccagccggctccccaacctctaccgaggagggcacctctgagtccgccacccccgagagcggccctggcacctccaccgagcccagcgagggcagcgcacccggcagccctgccggcagccccacctccacagaggagggaaccagcaccgagcccagcgaaggcagcgccccaggcaccagcaccgagcctagtgagggcggctctggcggcggcagcgcccaggagattaaacggatcaacaagatcagaagaagacttgtgaaagacagcaacaccaagaaggccggcaagacaggccccatgaaaaccctgctggttagagtgatgacacccgatctgagagagcggctggaaaacctgagaaagaagcctgaaaatatcccccagcccatcagcaatacatctagagccaacctgaataagctgctgaccgattacaccgaaatgaagaaggcgatcctgcatgtgtactgggaagagttccagaaggaccctgtgggcctgatgagccgggtggcccagcctgccagcaagaagatcgatcagaacaagctgaaacctgagatggacgagaagggcaacctgaccaccgccggctttgcctgctctcagtgtggccagcccctgttcgtgtacaagctggagcaggtgtctgagaagggcaaggcttacaccaactacttcggacggtgcaatgtggccgagcacgaaaagctgatcctgctggcccagctgaagcccgagaaggatagcgacgaagccgtgacatatagcctgggaaagtttgggcagagggccctggatttctacagcattcatgtgaccaaggagtccacccaccccgtgaagcccctggcccagatcgccggaaacagatacgcctccggacctgtgggaaaggccctgagcgacgcatgtatgggcacaatcgcctccttcctgtctaagtaccaggacatcatcatcgaacaccagaaggtggtgaagggcaaccagaagagactggagagcctgcgggagctggccggcaaggaaaacctggaataccctagcgtgaccctgccacctcagcctcacaccaaggagggcgttgatgcctacaacgaagtgatcgcccgggtgcgaatgtgggtgaacctgaacctgtggcagaagctgaagctaagcagagatgatgccaagcctctgctgagactgaagggattcccttcctttcctctggtcgagagacaggccaacgaagtggactggtgggacatggtgtgtaacgtgaagaagctgatcaacgagaaaaaggaggatggcaaggtgttttggcagaatctggctggctacaagagacaggaagccctgagaccatacctgagcagcgaggaagatcggaagaagggaaagaaattcgctcggtaccagctgggcgacctgctgctgcacctggaaaagaagcacggcgaggactggggaaaggtgtacgacgaggcctgggagcggattgacaagaaagtggaaggcctgagcaagcacatcaagctggaagaggaacggagaagcgaggacgcccagagcaaggccgccctgaccgactggctgcgggctaaggccagcttcgtgatcgagggcctgaaggaggccgacaaggacgagttctgcagatgcgagctgaagctgcagaagtggtacggggacctgcggggaaagcccttcgccatcgaagccgagaacagcatcctggacatcagcggcttcagcaagcagtacaactgtgccttcatctggcagaaggacggcgtgaagaagctgaacctgtacctgatcatcaactacttcaagggcggcaagctgcggttcaagaagatcaaacctgaagccttcgaagccaacagattctacaccgtgatcaacaaaaagagcggcgagatcgtgcccatggaggtgaacttcaacttcgacgaccccaacctgatcatcctgcctctggcctttggcaagagacagggcagagaattcatctggaacgacctgctgtccctggaaaccggcagcctgaagctggccaacggaagagtgatcgagaagacactgtacaacagaagaacccggcaggatgagcctgccctgttcgtggccctgaccttcgagcggcgggaggtcctggactcctccaatatcaaaccaatgaacctgatcggcgtggcaagaggcgaaaacatccccgccgtgatcgccctgaccgaccccgagggctgcccactgagccggtttaaggatagcctgggaaacccaacccacatcctgagaatcggcgagagctataaggagaagcagcggaccatccaggccaagaaggaggtggagcagcggagagccggcggctacagccggaagtacgccagcaaagccaagaatctggcagacgatatggtgagaaacaccgctagagatctgctgtactacgccgtgacccaggatgccatgctgatcttcgccaacctgagccggggcttcggccggcagggcaagcggaccttcatggccgagagacagtacacacggatggaggactggctgaccgccaagctggcctacgagggcctgagcaagacctacctgtccaagacactggcccagtacacctccaagacatgcagcaactgtgggtttaccatcaccagcgccgactacgacagggtgctggagaagctgaagaagacagcaacaggctggatgaccacaattaacggcaaggagctgaaggtggagggccagattacctactacaacagatacaagagacagaacgtagtcaaggacctgtccgtcgagctggatagactgagcgaagaatctgtgaacaacgacatctcctcctggacaaagggcagaagcggagaagctctgagcctcctgaagaaaagattctcccatagacccgtgcaggagaagttcgtgtgcctgaactgcggcttcgagacacacgcagccgagcaagccgccctgaacatcgccagatcctggctgttcctgcggagccaggagtacaagaaataccagacaaacaagacaaccggcaacaccgataagagagccttcgtcgagacctggcagtccttttaccggaagaagcttaaggaggtgtggaaacctgccgtgcggtctggcggatctggcggaggctccacaagcccccagaagagcgtgaccttcgaggacgtggccgtgtacttcacccagaccgagtgggacggcctgagccccgcccagagggccctgtacagggacgtgatgctggagaactacggcaacgtggccagcctgggcttcagcctgctgaagcccgccgtgatcagccagctggagggcgccggcgagctgggcggccccagccccctggtggacggcaccgagaccggcccccagggcctgtggaccagccccaagaaaaagagaaaagtctaagctgccttctgcggggcttgccttctggccatgcccttcttctctcccttgcacctgtacctcttggtctttgaataaagcctgagtaggaaggctagcaaaaaaaaaaaaaaaaaaaaaaaaaaaaaaaaaaaaaaaaaaaaaaaaaaaaaaaaaaaaaaaaaaaaaaaaaaaaaaaa

SEQ ID NO: 2545 - RNA, 5419 nt, synthetic construct
  source 1..5419: mol_type = other RNA
aggaaataagagagaaaagaagagtaagaagaaatataagagccaccatggcccctaagaagaagcgtaaagtgagccgggtgaacggcagcggcagcggcggcggcatgaaccacgaccaggagttcgacccccctaaggtgtaccctcccgtccccgccgagaagagaaagcccatccgggtcctgagcctgttcgatggcatcgccaccggtctgctggtgctgaaggacctgggcatccaggtggataggtacattgcctccgaggtgtgcgaggactccatcaccgtgggaatggtgcgtcatcagggcaagatcatgtacgtgggcgacgtgcggagcgtgacacagaagcatatccaggagtggggccctttcgacctggtgatcggcggcagcccttgcaatgacctgagcatcgtgaacccagcccggaagggcctgtacgagggaaccggcagactgttcttcgagttttacagactgctgcacgacgcccggcctaaggaaggcgacgaccggcccttcttttggctgttcgagaatgtggtggccatgggagtcagcgacaagcgggatattagccggttcctggagagcaaccccgtgatgatcgatgccaaggaagtgagcgccgcccaccgggccagatacttctggggcaatctgcctggcatgaacagacccctggccagcaccgtgaacgacaagctggagctgcaggagtgcctggagcacggccggatcgccaagttcagcaaggtgagaaccatcaccacccgaagcaacagcatcaaacaaggcaaggaccagcactttcctgtgttcatgaacgagaaggaggacatcctgtggtgtaccgagatggagagagtgttcgggttcccagtccactacacagatgtcagcaacatgtctagactggccagacagagactgctgggaagaagctggtccgtccctgtgatcagacacctgttcgcccctctgaaggagtacttcgcctgcgtgagcagcggcaacagcaacgccaacagccggggccccagcttctctagcggcctggtgccactgtccctgagagggagccacatgggccccatggagatctacaaaaccgtgagcgcctggaagcggcagcctgtgcgcgtgctgagcctgtttcggaatatcgataaagtcctgaaaagcctgggattcctggagagcggctctggctccggcggtggcaccctgaagtacgtggaggatgtgacaaacgtggtcagacgggatgtggagaagtggggccccttcgatctggtgtacggcagcacccaacccctgggcagctcttgtgaccggtgccctggctggtacatgtttcagttccaccggatcctgcagtacgccctgccgagacaggagtcccagcggccattcttttggattttcatggacaacttgctgctgaccgaggatgaccaggaaactaccactcggttcctgcagaccgaagccgtgaccctgcaggacgtgagaggccgggactaccagaacgccatgcgggtgtggtccaacatccctggactgaaaagcaagcacgcacctctgacccctaaagaagaggagtacctgcaggcccaggtgcggagcagaagcaagctggacgcccctaaggtggatctgctggtgaagaattgcctcctgcccctgagagagtacttcaagtatttcagccagaatagtctgcccctgggcggcccaagcagcggcgcccctcctcccagcggcggcagcccagccggctccccaacctctaccgaggagggcacctctgagtccgccacccccgagagcggccctggcacctccaccgagcccagcgagggcagcgcacccggcagccctgccggcagccccacctccacagaggagggaaccagcaccgagcccagcgaaggcagcgccccaggcaccagcaccgagcctagtgagggcggctctggcggcggcagcgcccaggagattaaacggatcaacaagatcagaagaagacttgtgaaagacagcaacaccaagaaggccggcaagacaggccccatgaaaaccctgctggttagagtgatgacacccgatctgagagagcggctggaaaacctgagaaagaagcctgaaaatatcccccagcccatcagcaatacatctagagccaacctgaataagctgctgaccgattacaccgaaatgaagaaggcgatcctgcatgtgtactgggaagagttccagaaggaccctgtgggcctgatgagccgggtggcccagcctgccagcaagaagatcgatcagaacaagctgaaacctgagatggacgagaagggcaacctgaccaccgccggctttgcctgctctcagtgtggccagcccctgttcgtgtacaagctggagcaggtgtctgagaagggcaaggcttacaccaactacttcggacggtgcaatgtggccgagcacgaaaagctgatcctgctggcccagctgaagcccgagaaggatagcgacgaagccgtgacatatagcctgggaaagtttgggcagagggccctggatttctacagcattcatgtgaccaaggagtccacccaccccgtgaagcccctggcccagatcgccggaaacagatacgcctccggacctgtgggaaaggccctgagcgacgcatgtatgggcacaatcgcctccttcctgtctaagtaccaggacatcatcatcgaacaccagaaggtggtgaagggcaaccagaagagactggagagcctgcgggagctggccggcaaggaaaacctggaataccctagcgtgaccctgccacctcagcctcacaccaaggagggcgttgatgcctacaacgaagtgatcgcccgggtgcgaatgtgggtgaacctgaacctgtggcagaagctgaagctaagcagagatgatgccaagcctctgctgagactgaagggattcccttcctttcctctggtcgagagacaggccaacgaagtggactggtgggacatggtgtgtaacgtgaagaagctgatcaacgagaaaaaggaggatggcaaggtgttttggcagaatctggctggctacaagagacaggaagccctgagaccatacctgagcagcgaggaagatcggaagaagggaaagaaattcgctcggtaccagctgggcgacctgctgctgcacctggaaaagaagcacggcgaggactggggaaaggtgtacgacgaggcctgggagcggattgacaagaaagtggaaggcctgagcaagcacatcaagctggaagaggaacggagaagcgaggacgcccagagcaaggccgccctgaccgactggctgcgggctaaggccagcttcgtgatcgagggcctgaaggaggccgacaaggacgagttctgcagatgcgagctgaagctgcagaagtggtacggggacctgcggggaaagcccttcgccatcgaagccgagaacagcatcctggacatcagcggcttcagcaagcagtacaactgtgccttcatctggcagaaggacggcgtgaagaagctgaacctgtacctgatcatcaactacttcaagggcggcaagctgcggttcaagaagatcaaacctgaagccttcgaagccaacagattctacaccgtgatcaacaaaaagagcggcgagatcgtgcccatggaggtgaacttcaacttcgacgaccccaacctgatcatcctgcctctggcctttggcaagagacagggcagagaattcatctggaacgacctgctgtccctggaaaccggcagcctgaagctggccaacggaagagtgatcgagaagacactgtacaacagaagaacccggcaggatgagcctgccctgttcgtggccctgaccttcgagcggcgggaggtcctggactcctccaatatcaaaccaatgaacctgatcggcgtggcaagaggcgaaaacatccccgccgtgatcgccctgaccgaccccgagggctgcccactgagccggtttaaggatagcctgggaaacccaacccacatcctgagaatcggcgagagctataaggagaagcagcggaccatccaggccaagaaggaggtggagcagcggagagccggcggctacagccggaagtacgccagcaaagccaagaatctggcagacgatatggtgagaaacaccgctagagatctgctgtactacgccgtgacccaggatgccatgctgatcttcgccaacctgagccggggcttcggccggcagggcaagcggaccttcatggccgagagacagtacacacggatggaggactggctgaccgccaagctggcctacgagggcctgagcaagacctacctgtccaagacactggcccagtacacctccaagacatgcagcaactgtgggtttaccatcaccagcgccgactacgacagggtgctggagaagctgaagaagacagcaacaggctggatgaccacaattaacggcaaggagctgaaggtggagggccagattacctactacaacagatacaagagacagaacgtagtcaaggacctgtccgtcgagctggatagactgagcgaagaatctgtgaacaacgacatctcctcctggacaaagggcagaagcggagaagctctgagcctcctgaagaaaagattctcccatagacccgtgcaggagaagttcgtgtgcctgaactgcggcttcgagacacacgcagccgagcaagccgccctgaacatcgccagatcctggctgttcctgcggagccaggagtacaagaaataccagacaaacaagacaaccggcaacaccgataagagagccttcgtcgagacctggcagtccttttaccggaagaagcttaaggaggtgtggaaacctgccgtgcggtctggcggatctggcggaggctccacaagcttccaggcccccgtgaccttcggcgacctggccatctacttcagccaggaggagtgggagtgcctgagccccatccagaaggacctgtacgaggacgtgatgctggagaactaccagaacctggtgagcctgggcctgagcttcaggaggcccaacgtgatcaccctgctggagaagggcaaggccccctggatggtggagcccgtgaagaggaggaggggcctggacctgggcagcaagtgcaccagccccaagaaaaagagaaaagtctaagctgccttctgcggggcttgccttctggccatgcccttcttctctcccttgcacctgtacctcttggtctttgaataaagcctgagtaggaaggctagcaaaaaaaaaaaaaaaaaaaaaaaaaaaaaaaaaaaaaaaaaaaaaaaaaaaaaaaaaaaaaaaaaaaaaaaaaaaaaaaa

SEQ ID NO: 2546 - RNA, 5419 nt, synthetic construct
  source 1..5419: mol_type = other RNA
aggaaataagagagaaaagaagagtaagaagaaatataagagccaccatggcccctaagaagaagcgtaaagtgagccgggtgaacggcagcggcagcggcggcggcatgaaccacgaccaggagttcgacccccctaaggtgtaccctcccgtccccgccgagaagagaaagcccatccgggtcctgagcctgttcgatggcatcgccaccggtctgctggtgctgaaggacctgggcatccaggtggataggtacattgcctccgaggtgtgcgaggactccatcaccgtgggaatggtgcgtcatcagggcaagatcatgtacgtgggcgacgtgcggagcgtgacacagaagcatatccaggagtggggccctttcgacctggtgatcggcggcagcccttgcaatgacctgagcatcgtgaacccagcccggaagggcctgtacgagggaaccggcagactgttcttcgagttttacagactgctgcacgacgcccggcctaaggaaggcgacgaccggcccttcttttggctgttcgagaatgtggtggccatgggagtcagcgacaagcgggatattagccggttcctggagagcaaccccgtgatgatcgatgccaaggaagtgagcgccgcccaccgggccagatacttctggggcaatctgcctggcatgaacagacccctggccagcaccgtgaacgacaagctggagctgcaggagtgcctggagcacggccggatcgccaagttcagcaaggtgagaaccatcaccacccgaagcaacagcatcaaacaaggcaaggaccagcactttcctgtgttcatgaacgagaaggaggacatcctgtggtgtaccgagatggagagagtgttcgggttcccagtccactacacagatgtcagcaacatgtctagactggccagacagagactgctgggaagaagctggtccgtccctgtgatcagacacctgttcgcccctctgaaggagtacttcgcctgcgtgagcagcggcaacagcaacgccaacagccggggccccagcttctctagcggcctggtgccactgtccctgagagggagccacatgggccccatggagatctacaaaaccgtgagcgcctggaagcggcagcctgtgcgcgtgctgagcctgtttcggaatatcgataaagtcctgaaaagcctgggattcctggagagcggctctggctccggcggtggcaccctgaagtacgtggaggatgtgacaaacgtggtcagacgggatgtggagaagtggggccccttcgatctggtgtacggcagcacccaacccctgggcagctcttgtgaccggtgccctggctggtacatgtttcagttccaccggatcctgcagtacgccctgccgagacaggagtcccagcggccattcttttggattttcatggacaacttgctgctgaccgaggatgaccaggaaactaccactcggttcctgcagaccgaagccgtgaccctgcaggacgtgagaggccgggactaccagaacgccatgcgggtgtggtccaacatccctggactgaaaagcaagcacgcacctctgacccctaaagaagaggagtacctgcaggcccaggtgcggagcagaagcaagctggacgcccctaaggtggatctgctggtgaagaattgcctcctgcccctgagagagtacttcaagtatttcagccagaatagtctgcccctgggcggcccaagcagcggcgcccctcctcccagcggcggcagcccagccggctccccaacctctaccgaggagggcacctctgagtccgccacccccgagagcggccctggcacctccaccgagcccagcgagggcagcgcacccggcagccctgccggcagccccacctccacagaggagggaaccagcaccgagcccagcgaaggcagcgccccaggcaccagcaccgagcctagtgagggcggctctggcggcggcagcgcccaggagattaaacggatcaacaagatcagaagaagacttgtgaaagacagcaacaccaagaaggccggcaagacaggccccatgaaaaccctgctggttagagtgatgacacccgatctgagagagcggctggaaaacctgagaaagaagcctgaaaatatcccccagcccatcagcaatacatctagagccaacctgaataagctgctgaccgattacaccgaaatgaagaaggcgatcctgcatgtgtactgggaagagttccagaaggaccctgtgggcctgatgagccgggtggcccagcctgccagcaagaagatcgatcagaacaagctgaaacctgagatggacgagaagggcaacctgaccaccgccggctttgcctgctctcagtgtggccagcccctgttcgtgtacaagctggagcaggtgtctgagaagggcaaggcttacaccaactacttcggacggtgcaatgtggccgagcacgaaaagctgatcctgctggcccagctgaagcccgagaaggatagcgacgaagccgtgacatatagcctgggaaagtttgggcagagggccctggatttctacagcattcatgtgaccaaggagtccacccaccccgtgaagcccctggcccagatcgccggaaacagatacgcctccggacctgtgggaaaggccctgagcgacgcatgtatgggcacaatcgcctccttcctgtctaagtaccaggacatcatcatcgaacaccagaaggtggtgaagggcaaccagaagagactggagagcctgcgggagctggccggcaaggaaaacctggaataccctagcgtgaccctgccacctcagcctcacaccaaggagggcgttgatgcctacaacgaagtgatcgcccgggtgcgaatgtgggtgaacctgaacctgtggcagaagctgaagctaagcagagatgatgccaagcctctgctgagactgaagggattcccttcctttcctctggtcgagagacaggccaacgaagtggactggtgggacatggtgtgtaacgtgaagaagctgatcaacgagaaaaaggaggatggcaaggtgttttggcagaatctggctggctacaagagacaggaagccctgagaccatacctgagcagcgaggaagatcggaagaagggaaagaaattcgctcggtaccagctgggcgacctgctgctgcacctggaaaagaagcacggcgaggactggggaaaggtgtacgacgaggcctgggagcggattgacaagaaagtggaaggcctgagcaagcacatcaagctggaagaggaacggagaagcgaggacgcccagagcaaggccgccctgaccgactggctgcgggctaaggccagcttcgtgatcgagggcctgaaggaggccgacaaggacgagttctgcagatgcgagctgaagctgcagaagtggtacggggacctgcggggaaagcccttcgccatcgaagccgagaacagcatcctggacatcagcggcttcagcaagcagtacaactgtgccttcatctggcagaaggacggcgtgaagaagctgaacctgtacctgatcatcaactacttcaagggcggcaagctgcggttcaagaagatcaaacctgaagccttcgaagccaacagattctacaccgtgatcaacaaaaagagcggcgagatcgtgcccatggaggtgaacttcaacttcgacgaccccaacctgatcatcctgcctctggcctttggcaagagacagggcagagaattcatctggaacgacctgctgtccctggaaaccggcagcctgaagctggccaacggaagagtgatcgagaagacactgtacaacagaagaacccggcaggatgagcctgccctgttcgtggccctgaccttcgagcggcgggaggtcctggactcctccaatatcaaaccaatgaacctgatcggcgtggcaagaggcgaaaacatccccgccgtgatcgccctgaccgaccccgagggctgcccactgagccggtttaaggatagcctgggaaacccaacccacatcctgagaatcggcgagagctataaggagaagcagcggaccatccaggccaagaaggaggtggagcagcggagagccggcggctacagccggaagtacgccagcaaagccaagaatctggcagacgatatggtgagaaacaccgctagagatctgctgtactacgccgtgacccaggatgccatgctgatcttcgccaacctgagccggggcttcggccggcagggcaagcggaccttcatggccgagagacagtacacacggatggaggactggctgaccgccaagctggcctacgagggcctgagcaagacctacctgtccaagacactggcccagtacacctccaagacatgcagcaactgtgggtttaccatcaccagcgccgactacgacagggtgctggagaagctgaagaagacagcaacaggctggatgaccacaattaacggcaaggagctgaaggtggagggccagattacctactacaacagatacaagagacagaacgtagtcaaggacctgtccgtcgagctggatagactgagcgaagaatctgtgaacaacgacatctcctcctggacaaagggcagaagcggagaagctctgagcctcctgaagaaaagattctcccatagacccgtgcaggagaagttcgtgtgcctgaactgcggcttcgagacacacgcagccgagcaagccgccctgaacatcgccagatcctggctgttcctgcggagccaggagtacaagaaataccagacaaacaagacaaccggcaacaccgataagagagccttcgtcgagacctggcagtccttttaccggaagaagcttaaggaggtgtggaaacctgccgtgcggtctggcggatctggcggaggctccacaagcatggccctgaggagcgtgatcttcagcgacatcagcatcgacttcagccccgaggagtgggagtacctggacctggagcagaaggacctgtacagggacgtgatgctggagaactacagcaacctggtgagcctgggctgcttcatcagcaagcccgacgtgatcagcctgctggagcagggcaaggagccctggaaggtggtgaggaagaggaggaggcagtaccccgacctggagaccaagaccagccccaagaaaaagagaaaagtctaagctgccttctgcggggcttgccttctggccatgcccttcttctctcccttgcacctgtacctcttggtctttgaataaagcctgagtaggaaggctagcaaaaaaaaaaaaaaaaaaaaaaaaaaaaaaaaaaaaaaaaaaaaaaaaaaaaaaaaaaaaaaaaaaaaaaaaaaaaaaaa

SEQ ID NO: 2547 - RNA, 5419 nt, synthetic construct
  source 1..5419: mol_type = other RNA
aggaaataagagagaaaagaagagtaagaagaaatataagagccaccatggcccctaagaagaagcgtaaagtgagccgggtgaacggcagcggcagcggcggcggcatgaaccacgaccaggagttcgacccccctaaggtgtaccctcccgtccccgccgagaagagaaagcccatccgggtcctgagcctgttcgatggcatcgccaccggtctgctggtgctgaaggacctgggcatccaggtggataggtacattgcctccgaggtgtgcgaggactccatcaccgtgggaatggtgcgtcatcagggcaagatcatgtacgtgggcgacgtgcggagcgtgacacagaagcatatccaggagtggggccctttcgacctggtgatcggcggcagcccttgcaatgacctgagcatcgtgaacccagcccggaagggcctgtacgagggaaccggcagactgttcttcgagttttacagactgctgcacgacgcccggcctaaggaaggcgacgaccggcccttcttttggctgttcgagaatgtggtggccatgggagtcagcgacaagcgggatattagccggttcctggagagcaaccccgtgatgatcgatgccaaggaagtgagcgccgcccaccgggccagatacttctggggcaatctgcctggcatgaacagacccctggccagcaccgtgaacgacaagctggagctgcaggagtgcctggagcacggccggatcgccaagttcagcaaggtgagaaccatcaccacccgaagcaacagcatcaaacaaggcaaggaccagcactttcctgtgttcatgaacgagaaggaggacatcctgtggtgtaccgagatggagagagtgttcgggttcccagtccactacacagatgtcagcaacatgtctagactggccagacagagactgctgggaagaagctggtccgtccctgtgatcagacacctgttcgcccctctgaaggagtacttcgcctgcgtgagcagcggcaacagcaacgccaacagccggggccccagcttctctagcggcctggtgccactgtccctgagagggagccacatgggccccatggagatctacaaaaccgtgagcgcctggaagcggcagcctgtgcgcgtgctgagcctgtttcggaatatcgataaagtcctgaaaagcctgggattcctggagagcggctctggctccggcggtggcaccctgaagtacgtggaggatgtgacaaacgtggtcagacgggatgtggagaagtggggccccttcgatctggtgtacggcagcacccaacccctgggcagctcttgtgaccggtgccctggctggtacatgtttcagttccaccggatcctgcagtacgccctgccgagacaggagtcccagcggccattcttttggattttcatggacaacttgctgctgaccgaggatgaccaggaaactaccactcggttcctgcagaccgaagccgtgaccctgcaggacgtgagaggccgggactaccagaacgccatgcgggtgtggtccaacatccctggactgaaaagcaagcacgcacctctgacccctaaagaagaggagtacctgcaggcccaggtgcggagcagaagcaagctggacgcccctaaggtggatctgctggtgaagaattgcctcctgcccctgagagagtacttcaagtatttcagccagaatagtctgcccctgggcggcccaagcagcggcgcccctcctcccagcggcggcagcccagccggctccccaacctctaccgaggagggcacctctgagtccgccacccccgagagcggccctggcacctccaccgagcccagcgagggcagcgcacccggcagccctgccggcagccccacctccacagaggagggaaccagcaccgagcccagcgaaggcagcgccccaggcaccagcaccgagcctagtgagggcggctctggcggcggcagcgcccaggagattaaacggatcaacaagatcagaagaagacttgtgaaagacagcaacaccaagaaggccggcaagacaggccccatgaaaaccctgctggttagagtgatgacacccgatctgagagagcggctggaaaacctgagaaagaagcctgaaaatatcccccagcccatcagcaatacatctagagccaacctgaataagctgctgaccgattacaccgaaatgaagaaggcgatcctgcatgtgtactgggaagagttccagaaggaccctgtgggcctgatgagccgggtggcccagcctgccagcaagaagatcgatcagaacaagctgaaacctgagatggacgagaagggcaacctgaccaccgccggctttgcctgctctcagtgtggccagcccctgttcgtgtacaagctggagcaggtgtctgagaagggcaaggcttacaccaactacttcggacggtgcaatgtggccgagcacgaaaagctgatcctgctggcccagctgaagcccgagaaggatagcgacgaagccgtgacatatagcctgggaaagtttgggcagagggccctggatttctacagcattcatgtgaccaaggagtccacccaccccgtgaagcccctggcccagatcgccggaaacagatacgcctccggacctgtgggaaaggccctgagcgacgcatgtatgggcacaatcgcctccttcctgtctaagtaccaggacatcatcatcgaacaccagaaggtggtgaagggcaaccagaagagactggagagcctgcgggagctggccggcaaggaaaacctggaataccctagcgtgaccctgccacctcagcctcacaccaaggagggcgttgatgcctacaacgaagtgatcgcccgggtgcgaatgtgggtgaacctgaacctgtggcagaagctgaagctaagcagagatgatgccaagcctctgctgagactgaagggattcccttcctttcctctggtcgagagacaggccaacgaagtggactggtgggacatggtgtgtaacgtgaagaagctgatcaacgagaaaaaggaggatggcaaggtgttttggcagaatctggctggctacaagagacaggaagccctgagaccatacctgagcagcgaggaagatcggaagaagggaaagaaattcgctcggtaccagctgggcgacctgctgctgcacctggaaaagaagcacggcgaggactggggaaaggtgtacgacgaggcctgggagcggattgacaagaaagtggaaggcctgagcaagcacatcaagctggaagaggaacggagaagcgaggacgcccagagcaaggccgccctgaccgactggctgcgggctaaggccagcttcgtgatcgagggcctgaaggaggccgacaaggacgagttctgcagatgcgagctgaagctgcagaagtggtacggggacctgcggggaaagcccttcgccatcgaagccgagaacagcatcctggacatcagcggcttcagcaagcagtacaactgtgccttcatctggcagaaggacggcgtgaagaagctgaacctgtacctgatcatcaactacttcaagggcggcaagctgcggttcaagaagatcaaacctgaagccttcgaagccaacagattctacaccgtgatcaacaaaaagagcggcgagatcgtgcccatggaggtgaacttcaacttcgacgaccccaacctgatcatcctgcctctggcctttggcaagagacagggcagagaattcatctggaacgacctgctgtccctggaaaccggcagcctgaagctggccaacggaagagtgatcgagaagacactgtacaacagaagaacccggcaggatgagcctgccctgttcgtggccctgaccttcgagcggcgggaggtcctggactcctccaatatcaaaccaatgaacctgatcggcgtggcaagaggcgaaaacatccccgccgtgatcgccctgaccgaccccgagggctgcccactgagccggtttaaggatagcctgggaaacccaacccacatcctgagaatcggcgagagctataaggagaagcagcggaccatccaggccaagaaggaggtggagcagcggagagccggcggctacagccggaagtacgccagcaaagccaagaatctggcagacgatatggtgagaaacaccgctagagatctgctgtactacgccgtgacccaggatgccatgctgatcttcgccaacctgagccggggcttcggccggcagggcaagcggaccttcatggccgagagacagtacacacggatggaggactggctgaccgccaagctggcctacgagggcctgagcaagacctacctgtccaagacactggcccagtacacctccaagacatgcagcaactgtgggtttaccatcaccagcgccgactacgacagggtgctggagaagctgaagaagacagcaacaggctggatgaccacaattaacggcaaggagctgaaggtggagggccagattacctactacaacagatacaagagacagaacgtagtcaaggacctgtccgtcgagctggatagactgagcgaagaatctgtgaacaacgacatctcctcctggacaaagggcagaagcggagaagctctgagcctcctgaagaaaagattctcccatagacccgtgcaggagaagttcgtgtgcctgaactgcggcttcgagacacacgcagccgagcaagccgccctgaacatcgccagatcctggctgttcctgcggagccaggagtacaagaaataccagacaaacaagacaaccggcaacaccgataagagagccttcgtcgagacctggcagtccttttaccggaagaagcttaaggaggtgtggaaacctgccgtgcggtctggcggatctggcggaggctccacaagcgcccacaggagcgtgatgttcaacgacgtgagcatcgacttcagcagggaggagtgggagtacctgaacctggagcagagggacctgtacagggacgtgatgctggagaactacagcaacctggtgagcctgggctacttcatcagcaagcccgacgtgatcagcctgctggagcagggcgaggagccctggaaggtggtgaggaagggcaggaggaggtaccccgacctgaagaccaactacaccagccccaagaaaaagagaaaagtctaagctgccttctgcggggcttgccttctggccatgcccttcttctctcccttgcacctgtacctcttggtctttgaataaagcctgagtaggaaggctagcaaaaaaaaaaaaaaaaaaaaaaaaaaaaaaaaaaaaaaaaaaaaaaaaaaaaaaaaaaaaaaaaaaaaaaaaaaaaaaaa

SEQ ID NO: 2548 - RNA, 5419 nt, synthetic construct
  source 1..5419: mol_type = other RNA
aggaaataagagagaaaagaagagtaagaagaaatataagagccaccatggcccctaagaagaagcgtaaagtgagccgggtgaacggcagcggcagcggcggcggcatgaaccacgaccaggagttcgacccccctaaggtgtaccctcccgtccccgccgagaagagaaagcccatccgggtcctgagcctgttcgatggcatcgccaccggtctgctggtgctgaaggacctgggcatccaggtggataggtacattgcctccgaggtgtgcgaggactccatcaccgtgggaatggtgcgtcatcagggcaagatcatgtacgtgggcgacgtgcggagcgtgacacagaagcatatccaggagtggggccctttcgacctggtgatcggcggcagcccttgcaatgacctgagcatcgtgaacccagcccggaagggcctgtacgagggaaccggcagactgttcttcgagttttacagactgctgcacgacgcccggcctaaggaaggcgacgaccggcccttcttttggctgttcgagaatgtggtggccatgggagtcagcgacaagcgggatattagccggttcctggagagcaaccccgtgatgatcgatgccaaggaagtgagcgccgcccaccgggccagatacttctggggcaatctgcctggcatgaacagacccctggccagcaccgtgaacgacaagctggagctgcaggagtgcctggagcacggccggatcgccaagttcagcaaggtgagaaccatcaccacccgaagcaacagcatcaaacaaggcaaggaccagcactttcctgtgttcatgaacgagaaggaggacatcctgtggtgtaccgagatggagagagtgttcgggttcccagtccactacacagatgtcagcaacatgtctagactggccagacagagactgctgggaagaagctggtccgtccctgtgatcagacacctgttcgcccctctgaaggagtacttcgcctgcgtgagcagcggcaacagcaacgccaacagccggggccccagcttctctagcggcctggtgccactgtccctgagagggagccacatgggccccatggagatctacaaaaccgtgagcgcctggaagcggcagcctgtgcgcgtgctgagcctgtttcggaatatcgataaagtcctgaaaagcctgggattcctggagagcggctctggctccggcggtggcaccctgaagtacgtggaggatgtgacaaacgtggtcagacgggatgtggagaagtggggccccttcgatctggtgtacggcagcacccaacccctgggcagctcttgtgaccggtgccctggctggtacatgtttcagttccaccggatcctgcagtacgccctgccgagacaggagtcccagcggccattcttttggattttcatggacaacttgctgctgaccgaggatgaccaggaaactaccactcggttcctgcagaccgaagccgtgaccctgcaggacgtgagaggccgggactaccagaacgccatgcgggtgtggtccaacatccctggactgaaaagcaagcacgcacctctgacccctaaagaagaggagtacctgcaggcccaggtgcggagcagaagcaagctggacgcccctaaggtggatctgctggtgaagaattgcctcctgcccctgagagagtacttcaagtatttcagccagaatagtctgcccctgggcggcccaagcagcggcgcccctcctcccagcggcggcagcccagccggctccccaacctctaccgaggagggcacctctgagtccgccacccccgagagcggccctggcacctccaccgagcccagcgagggcagcgcacccggcagccctgccggcagccccacctccacagaggagggaaccagcaccgagcccagcgaaggcagcgccccaggcaccagcaccgagcctagtgagggcggctctggcggcggcagcgcccaggagattaaacggatcaacaagatcagaagaagacttgtgaaagacagcaacaccaagaaggccggcaagacaggccccatgaaaaccctgctggttagagtgatgacacccgatctgagagagcggctggaaaacctgagaaagaagcctgaaaatatcccccagcccatcagcaatacatctagagccaacctgaataagctgctgaccgattacaccgaaatgaagaaggcgatcctgcatgtgtactgggaagagttccagaaggaccctgtgggcctgatgagccgggtggcccagcctgccagcaagaagatcgatcagaacaagctgaaacctgagatggacgagaagggcaacctgaccaccgccggctttgcctgctctcagtgtggccagcccctgttcgtgtacaagctggagcaggtgtctgagaagggcaaggcttacaccaactacttcggacggtgcaatgtggccgagcacgaaaagctgatcctgctggcccagctgaagcccgagaaggatagcgacgaagccgtgacatatagcctgggaaagtttgggcagagggccctggatttctacagcattcatgtgaccaaggagtccacccaccccgtgaagcccctggcccagatcgccggaaacagatacgcctccggacctgtgggaaaggccctgagcgacgcatgtatgggcacaatcgcctccttcctgtctaagtaccaggacatcatcatcgaacaccagaaggtggtgaagggcaaccagaagagactggagagcctgcgggagctggccggcaaggaaaacctggaataccctagcgtgaccctgccacctcagcctcacaccaaggagggcgttgatgcctacaacgaagtgatcgcccgggtgcgaatgtgggtgaacctgaacctgtggcagaagctgaagctaagcagagatgatgccaagcctctgctgagactgaagggattcccttcctttcctctggtcgagagacaggccaacgaagtggactggtgggacatggtgtgtaacgtgaagaagctgatcaacgagaaaaaggaggatggcaaggtgttttggcagaatctggctggctacaagagacaggaagccctgagaccatacctgagcagcgaggaagatcggaagaagggaaagaaattcgctcggtaccagctgggcgacctgctgctgcacctggaaaagaagcacggcgaggactggggaaaggtgtacgacgaggcctgggagcggattgacaagaaagtggaaggcctgagcaagcacatcaagctggaagaggaacggagaagcgaggacgcccagagcaaggccgccctgaccgactggctgcgggctaaggccagcttcgtgatcgagggcctgaaggaggccgacaaggacgagttctgcagatgcgagctgaagctgcagaagtggtacggggacctgcggggaaagcccttcgccatcgaagccgagaacagcatcctggacatcagcggcttcagcaagcagtacaactgtgccttcatctggcagaaggacggcgtgaagaagctgaacctgtacctgatcatcaactacttcaagggcggcaagctgcggttcaagaagatcaaacctgaagccttcgaagccaacagattctacaccgtgatcaacaaaaagagcggcgagatcgtgcccatggaggtgaacttcaacttcgacgaccccaacctgatcatcctgcctctggcctttggcaagagacagggcagagaattcatctggaacgacctgctgtccctggaaaccggcagcctgaagctggccaacggaagagtgatcgagaagacactgtacaacagaagaacccggcaggatgagcctgccctgttcgtggccctgaccttcgagcggcgggaggtcctggactcctccaatatcaaaccaatgaacctgatcggcgtggcaagaggcgaaaacatccccgccgtgatcgccctgaccgaccccgagggctgcccactgagccggtttaaggatagcctgggaaacccaacccacatcctgagaatcggcgagagctataaggagaagcagcggaccatccaggccaagaaggaggtggagcagcggagagccggcggctacagccggaagtacgccagcaaagccaagaatctggcagacgatatggtgagaaacaccgctagagatctgctgtactacgccgtgacccaggatgccatgctgatcttcgccaacctgagccggggcttcggccggcagggcaagcggaccttcatggccgagagacagtacacacggatggaggactggctgaccgccaagctggcctacgagggcctgagcaagacctacctgtccaagacactggcccagtacacctccaagacatgcagcaactgtgggtttaccatcaccagcgccgactacgacagggtgctggagaagctgaagaagacagcaacaggctggatgaccacaattaacggcaaggagctgaaggtggagggccagattacctactacaacagatacaagagacagaacgtagtcaaggacctgtccgtcgagctggatagactgagcgaagaatctgtgaacaacgacatctcctcctggacaaagggcagaagcggagaagctctgagcctcctgaagaaaagattctcccatagacccgtgcaggagaagttcgtgtgcctgaactgcggcttcgagacacacgcagccgagcaagccgccctgaacatcgccagatcctggctgttcctgcggagccaggagtacaagaaataccagacaaacaagacaaccggcaacaccgataagagagccttcgtcgagacctggcagtccttttaccggaagaagcttaaggaggtgtggaaacctgccgtgcggtctggcggatctggcggaggctccacaagcccccaggtgctggtgagcttcgaggaggtggccgtgctgctgagccaggaggagtggggccacctgggccccgcccagaagaggctgtacagggacgtgatgctggagacctacggcaacctggtgagcctgggcctgcagggcagcaagcccgacgtgatcagcaagctggagcagggcgaggagccctgggccccccacagccccaggatcgagggcagctggatctggaggaggaggaggaccagccccaagaaaaagagaaaagtctaagctgccttctgcggggcttgccttctggccatgcccttcttctctcccttgcacctgtacctcttggtctttgaataaagcctgagtaggaaggctagcaaaaaaaaaaaaaaaaaaaaaaaaaaaaaaaaaaaaaaaaaaaaaaaaaaaaaaaaaaaaaaaaaaaaaaaaaaaaaaaa

SEQ ID NO: 2549 - RNA, 5419 nt, synthetic construct
  source 1..5419: mol_type = other RNA
aggaaataagagagaaaagaagagtaagaagaaatataagagccaccatggcccctaagaagaagcgtaaagtgagccgggtgaacggcagcggcagcggcggcggcatgaaccacgaccaggagttcgacccccctaaggtgtaccctcccgtccccgccgagaagagaaagcccatccgggtcctgagcctgttcgatggcatcgccaccggtctgctggtgctgaaggacctgggcatccaggtggataggtacattgcctccgaggtgtgcgaggactccatcaccgtgggaatggtgcgtcatcagggcaagatcatgtacgtgggcgacgtgcggagcgtgacacagaagcatatccaggagtggggccctttcgacctggtgatcggcggcagcccttgcaatgacctgagcatcgtgaacccagcccggaagggcctgtacgagggaaccggcagactgttcttcgagttttacagactgctgcacgacgcccggcctaaggaaggcgacgaccggcccttcttttggctgttcgagaatgtggtggccatgggagtcagcgacaagcgggatattagccggttcctggagagcaaccccgtgatgatcgatgccaaggaagtgagcgccgcccaccgggccagatacttctggggcaatctgcctggcatgaacagacccctggccagcaccgtgaacgacaagctggagctgcaggagtgcctggagcacggccggatcgccaagttcagcaaggtgagaaccatcaccacccgaagcaacagcatcaaacaaggcaaggaccagcactttcctgtgttcatgaacgagaaggaggacatcctgtggtgtaccgagatggagagagtgttcgggttcccagtccactacacagatgtcagcaacatgtctagactggccagacagagactgctgggaagaagctggtccgtccctgtgatcagacacctgttcgcccctctgaaggagtacttcgcctgcgtgagcagcggcaacagcaacgccaacagccggggccccagcttctctagcggcctggtgccactgtccctgagagggagccacatgggccccatggagatctacaaaaccgtgagcgcctggaagcggcagcctgtgcgcgtgctgagcctgtttcggaatatcgataaagtcctgaaaagcctgggattcctggagagcggctctggctccggcggtggcaccctgaagtacgtggaggatgtgacaaacgtggtcagacgggatgtggagaagtggggccccttcgatctggtgtacggcagcacccaacccctgggcagctcttgtgaccggtgccctggctggtacatgtttcagttccaccggatcctgcagtacgccctgccgagacaggagtcccagcggccattcttttggattttcatggacaacttgctgctgaccgaggatgaccaggaaactaccactcggttcctgcagaccgaagccgtgaccctgcaggacgtgagaggccgggactaccagaacgccatgcgggtgtggtccaacatccctggactgaaaagcaagcacgcacctctgacccctaaagaagaggagtacctgcaggcccaggtgcggagcagaagcaagctggacgcccctaaggtggatctgctggtgaagaattgcctcctgcccctgagagagtacttcaagtatttcagccagaatagtctgcccctgggcggcccaagcagcggcgcccctcctcccagcggcggcagcccagccggctccccaacctctaccgaggagggcacctctgagtccgccacccccgagagcggccctggcacctccaccgagcccagcgagggcagcgcacccggcagccctgccggcagccccacctccacagaggagggaaccagcaccgagcccagcgaaggcagcgccccaggcaccagcaccgagcctagtgagggcggctctggcggcggcagcgcccaggagattaaacggatcaacaagatcagaagaagacttgtgaaagacagcaacaccaagaaggccggcaagacaggccccatgaaaaccctgctggttagagtgatgacacccgatctgagagagcggctggaaaacctgagaaagaagcctgaaaatatcccccagcccatcagcaatacatctagagccaacctgaataagctgctgaccgattacaccgaaatgaagaaggcgatcctgcatgtgtactgggaagagttccagaaggaccctgtgggcctgatgagccgggtggcccagcctgccagcaagaagatcgatcagaacaagctgaaacctgagatggacgagaagggcaacctgaccaccgccggctttgcctgctctcagtgtggccagcccctgttcgtgtacaagctggagcaggtgtctgagaagggcaaggcttacaccaactacttcggacggtgcaatgtggccgagcacgaaaagctgatcctgctggcccagctgaagcccgagaaggatagcgacgaagccgtgacatatagcctgggaaagtttgggcagagggccctggatttctacagcattcatgtgaccaaggagtccacccaccccgtgaagcccctggcccagatcgccggaaacagatacgcctccggacctgtgggaaaggccctgagcgacgcatgtatgggcacaatcgcctccttcctgtctaagtaccaggacatcatcatcgaacaccagaaggtggtgaagggcaaccagaagagactggagagcctgcgggagctggccggcaaggaaaacctggaataccctagcgtgaccctgccacctcagcctcacaccaaggagggcgttgatgcctacaacgaagtgatcgcccgggtgcgaatgtgggtgaacctgaacctgtggcagaagctgaagctaagcagagatgatgccaagcctctgctgagactgaagggattcccttcctttcctctggtcgagagacaggccaacgaagtggactggtgggacatggtgtgtaacgtgaagaagctgatcaacgagaaaaaggaggatggcaaggtgttttggcagaatctggctggctacaagagacaggaagccctgagaccatacctgagcagcgaggaagatcggaagaagggaaagaaattcgctcggtaccagctgggcgacctgctgctgcacctggaaaagaagcacggcgaggactggggaaaggtgtacgacgaggcctgggagcggattgacaagaaagtggaaggcctgagcaagcacatcaagctggaagaggaacggagaagcgaggacgcccagagcaaggccgccctgaccgactggctgcgggctaaggccagcttcgtgatcgagggcctgaaggaggccgacaaggacgagttctgcagatgcgagctgaagctgcagaagtggtacggggacctgcggggaaagcccttcgccatcgaagccgagaacagcatcctggacatcagcggcttcagcaagcagtacaactgtgccttcatctggcagaaggacggcgtgaagaagctgaacctgtacctgatcatcaactacttcaagggcggcaagctgcggttcaagaagatcaaacctgaagccttcgaagccaacagattctacaccgtgatcaacaaaaagagcggcgagatcgtgcccatggaggtgaacttcaacttcgacgaccccaacctgatcatcctgcctctggcctttggcaagagacagggcagagaattcatctggaacgacctgctgtccctggaaaccggcagcctgaagctggccaacggaagagtgatcgagaagacactgtacaacagaagaacccggcaggatgagcctgccctgttcgtggccctgaccttcgagcggcgggaggtcctggactcctccaatatcaaaccaatgaacctgatcggcgtggcaagaggcgaaaacatccccgccgtgatcgccctgaccgaccccgagggctgcccactgagccggtttaaggatagcctgggaaacccaacccacatcctgagaatcggcgagagctataaggagaagcagcggaccatccaggccaagaaggaggtggagcagcggagagccggcggctacagccggaagtacgccagcaaagccaagaatctggcagacgatatggtgagaaacaccgctagagatctgctgtactacgccgtgacccaggatgccatgctgatcttcgccaacctgagccggggcttcggccggcagggcaagcggaccttcatggccgagagacagtacacacggatggaggactggctgaccgccaagctggcctacgagggcctgagcaagacctacctgtccaagacactggcccagtacacctccaagacatgcagcaactgtgggtttaccatcaccagcgccgactacgacagggtgctggagaagctgaagaagacagcaacaggctggatgaccacaattaacggcaaggagctgaaggtggagggccagattacctactacaacagatacaagagacagaacgtagtcaaggacctgtccgtcgagctggatagactgagcgaagaatctgtgaacaacgacatctcctcctggacaaagggcagaagcggagaagctctgagcctcctgaagaaaagattctcccatagacccgtgcaggagaagttcgtgtgcctgaactgcggcttcgagacacacgcagccgagcaagccgccctgaacatcgccagatcctggctgttcctgcggagccaggagtacaagaaataccagacaaacaagacaaccggcaacaccgataagagagccttcgtcgagacctggcagtccttttaccggaagaagcttaaggaggtgtggaaacctgccgtgcggtctggcggatctggcggaggctccacaagcagcaaggcccccatcaccttcggcgacctggccatctacttcagccaggaggagtgggagtggctgagccccatccagaaggacctgtacgaggacgtgatgctggagaactacaggaacctggtgagcctgggcctgagcttcaggaggcccaacgtgatcaccctgctggagaagggcaaggccccctggatggtggagcccgccaggaggaggaggggccccgacagcggcagcaaggtgaccagccccaagaaaaagagaaaagtctaagctgccttctgcggggcttgccttctggccatgcccttcttctctcccttgcacctgtacctcttggtctttgaataaagcctgagtaggaaggctagcaaaaaaaaaaaaaaaaaaaaaaaaaaaaaaaaaaaaaaaaaaaaaaaaaaaaaaaaaaaaaaaaaaaaaaaaaaaaaaaa

SEQ ID NO: 2550 - RNA, 5419 nt, synthetic construct
  source 1..5419: mol_type = other RNA
aggaaataagagagaaaagaagagtaagaagaaatataagagccaccatggcccctaagaagaagcgtaaagtgagccgggtgaacggcagcggcagcggcggcggcatgaaccacgaccaggagttcgacccccctaaggtgtaccctcccgtccccgccgagaagagaaagcccatccgggtcctgagcctgttcgatggcatcgccaccggtctgctggtgctgaaggacctgggcatccaggtggataggtacattgcctccgaggtgtgcgaggactccatcaccgtgggaatggtgcgtcatcagggcaagatcatgtacgtgggcgacgtgcggagcgtgacacagaagcatatccaggagtggggccctttcgacctggtgatcggcggcagcccttgcaatgacctgagcatcgtgaacccagcccggaagggcctgtacgagggaaccggcagactgttcttcgagttttacagactgctgcacgacgcccggcctaaggaaggcgacgaccggcccttcttttggctgttcgagaatgtggtggccatgggagtcagcgacaagcgggatattagccggttcctggagagcaaccccgtgatgatcgatgccaaggaagtgagcgccgcccaccgggccagatacttctggggcaatctgcctggcatgaacagacccctggccagcaccgtgaacgacaagctggagctgcaggagtgcctggagcacggccggatcgccaagttcagcaaggtgagaaccatcaccacccgaagcaacagcatcaaacaaggcaaggaccagcactttcctgtgttcatgaacgagaaggaggacatcctgtggtgtaccgagatggagagagtgttcgggttcccagtccactacacagatgtcagcaacatgtctagactggccagacagagactgctgggaagaagctggtccgtccctgtgatcagacacctgttcgcccctctgaaggagtacttcgcctgcgtgagcagcggcaacagcaacgccaacagccggggccccagcttctctagcggcctggtgccactgtccctgagagggagccacatgggccccatggagatctacaaaaccgtgagcgcctggaagcggcagcctgtgcgcgtgctgagcctgtttcggaatatcgataaagtcctgaaaagcctgggattcctggagagcggctctggctccggcggtggcaccctgaagtacgtggaggatgtgacaaacgtggtcagacgggatgtggagaagtggggccccttcgatctggtgtacggcagcacccaacccctgggcagctcttgtgaccggtgccctggctggtacatgtttcagttccaccggatcctgcagtacgccctgccgagacaggagtcccagcggccattcttttggattttcatggacaacttgctgctgaccgaggatgaccaggaaactaccactcggttcctgcagaccgaagccgtgaccctgcaggacgtgagaggccgggactaccagaacgccatgcgggtgtggtccaacatccctggactgaaaagcaagcacgcacctctgacccctaaagaagaggagtacctgcaggcccaggtgcggagcagaagcaagctggacgcccctaaggtggatctgctggtgaagaattgcctcctgcccctgagagagtacttcaagtatttcagccagaatagtctgcccctgggcggcccaagcagcggcgcccctcctcccagcggcggcagcccagccggctccccaacctctaccgaggagggcacctctgagtccgccacccccgagagcggccctggcacctccaccgagcccagcgagggcagcgcacccggcagccctgccggcagccccacctccacagaggagggaaccagcaccgagcccagcgaaggcagcgccccaggcaccagcaccgagcctagtgagggcggctctggcggcggcagcgcccaggagattaaacggatcaacaagatcagaagaagacttgtgaaagacagcaacaccaagaaggccggcaagacaggccccatgaaaaccctgctggttagagtgatgacacccgatctgagagagcggctggaaaacctgagaaagaagcctgaaaatatcccccagcccatcagcaatacatctagagccaacctgaataagctgctgaccgattacaccgaaatgaagaaggcgatcctgcatgtgtactgggaagagttccagaaggaccctgtgggcctgatgagccgggtggcccagcctgccagcaagaagatcgatcagaacaagctgaaacctgagatggacgagaagggcaacctgaccaccgccggctttgcctgctctcagtgtggccagcccctgttcgtgtacaagctggagcaggtgtctgagaagggcaaggcttacaccaactacttcggacggtgcaatgtggccgagcacgaaaagctgatcctgctggcccagctgaagcccgagaaggatagcgacgaagccgtgacatatagcctgggaaagtttgggcagagggccctggatttctacagcattcatgtgaccaaggagtccacccaccccgtgaagcccctggcccagatcgccggaaacagatacgcctccggacctgtgggaaaggccctgagcgacgcatgtatgggcacaatcgcctccttcctgtctaagtaccaggacatcatcatcgaacaccagaaggtggtgaagggcaaccagaagagactggagagcctgcgggagctggccggcaaggaaaacctggaataccctagcgtgaccctgccacctcagcctcacaccaaggagggcgttgatgcctacaacgaagtgatcgcccgggtgcgaatgtgggtgaacctgaacctgtggcagaagctgaagctaagcagagatgatgccaagcctctgctgagactgaagggattcccttcctttcctctggtcgagagacaggccaacgaagtggactggtgggacatggtgtgtaacgtgaagaagctgatcaacgagaaaaaggaggatggcaaggtgttttggcagaatctggctggctacaagagacaggaagccctgagaccatacctgagcagcgaggaagatcggaagaagggaaagaaattcgctcggtaccagctgggcgacctgctgctgcacctggaaaagaagcacggcgaggactggggaaaggtgtacgacgaggcctgggagcggattgacaagaaagtggaaggcctgagcaagcacatcaagctggaagaggaacggagaagcgaggacgcccagagcaaggccgccctgaccgactggctgcgggctaaggccagcttcgtgatcgagggcctgaaggaggccgacaaggacgagttctgcagatgcgagctgaagctgcagaagtggtacggggacctgcggggaaagcccttcgccatcgaagccgagaacagcatcctggacatcagcggcttcagcaagcagtacaactgtgccttcatctggcagaaggacggcgtgaagaagctgaacctgtacctgatcatcaactacttcaagggcggcaagctgcggttcaagaagatcaaacctgaagccttcgaagccaacagattctacaccgtgatcaacaaaaagagcggcgagatcgtgcccatggaggtgaacttcaacttcgacgaccccaacctgatcatcctgcctctggcctttggcaagagacagggcagagaattcatctggaacgacctgctgtccctggaaaccggcagcctgaagctggccaacggaagagtgatcgagaagacactgtacaacagaagaacccggcaggatgagcctgccctgttcgtggccctgaccttcgagcggcgggaggtcctggactcctccaatatcaaaccaatgaacctgatcggcgtggcaagaggcgaaaacatccccgccgtgatcgccctgaccgaccccgagggctgcccactgagccggtttaaggatagcctgggaaacccaacccacatcctgagaatcggcgagagctataaggagaagcagcggaccatccaggccaagaaggaggtggagcagcggagagccggcggctacagccggaagtacgccagcaaagccaagaatctggcagacgatatggtgagaaacaccgctagagatctgctgtactacgccgtgacccaggatgccatgctgatcttcgccaacctgagccggggcttcggccggcagggcaagcggaccttcatggccgagagacagtacacacggatggaggactggctgaccgccaagctggcctacgagggcctgagcaagacctacctgtccaagacactggcccagtacacctccaagacatgcagcaactgtgggtttaccatcaccagcgccgactacgacagggtgctggagaagctgaagaagacagcaacaggctggatgaccacaattaacggcaaggagctgaaggtggagggccagattacctactacaacagatacaagagacagaacgtagtcaaggacctgtccgtcgagctggatagactgagcgaagaatctgtgaacaacgacatctcctcctggacaaagggcagaagcggagaagctctgagcctcctgaagaaaagattctcccatagacccgtgcaggagaagttcgtgtgcctgaactgcggcttcgagacacacgcagccgagcaagccgccctgaacatcgccagatcctggctgttcctgcggagccaggagtacaagaaataccagacaaacaagacaaccggcaacaccgataagagagccttcgtcgagacctggcagtccttttaccggaagaagcttaaggaggtgtggaaacctgccgtgcggtctggcggatctggcggaggctccacaagcttccaggagagcgtggtgttcagcgacgtgagcatcgccttcagccaggaggagtgggcccacctggacctggagcagaaggacctgtacagggacgtgatgctggagaactacagcaacctggtgagcctgggctgcttcgtgagcaagcccgacgtgatcagcctgctggagcagggcaaggagccctggaagatcgtgaggaagggcaggaggaggtaccccgacctggagaccaggtacaccagccccaagaaaaagagaaaagtctaagctgccttctgcggggcttgccttctggccatgcccttcttctctcccttgcacctgtacctcttggtctttgaataaagcctgagtaggaaggctagcaaaaaaaaaaaaaaaaaaaaaaaaaaaaaaaaaaaaaaaaaaaaaaaaaaaaaaaaaaaaaaaaaaaaaaaaaaaaaaaa

SEQ ID NO: 2551 - RNA, 5419 nt, synthetic construct
  source 1..5419: mol_type = other RNA
aggaaataagagagaaaagaagagtaagaagaaatataagagccaccatggcccctaagaagaagcgtaaagtgagccgggtgaacggcagcggcagcggcggcggcatgaaccacgaccaggagttcgacccccctaaggtgtaccctcccgtccccgccgagaagagaaagcccatccgggtcctgagcctgttcgatggcatcgccaccggtctgctggtgctgaaggacctgggcatccaggtggataggtacattgcctccgaggtgtgcgaggactccatcaccgtgggaatggtgcgtcatcagggcaagatcatgtacgtgggcgacgtgcggagcgtgacacagaagcatatccaggagtggggccctttcgacctggtgatcggcggcagcccttgcaatgacctgagcatcgtgaacccagcccggaagggcctgtacgagggaaccggcagactgttcttcgagttttacagactgctgcacgacgcccggcctaaggaaggcgacgaccggcccttcttttggctgttcgagaatgtggtggccatgggagtcagcgacaagcgggatattagccggttcctggagagcaaccccgtgatgatcgatgccaaggaagtgagcgccgcccaccgggccagatacttctggggcaatctgcctggcatgaacagacccctggccagcaccgtgaacgacaagctggagctgcaggagtgcctggagcacggccggatcgccaagttcagcaaggtgagaaccatcaccacccgaagcaacagcatcaaacaaggcaaggaccagcactttcctgtgttcatgaacgagaaggaggacatcctgtggtgtaccgagatggagagagtgttcgggttcccagtccactacacagatgtcagcaacatgtctagactggccagacagagactgctgggaagaagctggtccgtccctgtgatcagacacctgttcgcccctctgaaggagtacttcgcctgcgtgagcagcggcaacagcaacgccaacagccggggccccagcttctctagcggcctggtgccactgtccctgagagggagccacatgggccccatggagatctacaaaaccgtgagcgcctggaagcggcagcctgtgcgcgtgctgagcctgtttcggaatatcgataaagtcctgaaaagcctgggattcctggagagcggctctggctccggcggtggcaccctgaagtacgtggaggatgtgacaaacgtggtcagacgggatgtggagaagtggggccccttcgatctggtgtacggcagcacccaacccctgggcagctcttgtgaccggtgccctggctggtacatgtttcagttccaccggatcctgcagtacgccctgccgagacaggagtcccagcggccattcttttggattttcatggacaacttgctgctgaccgaggatgaccaggaaactaccactcggttcctgcagaccgaagccgtgaccctgcaggacgtgagaggccgggactaccagaacgccatgcgggtgtggtccaacatccctggactgaaaagcaagcacgcacctctgacccctaaagaagaggagtacctgcaggcccaggtgcggagcagaagcaagctggacgcccctaaggtggatctgctggtgaagaattgcctcctgcccctgagagagtacttcaagtatttcagccagaatagtctgcccctgggcggcccaagcagcggcgcccctcctcccagcggcggcagcccagccggctccccaacctctaccgaggagggcacctctgagtccgccacccccgagagcggccctggcacctccaccgagcccagcgagggcagcgcacccggcagccctgccggcagccccacctccacagaggagggaaccagcaccgagcccagcgaaggcagcgccccaggcaccagcaccgagcctagtgagggcggctctggcggcggcagcgcccaggagattaaacggatcaacaagatcagaagaagacttgtgaaagacagcaacaccaagaaggccggcaagacaggccccatgaaaaccctgctggttagagtgatgacacccgatctgagagagcggctggaaaacctgagaaagaagcctgaaaatatcccccagcccatcagcaatacatctagagccaacctgaataagctgctgaccgattacaccgaaatgaagaaggcgatcctgcatgtgtactgggaagagttccagaaggaccctgtgggcctgatgagccgggtggcccagcctgccagcaagaagatcgatcagaacaagctgaaacctgagatggacgagaagggcaacctgaccaccgccggctttgcctgctctcagtgtggccagcccctgttcgtgtacaagctggagcaggtgtctgagaagggcaaggcttacaccaactacttcggacggtgcaatgtggccgagcacgaaaagctgatcctgctggcccagctgaagcccgagaaggatagcgacgaagccgtgacatatagcctgggaaagtttgggcagagggccctggatttctacagcattcatgtgaccaaggagtccacccaccccgtgaagcccctggcccagatcgccggaaacagatacgcctccggacctgtgggaaaggccctgagcgacgcatgtatgggcacaatcgcctccttcctgtctaagtaccaggacatcatcatcgaacaccagaaggtggtgaagggcaaccagaagagactggagagcctgcgggagctggccggcaaggaaaacctggaataccctagcgtgaccctgccacctcagcctcacaccaaggagggcgttgatgcctacaacgaagtgatcgcccgggtgcgaatgtgggtgaacctgaacctgtggcagaagctgaagctaagcagagatgatgccaagcctctgctgagactgaagggattcccttcctttcctctggtcgagagacaggccaacgaagtggactggtgggacatggtgtgtaacgtgaagaagctgatcaacgagaaaaaggaggatggcaaggtgttttggcagaatctggctggctacaagagacaggaagccctgagaccatacctgagcagcgaggaagatcggaagaagggaaagaaattcgctcggtaccagctgggcgacctgctgctgcacctggaaaagaagcacggcgaggactggggaaaggtgtacgacgaggcctgggagcggattgacaagaaagtggaaggcctgagcaagcacatcaagctggaagaggaacggagaagcgaggacgcccagagcaaggccgccctgaccgactggctgcgggctaaggccagcttcgtgatcgagggcctgaaggaggccgacaaggacgagttctgcagatgcgagctgaagctgcagaagtggtacggggacctgcggggaaagcccttcgccatcgaagccgagaacagcatcctggacatcagcggcttcagcaagcagtacaactgtgccttcatctggcagaaggacggcgtgaagaagctgaacctgtacctgatcatcaactacttcaagggcggcaagctgcggttcaagaagatcaaacctgaagccttcgaagccaacagattctacaccgtgatcaacaaaaagagcggcgagatcgtgcccatggaggtgaacttcaacttcgacgaccccaacctgatcatcctgcctctggcctttggcaagagacagggcagagaattcatctggaacgacctgctgtccctggaaaccggcagcctgaagctggccaacggaagagtgatcgagaagacactgtacaacagaagaacccggcaggatgagcctgccctgttcgtggccctgaccttcgagcggcgggaggtcctggactcctccaatatcaaaccaatgaacctgatcggcgtggcaagaggcgaaaacatccccgccgtgatcgccctgaccgaccccgagggctgcccactgagccggtttaaggatagcctgggaaacccaacccacatcctgagaatcggcgagagctataaggagaagcagcggaccatccaggccaagaaggaggtggagcagcggagagccggcggctacagccggaagtacgccagcaaagccaagaatctggcagacgatatggtgagaaacaccgctagagatctgctgtactacgccgtgacccaggatgccatgctgatcttcgccaacctgagccggggcttcggccggcagggcaagcggaccttcatggccgagagacagtacacacggatggaggactggctgaccgccaagctggcctacgagggcctgagcaagacctacctgtccaagacactggcccagtacacctccaagacatgcagcaactgtgggtttaccatcaccagcgccgactacgacagggtgctggagaagctgaagaagacagcaacaggctggatgaccacaattaacggcaaggagctgaaggtggagggccagattacctactacaacagatacaagagacagaacgtagtcaaggacctgtccgtcgagctggatagactgagcgaagaatctgtgaacaacgacatctcctcctggacaaagggcagaagcggagaagctctgagcctcctgaagaaaagattctcccatagacccgtgcaggagaagttcgtgtgcctgaactgcggcttcgagacacacgcagccgagcaagccgccctgaacatcgccagatcctggctgttcctgcggagccaggagtacaagaaataccagacaaacaagacaaccggcaacaccgataagagagccttcgtcgagacctggcagtccttttaccggaagaagcttaaggaggtgtggaaacctgccgtgcggtctggcggatctggcggaggctccacaagcagcaaggcccccatcaccttcggcgacctggccatctacttcagccaggaggagtgggagtggctgagccccatccagaaggacctgtacgaggacgtgatgctggagaactacaggaacctggtgagcctgggcctgagcttcaggaggcccaacgtgatcaccctgctggagaagggcaaggccccctggatgatcgagcccgtgaggaggaggagggcccccgagctgaccgaggccagcaccagccccaagaaaaagagaaaagtctaagctgccttctgcggggcttgccttctggccatgcccttcttctctcccttgcacctgtacctcttggtctttgaataaagcctgagtaggaaggctagcaaaaaaaaaaaaaaaaaaaaaaaaaaaaaaaaaaaaaaaaaaaaaaaaaaaaaaaaaaaaaaaaaaaaaaaaaaaaaaaa

SEQ ID NO: 2552 - RNA, 5419 nt, synthetic construct
  source 1..5419: mol_type = other RNA
aggaaataagagagaaaagaagagtaagaagaaatataagagccaccatggcccctaagaagaagcgtaaagtgagccgggtgaacggcagcggcagcggcggcggcatgaaccacgaccaggagttcgacccccctaaggtgtaccctcccgtccccgccgagaagagaaagcccatccgggtcctgagcctgttcgatggcatcgccaccggtctgctggtgctgaaggacctgggcatccaggtggataggtacattgcctccgaggtgtgcgaggactccatcaccgtgggaatggtgcgtcatcagggcaagatcatgtacgtgggcgacgtgcggagcgtgacacagaagcatatccaggagtggggccctttcgacctggtgatcggcggcagcccttgcaatgacctgagcatcgtgaacccagcccggaagggcctgtacgagggaaccggcagactgttcttcgagttttacagactgctgcacgacgcccggcctaaggaaggcgacgaccggcccttcttttggctgttcgagaatgtggtggccatgggagtcagcgacaagcgggatattagccggttcctggagagcaaccccgtgatgatcgatgccaaggaagtgagcgccgcccaccgggccagatacttctggggcaatctgcctggcatgaacagacccctggccagcaccgtgaacgacaagctggagctgcaggagtgcctggagcacggccggatcgccaagttcagcaaggtgagaaccatcaccacccgaagcaacagcatcaaacaaggcaaggaccagcactttcctgtgttcatgaacgagaaggaggacatcctgtggtgtaccgagatggagagagtgttcgggttcccagtccactacacagatgtcagcaacatgtctagactggccagacagagactgctgggaagaagctggtccgtccctgtgatcagacacctgttcgcccctctgaaggagtacttcgcctgcgtgagcagcggcaacagcaacgccaacagccggggccccagcttctctagcggcctggtgccactgtccctgagagggagccacatgggccccatggagatctacaaaaccgtgagcgcctggaagcggcagcctgtgcgcgtgctgagcctgtttcggaatatcgataaagtcctgaaaagcctgggattcctggagagcggctctggctccggcggtggcaccctgaagtacgtggaggatgtgacaaacgtggtcagacgggatgtggagaagtggggccccttcgatctggtgtacggcagcacccaacccctgggcagctcttgtgaccggtgccctggctggtacatgtttcagttccaccggatcctgcagtacgccctgccgagacaggagtcccagcggccattcttttggattttcatggacaacttgctgctgaccgaggatgaccaggaaactaccactcggttcctgcagaccgaagccgtgaccctgcaggacgtgagaggccgggactaccagaacgccatgcgggtgtggtccaacatccctggactgaaaagcaagcacgcacctctgacccctaaagaagaggagtacctgcaggcccaggtgcggagcagaagcaagctggacgcccctaaggtggatctgctggtgaagaattgcctcctgcccctgagagagtacttcaagtatttcagccagaatagtctgcccctgggcggcccaagcagcggcgcccctcctcccagcggcggcagcccagccggctccccaacctctaccgaggagggcacctctgagtccgccacccccgagagcggccctggcacctccaccgagcccagcgagggcagcgcacccggcagccctgccggcagccccacctccacagaggagggaaccagcaccgagcccagcgaaggcagcgccccaggcaccagcaccgagcctagtgagggcggctctggcggcggcagcgcccaggagattaaacggatcaacaagatcagaagaagacttgtgaaagacagcaacaccaagaaggccggcaagacaggccccatgaaaaccctgctggttagagtgatgacacccgatctgagagagcggctggaaaacctgagaaagaagcctgaaaatatcccccagcccatcagcaatacatctagagccaacctgaataagctgctgaccgattacaccgaaatgaagaaggcgatcctgcatgtgtactgggaagagttccagaaggaccctgtgggcctgatgagccgggtggcccagcctgccagcaagaagatcgatcagaacaagctgaaacctgagatggacgagaagggcaacctgaccaccgccggctttgcctgctctcagtgtggccagcccctgttcgtgtacaagctggagcaggtgtctgagaagggcaaggcttacaccaactacttcggacggtgcaatgtggccgagcacgaaaagctgatcctgctggcccagctgaagcccgagaaggatagcgacgaagccgtgacatatagcctgggaaagtttgggcagagggccctggatttctacagcattcatgtgaccaaggagtccacccaccccgtgaagcccctggcccagatcgccggaaacagatacgcctccggacctgtgggaaaggccctgagcgacgcatgtatgggcacaatcgcctccttcctgtctaagtaccaggacatcatcatcgaacaccagaaggtggtgaagggcaaccagaagagactggagagcctgcgggagctggccggcaaggaaaacctggaataccctagcgtgaccctgccacctcagcctcacaccaaggagggcgttgatgcctacaacgaagtgatcgcccgggtgcgaatgtgggtgaacctgaacctgtggcagaagctgaagctaagcagagatgatgccaagcctctgctgagactgaagggattcccttcctttcctctggtcgagagacaggccaacgaagtggactggtgggacatggtgtgtaacgtgaagaagctgatcaacgagaaaaaggaggatggcaaggtgttttggcagaatctggctggctacaagagacaggaagccctgagaccatacctgagcagcgaggaagatcggaagaagggaaagaaattcgctcggtaccagctgggcgacctgctgctgcacctggaaaagaagcacggcgaggactggggaaaggtgtacgacgaggcctgggagcggattgacaagaaagtggaaggcctgagcaagcacatcaagctggaagaggaacggagaagcgaggacgcccagagcaaggccgccctgaccgactggctgcgggctaaggccagcttcgtgatcgagggcctgaaggaggccgacaaggacgagttctgcagatgcgagctgaagctgcagaagtggtacggggacctgcggggaaagcccttcgccatcgaagccgagaacagcatcctggacatcagcggcttcagcaagcagtacaactgtgccttcatctggcagaaggacggcgtgaagaagctgaacctgtacctgatcatcaactacttcaagggcggcaagctgcggttcaagaagatcaaacctgaagccttcgaagccaacagattctacaccgtgatcaacaaaaagagcggcgagatcgtgcccatggaggtgaacttcaacttcgacgaccccaacctgatcatcctgcctctggcctttggcaagagacagggcagagaattcatctggaacgacctgctgtccctggaaaccggcagcctgaagctggccaacggaagagtgatcgagaagacactgtacaacagaagaacccggcaggatgagcctgccctgttcgtggccctgaccttcgagcggcgggaggtcctggactcctccaatatcaaaccaatgaacctgatcggcgtggcaagaggcgaaaacatccccgccgtgatcgccctgaccgaccccgagggctgcccactgagccggtttaaggatagcctgggaaacccaacccacatcctgagaatcggcgagagctataaggagaagcagcggaccatccaggccaagaaggaggtggagcagcggagagccggcggctacagccggaagtacgccagcaaagccaagaatctggcagacgatatggtgagaaacaccgctagagatctgctgtactacgccgtgacccaggatgccatgctgatcttcgccaacctgagccggggcttcggccggcagggcaagcggaccttcatggccgagagacagtacacacggatggaggactggctgaccgccaagctggcctacgagggcctgagcaagacctacctgtccaagacactggcccagtacacctccaagacatgcagcaactgtgggtttaccatcaccagcgccgactacgacagggtgctggagaagctgaagaagacagcaacaggctggatgaccacaattaacggcaaggagctgaaggtggagggccagattacctactacaacagatacaagagacagaacgtagtcaaggacctgtccgtcgagctggatagactgagcgaagaatctgtgaacaacgacatctcctcctggacaaagggcagaagcggagaagctctgagcctcctgaagaaaagattctcccatagacccgtgcaggagaagttcgtgtgcctgaactgcggcttcgagacacacgcagccgagcaagccgccctgaacatcgccagatcctggctgttcctgcggagccaggagtacaagaaataccagacaaacaagacaaccggcaacaccgataagagagccttcgtcgagacctggcagtccttttaccggaagaagcttaaggaggtgtggaaacctgccgtgcggtctggcggatctggcggaggctccacaagcagcaaggcccccgtgaccttcggcgacctggccatctacttcagccaggaggagtgggagtggctgagccccatccagaaggacctgtacgaggacgtgatgctggagaactacaggaacctggtgagcctgggcctgagcttcaggaggcccaacgtgatcaccctgctggagaagggcaaggccccctggatggtggagcccgtgaggaggaggagggcccccgacagcggcagcaagtgcaccagccccaagaaaaagagaaaagtctaagctgccttctgcggggcttgccttctggccatgcccttcttctctcccttgcacctgtacctcttggtctttgaataaagcctgagtaggaaggctagcaaaaaaaaaaaaaaaaaaaaaaaaaaaaaaaaaaaaaaaaaaaaaaaaaaaaaaaaaaaaaaaaaaaaaaaaaaaaaaaa

SEQ ID NO: 2553 - RNA, 5419 nt, synthetic construct
  source 1..5419: mol_type = other RNA
aggaaataagagagaaaagaagagtaagaagaaatataagagccaccatggcccctaagaagaagcgtaaagtgagccgggtgaacggcagcggcagcggcggcggcatgaaccacgaccaggagttcgacccccctaaggtgtaccctcccgtccccgccgagaagagaaagcccatccgggtcctgagcctgttcgatggcatcgccaccggtctgctggtgctgaaggacctgggcatccaggtggataggtacattgcctccgaggtgtgcgaggactccatcaccgtgggaatggtgcgtcatcagggcaagatcatgtacgtgggcgacgtgcggagcgtgacacagaagcatatccaggagtggggccctttcgacctggtgatcggcggcagcccttgcaatgacctgagcatcgtgaacccagcccggaagggcctgtacgagggaaccggcagactgttcttcgagttttacagactgctgcacgacgcccggcctaaggaaggcgacgaccggcccttcttttggctgttcgagaatgtggtggccatgggagtcagcgacaagcgggatattagccggttcctggagagcaaccccgtgatgatcgatgccaaggaagtgagcgccgcccaccgggccagatacttctggggcaatctgcctggcatgaacagacccctggccagcaccgtgaacgacaagctggagctgcaggagtgcctggagcacggccggatcgccaagttcagcaaggtgagaaccatcaccacccgaagcaacagcatcaaacaaggcaaggaccagcactttcctgtgttcatgaacgagaaggaggacatcctgtggtgtaccgagatggagagagtgttcgggttcccagtccactacacagatgtcagcaacatgtctagactggccagacagagactgctgggaagaagctggtccgtccctgtgatcagacacctgttcgcccctctgaaggagtacttcgcctgcgtgagcagcggcaacagcaacgccaacagccggggccccagcttctctagcggcctggtgccactgtccctgagagggagccacatgggccccatggagatctacaaaaccgtgagcgcctggaagcggcagcctgtgcgcgtgctgagcctgtttcggaatatcgataaagtcctgaaaagcctgggattcctggagagcggctctggctccggcggtggcaccctgaagtacgtggaggatgtgacaaacgtggtcagacgggatgtggagaagtggggccccttcgatctggtgtacggcagcacccaacccctgggcagctcttgtgaccggtgccctggctggtacatgtttcagttccaccggatcctgcagtacgccctgccgagacaggagtcccagcggccattcttttggattttcatggacaacttgctgctgaccgaggatgaccaggaaactaccactcggttcctgcagaccgaagccgtgaccctgcaggacgtgagaggccgggactaccagaacgccatgcgggtgtggtccaacatccctggactgaaaagcaagcacgcacctctgacccctaaagaagaggagtacctgcaggcccaggtgcggagcagaagcaagctggacgcccctaaggtggatctgctggtgaagaattgcctcctgcccctgagagagtacttcaagtatttcagccagaatagtctgcccctgggcggcccaagcagcggcgcccctcctcccagcggcggcagcccagccggctccccaacctctaccgaggagggcacctctgagtccgccacccccgagagcggccctggcacctccaccgagcccagcgagggcagcgcacccggcagccctgccggcagccccacctccacagaggagggaaccagcaccgagcccagcgaaggcagcgccccaggcaccagcaccgagcctagtgagggcggctctggcggcggcagcgcccaggagattaaacggatcaacaagatcagaagaagacttgtgaaagacagcaacaccaagaaggccggcaagacaggccccatgaaaaccctgctggttagagtgatgacacccgatctgagagagcggctggaaaacctgagaaagaagcctgaaaatatcccccagcccatcagcaatacatctagagccaacctgaataagctgctgaccgattacaccgaaatgaagaaggcgatcctgcatgtgtactgggaagagttccagaaggaccctgtgggcctgatgagccgggtggcccagcctgccagcaagaagatcgatcagaacaagctgaaacctgagatggacgagaagggcaacctgaccaccgccggctttgcctgctctcagtgtggccagcccctgttcgtgtacaagctggagcaggtgtctgagaagggcaaggcttacaccaactacttcggacggtgcaatgtggccgagcacgaaaagctgatcctgctggcccagctgaagcccgagaaggatagcgacgaagccgtgacatatagcctgggaaagtttgggcagagggccctggatttctacagcattcatgtgaccaaggagtccacccaccccgtgaagcccctggcccagatcgccggaaacagatacgcctccggacctgtgggaaaggccctgagcgacgcatgtatgggcacaatcgcctccttcctgtctaagtaccaggacatcatcatcgaacaccagaaggtggtgaagggcaaccagaagagactggagagcctgcgggagctggccggcaaggaaaacctggaataccctagcgtgaccctgccacctcagcctcacaccaaggagggcgttgatgcctacaacgaagtgatcgcccgggtgcgaatgtgggtgaacctgaacctgtggcagaagctgaagctaagcagagatgatgccaagcctctgctgagactgaagggattcccttcctttcctctggtcgagagacaggccaacgaagtggactggtgggacatggtgtgtaacgtgaagaagctgatcaacgagaaaaaggaggatggcaaggtgttttggcagaatctggctggctacaagagacaggaagccctgagaccatacctgagcagcgaggaagatcggaagaagggaaagaaattcgctcggtaccagctgggcgacctgctgctgcacctggaaaagaagcacggcgaggactggggaaaggtgtacgacgaggcctgggagcggattgacaagaaagtggaaggcctgagcaagcacatcaagctggaagaggaacggagaagcgaggacgcccagagcaaggccgccctgaccgactggctgcgggctaaggccagcttcgtgatcgagggcctgaaggaggccgacaaggacgagttctgcagatgcgagctgaagctgcagaagtggtacggggacctgcggggaaagcccttcgccatcgaagccgagaacagcatcctggacatcagcggcttcagcaagcagtacaactgtgccttcatctggcagaaggacggcgtgaagaagctgaacctgtacctgatcatcaactacttcaagggcggcaagctgcggttcaagaagatcaaacctgaagccttcgaagccaacagattctacaccgtgatcaacaaaaagagcggcgagatcgtgcccatggaggtgaacttcaacttcgacgaccccaacctgatcatcctgcctctggcctttggcaagagacagggcagagaattcatctggaacgacctgctgtccctggaaaccggcagcctgaagctggccaacggaagagtgatcgagaagacactgtacaacagaagaacccggcaggatgagcctgccctgttcgtggccctgaccttcgagcggcgggaggtcctggactcctccaatatcaaaccaatgaacctgatcggcgtggcaagaggcgaaaacatccccgccgtgatcgccctgaccgaccccgagggctgcccactgagccggtttaaggatagcctgggaaacccaacccacatcctgagaatcggcgagagctataaggagaagcagcggaccatccaggccaagaaggaggtggagcagcggagagccggcggctacagccggaagtacgccagcaaagccaagaatctggcagacgatatggtgagaaacaccgctagagatctgctgtactacgccgtgacccaggatgccatgctgatcttcgccaacctgagccggggcttcggccggcagggcaagcggaccttcatggccgagagacagtacacacggatggaggactggctgaccgccaagctggcctacgagggcctgagcaagacctacctgtccaagacactggcccagtacacctccaagacatgcagcaactgtgggtttaccatcaccagcgccgactacgacagggtgctggagaagctgaagaagacagcaacaggctggatgaccacaattaacggcaaggagctgaaggtggagggccagattacctactacaacagatacaagagacagaacgtagtcaaggacctgtccgtcgagctggatagactgagcgaagaatctgtgaacaacgacatctcctcctggacaaagggcagaagcggagaagctctgagcctcctgaagaaaagattctcccatagacccgtgcaggagaagttcgtgtgcctgaactgcggcttcgagacacacgcagccgagcaagccgccctgaacatcgccagatcctggctgttcctgcggagccaggagtacaagaaataccagacaaacaagacaaccggcaacaccgataagagagccttcgtcgagacctggcagtccttttaccggaagaagcttaaggaggtgtggaaacctgccgtgcggtctggcggatctggcggaggctccacaagcatggtgagcttcgaggacgtggccgtgctgctgagccaggaggagtgggactgcctgatccccgcccagaggggcctgtacagggacgtgatgctggagacctacggcaacctggtgagcctgggcctgcaggccagcaagcccgacgtgatcagcaggctggagcagggcgacgagccctggaccacccacaccctgaggacccagggcagctggagctggaggcacaagagggagggctacaccagccccaagaaaaagagaaaagtctaagctgccttctgcggggcttgccttctggccatgcccttcttctctcccttgcacctgtacctcttggtctttgaataaagcctgagtaggaaggctagcaaaaaaaaaaaaaaaaaaaaaaaaaaaaaaaaaaaaaaaaaaaaaaaaaaaaaaaaaaaaaaaaaaaaaaaaaaaaaaaa

SEQ ID NO: 2554 - RNA, 5419 nt, synthetic construct
  source 1..5419: mol_type = other RNA
aggaaataagagagaaaagaagagtaagaagaaatataagagccaccatggcccctaagaagaagcgtaaagtgagccgggtgaacggcagcggcagcggcggcggcatgaaccacgaccaggagttcgacccccctaaggtgtaccctcccgtccccgccgagaagagaaagcccatccgggtcctgagcctgttcgatggcatcgccaccggtctgctggtgctgaaggacctgggcatccaggtggataggtacattgcctccgaggtgtgcgaggactccatcaccgtgggaatggtgcgtcatcagggcaagatcatgtacgtgggcgacgtgcggagcgtgacacagaagcatatccaggagtggggccctttcgacctggtgatcggcggcagcccttgcaatgacctgagcatcgtgaacccagcccggaagggcctgtacgagggaaccggcagactgttcttcgagttttacagactgctgcacgacgcccggcctaaggaaggcgacgaccggcccttcttttggctgttcgagaatgtggtggccatgggagtcagcgacaagcgggatattagccggttcctggagagcaaccccgtgatgatcgatgccaaggaagtgagcgccgcccaccgggccagatacttctggggcaatctgcctggcatgaacagacccctggccagcaccgtgaacgacaagctggagctgcaggagtgcctggagcacggccggatcgccaagttcagcaaggtgagaaccatcaccacccgaagcaacagcatcaaacaaggcaaggaccagcactttcctgtgttcatgaacgagaaggaggacatcctgtggtgtaccgagatggagagagtgttcgggttcccagtccactacacagatgtcagcaacatgtctagactggccagacagagactgctgggaagaagctggtccgtccctgtgatcagacacctgttcgcccctctgaaggagtacttcgcctgcgtgagcagcggcaacagcaacgccaacagccggggccccagcttctctagcggcctggtgccactgtccctgagagggagccacatgggccccatggagatctacaaaaccgtgagcgcctggaagcggcagcctgtgcgcgtgctgagcctgtttcggaatatcgataaagtcctgaaaagcctgggattcctggagagcggctctggctccggcggtggcaccctgaagtacgtggaggatgtgacaaacgtggtcagacgggatgtggagaagtggggccccttcgatctggtgtacggcagcacccaacccctgggcagctcttgtgaccggtgccctggctggtacatgtttcagttccaccggatcctgcagtacgccctgccgagacaggagtcccagcggccattcttttggattttcatggacaacttgctgctgaccgaggatgaccaggaaactaccactcggttcctgcagaccgaagccgtgaccctgcaggacgtgagaggccgggactaccagaacgccatgcgggtgtggtccaacatccctggactgaaaagcaagcacgcacctctgacccctaaagaagaggagtacctgcaggcccaggtgcggagcagaagcaagctggacgcccctaaggtggatctgctggtgaagaattgcctcctgcccctgagagagtacttcaagtatttcagccagaatagtctgcccctgggcggcccaagcagcggcgcccctcctcccagcggcggcagcccagccggctccccaacctctaccgaggagggcacctctgagtccgccacccccgagagcggccctggcacctccaccgagcccagcgagggcagcgcacccggcagccctgccggcagccccacctccacagaggagggaaccagcaccgagcccagcgaaggcagcgccccaggcaccagcaccgagcctagtgagggcggctctggcggcggcagcgcccaggagattaaacggatcaacaagatcagaagaagacttgtgaaagacagcaacaccaagaaggccggcaagacaggccccatgaaaaccctgctggttagagtgatgacacccgatctgagagagcggctggaaaacctgagaaagaagcctgaaaatatcccccagcccatcagcaatacatctagagccaacctgaataagctgctgaccgattacaccgaaatgaagaaggcgatcctgcatgtgtactgggaagagttccagaaggaccctgtgggcctgatgagccgggtggcccagcctgccagcaagaagatcgatcagaacaagctgaaacctgagatggacgagaagggcaacctgaccaccgccggctttgcctgctctcagtgtggccagcccctgttcgtgtacaagctggagcaggtgtctgagaagggcaaggcttacaccaactacttcggacggtgcaatgtggccgagcacgaaaagctgatcctgctggcccagctgaagcccgagaaggatagcgacgaagccgtgacatatagcctgggaaagtttgggcagagggccctggatttctacagcattcatgtgaccaaggagtccacccaccccgtgaagcccctggcccagatcgccggaaacagatacgcctccggacctgtgggaaaggccctgagcgacgcatgtatgggcacaatcgcctccttcctgtctaagtaccaggacatcatcatcgaacaccagaaggtggtgaagggcaaccagaagagactggagagcctgcgggagctggccggcaaggaaaacctggaataccctagcgtgaccctgccacctcagcctcacaccaaggagggcgttgatgcctacaacgaagtgatcgcccgggtgcgaatgtgggtgaacctgaacctgtggcagaagctgaagctaagcagagatgatgccaagcctctgctgagactgaagggattcccttcctttcctctggtcgagagacaggccaacgaagtggactggtgggacatggtgtgtaacgtgaagaagctgatcaacgagaaaaaggaggatggcaaggtgttttggcagaatctggctggctacaagagacaggaagccctgagaccatacctgagcagcgaggaagatcggaagaagggaaagaaattcgctcggtaccagctgggcgacctgctgctgcacctggaaaagaagcacggcgaggactggggaaaggtgtacgacgaggcctgggagcggattgacaagaaagtggaaggcctgagcaagcacatcaagctggaagaggaacggagaagcgaggacgcccagagcaaggccgccctgaccgactggctgcgggctaaggccagcttcgtgatcgagggcctgaaggaggccgacaaggacgagttctgcagatgcgagctgaagctgcagaagtggtacggggacctgcggggaaagcccttcgccatcgaagccgagaacagcatcctggacatcagcggcttcagcaagcagtacaactgtgccttcatctggcagaaggacggcgtgaagaagctgaacctgtacctgatcatcaactacttcaagggcggcaagctgcggttcaagaagatcaaacctgaagccttcgaagccaacagattctacaccgtgatcaacaaaaagagcggcgagatcgtgcccatggaggtgaacttcaacttcgacgaccccaacctgatcatcctgcctctggcctttggcaagagacagggcagagaattcatctggaacgacctgctgtccctggaaaccggcagcctgaagctggccaacggaagagtgatcgagaagacactgtacaacagaagaacccggcaggatgagcctgccctgttcgtggccctgaccttcgagcggcgggaggtcctggactcctccaatatcaaaccaatgaacctgatcggcgtggcaagaggcgaaaacatccccgccgtgatcgccctgaccgaccccgagggctgcccactgagccggtttaaggatagcctgggaaacccaacccacatcctgagaatcggcgagagctataaggagaagcagcggaccatccaggccaagaaggaggtggagcagcggagagccggcggctacagccggaagtacgccagcaaagccaagaatctggcagacgatatggtgagaaacaccgctagagatctgctgtactacgccgtgacccaggatgccatgctgatcttcgccaacctgagccggggcttcggccggcagggcaagcggaccttcatggccgagagacagtacacacggatggaggactggctgaccgccaagctggcctacgagggcctgagcaagacctacctgtccaagacactggcccagtacacctccaagacatgcagcaactgtgggtttaccatcaccagcgccgactacgacagggtgctggagaagctgaagaagacagcaacaggctggatgaccacaattaacggcaaggagctgaaggtggagggccagattacctactacaacagatacaagagacagaacgtagtcaaggacctgtccgtcgagctggatagactgagcgaagaatctgtgaacaacgacatctcctcctggacaaagggcagaagcggagaagctctgagcctcctgaagaaaagattctcccatagacccgtgcaggagaagttcgtgtgcctgaactgcggcttcgagacacacgcagccgagcaagccgccctgaacatcgccagatcctggctgttcctgcggagccaggagtacaagaaataccagacaaacaagacaaccggcaacaccgataagagagccttcgtcgagacctggcagtccttttaccggaagaagcttaaggaggtgtggaaacctgccgtgcggtctggcggatctggcggaggctccacaagcaagcccggcgccgtgagcttcgccgacgtggccgtgtacttcagccccgaggagtggggctgcctgaggcccgcccagagggccctgtacagggacgtgatgagggagacctacggccacctgggcgccctgggcctgcccggccccaagcccgccctgatcagctggatggagggcgagagcgaggcctggaaccccgccgcccaggaccccgaggagggcgagaacctgggcggcgccctgaccagccccaagaaaaagagaaaagtctaagctgccttctgcggggcttgccttctggccatgcccttcttctctcccttgcacctgtacctcttggtctttgaataaagcctgagtaggaaggctagcaaaaaaaaaaaaaaaaaaaaaaaaaaaaaaaaaaaaaaaaaaaaaaaaaaaaaaaaaaaaaaaaaaaaaaaaaaaaaaaa

SEQ ID NO: 2555 - RNA, 5419 nt, synthetic construct
  source 1..5419: mol_type = other RNA
aggaaataagagagaaaagaagagtaagaagaaatataagagccaccatggcccctaagaagaagcgtaaagtgagccgggtgaacggcagcggcagcggcggcggcatgaaccacgaccaggagttcgacccccctaaggtgtaccctcccgtccccgccgagaagagaaagcccatccgggtcctgagcctgttcgatggcatcgccaccggtctgctggtgctgaaggacctgggcatccaggtggataggtacattgcctccgaggtgtgcgaggactccatcaccgtgggaatggtgcgtcatcagggcaagatcatgtacgtgggcgacgtgcggagcgtgacacagaagcatatccaggagtggggccctttcgacctggtgatcggcggcagcccttgcaatgacctgagcatcgtgaacccagcccggaagggcctgtacgagggaaccggcagactgttcttcgagttttacagactgctgcacgacgcccggcctaaggaaggcgacgaccggcccttcttttggctgttcgagaatgtggtggccatgggagtcagcgacaagcgggatattagccggttcctggagagcaaccccgtgatgatcgatgccaaggaagtgagcgccgcccaccgggccagatacttctggggcaatctgcctggcatgaacagacccctggccagcaccgtgaacgacaagctggagctgcaggagtgcctggagcacggccggatcgccaagttcagcaaggtgagaaccatcaccacccgaagcaacagcatcaaacaaggcaaggaccagcactttcctgtgttcatgaacgagaaggaggacatcctgtggtgtaccgagatggagagagtgttcgggttcccagtccactacacagatgtcagcaacatgtctagactggccagacagagactgctgggaagaagctggtccgtccctgtgatcagacacctgttcgcccctctgaaggagtacttcgcctgcgtgagcagcggcaacagcaacgccaacagccggggccccagcttctctagcggcctggtgccactgtccctgagagggagccacatgggccccatggagatctacaaaaccgtgagcgcctggaagcggcagcctgtgcgcgtgctgagcctgtttcggaatatcgataaagtcctgaaaagcctgggattcctggagagcggctctggctccggcggtggcaccctgaagtacgtggaggatgtgacaaacgtggtcagacgggatgtggagaagtggggccccttcgatctggtgtacggcagcacccaacccctgggcagctcttgtgaccggtgccctggctggtacatgtttcagttccaccggatcctgcagtacgccctgccgagacaggagtcccagcggccattcttttggattttcatggacaacttgctgctgaccgaggatgaccaggaaactaccactcggttcctgcagaccgaagccgtgaccctgcaggacgtgagaggccgggactaccagaacgccatgcgggtgtggtccaacatccctggactgaaaagcaagcacgcacctctgacccctaaagaagaggagtacctgcaggcccaggtgcggagcagaagcaagctggacgcccctaaggtggatctgctggtgaagaattgcctcctgcccctgagagagtacttcaagtatttcagccagaatagtctgcccctgggcggcccaagcagcggcgcccctcctcccagcggcggcagcccagccggctccccaacctctaccgaggagggcacctctgagtccgccacccccgagagcggccctggcacctccaccgagcccagcgagggcagcgcacccggcagccctgccggcagccccacctccacagaggagggaaccagcaccgagcccagcgaaggcagcgccccaggcaccagcaccgagcctagtgagggcggctctggcggcggcagcgcccaggagattaaacggatcaacaagatcagaagaagacttgtgaaagacagcaacaccaagaaggccggcaagacaggccccatgaaaaccctgctggttagagtgatgacacccgatctgagagagcggctggaaaacctgagaaagaagcctgaaaatatcccccagcccatcagcaatacatctagagccaacctgaataagctgctgaccgattacaccgaaatgaagaaggcgatcctgcatgtgtactgggaagagttccagaaggaccctgtgggcctgatgagccgggtggcccagcctgccagcaagaagatcgatcagaacaagctgaaacctgagatggacgagaagggcaacctgaccaccgccggctttgcctgctctcagtgtggccagcccctgttcgtgtacaagctggagcaggtgtctgagaagggcaaggcttacaccaactacttcggacggtgcaatgtggccgagcacgaaaagctgatcctgctggcccagctgaagcccgagaaggatagcgacgaagccgtgacatatagcctgggaaagtttgggcagagggccctggatttctacagcattcatgtgaccaaggagtccacccaccccgtgaagcccctggcccagatcgccggaaacagatacgcctccggacctgtgggaaaggccctgagcgacgcatgtatgggcacaatcgcctccttcctgtctaagtaccaggacatcatcatcgaacaccagaaggtggtgaagggcaaccagaagagactggagagcctgcgggagctggccggcaaggaaaacctggaataccctagcgtgaccctgccacctcagcctcacaccaaggagggcgttgatgcctacaacgaagtgatcgcccgggtgcgaatgtgggtgaacctgaacctgtggcagaagctgaagctaagcagagatgatgccaagcctctgctgagactgaagggattcccttcctttcctctggtcgagagacaggccaacgaagtggactggtgggacatggtgtgtaacgtgaagaagctgatcaacgagaaaaaggaggatggcaaggtgttttggcagaatctggctggctacaagagacaggaagccctgagaccatacctgagcagcgaggaagatcggaagaagggaaagaaattcgctcggtaccagctgggcgacctgctgctgcacctggaaaagaagcacggcgaggactggggaaaggtgtacgacgaggcctgggagcggattgacaagaaagtggaaggcctgagcaagcacatcaagctggaagaggaacggagaagcgaggacgcccagagcaaggccgccctgaccgactggctgcgggctaaggccagcttcgtgatcgagggcctgaaggaggccgacaaggacgagttctgcagatgcgagctgaagctgcagaagtggtacggggacctgcggggaaagcccttcgccatcgaagccgagaacagcatcctggacatcagcggcttcagcaagcagtacaactgtgccttcatctggcagaaggacggcgtgaagaagctgaacctgtacctgatcatcaactacttcaagggcggcaagctgcggttcaagaagatcaaacctgaagccttcgaagccaacagattctacaccgtgatcaacaaaaagagcggcgagatcgtgcccatggaggtgaacttcaacttcgacgaccccaacctgatcatcctgcctctggcctttggcaagagacagggcagagaattcatctggaacgacctgctgtccctggaaaccggcagcctgaagctggccaacggaagagtgatcgagaagacactgtacaacagaagaacccggcaggatgagcctgccctgttcgtggccctgaccttcgagcggcgggaggtcctggactcctccaatatcaaaccaatgaacctgatcggcgtggcaagaggcgaaaacatccccgccgtgatcgccctgaccgaccccgagggctgcccactgagccggtttaaggatagcctgggaaacccaacccacatcctgagaatcggcgagagctataaggagaagcagcggaccatccaggccaagaaggaggtggagcagcggagagccggcggctacagccggaagtacgccagcaaagccaagaatctggcagacgatatggtgagaaacaccgctagagatctgctgtactacgccgtgacccaggatgccatgctgatcttcgccaacctgagccggggcttcggccggcagggcaagcggaccttcatggccgagagacagtacacacggatggaggactggctgaccgccaagctggcctacgagggcctgagcaagacctacctgtccaagacactggcccagtacacctccaagacatgcagcaactgtgggtttaccatcaccagcgccgactacgacagggtgctggagaagctgaagaagacagcaacaggctggatgaccacaattaacggcaaggagctgaaggtggagggccagattacctactacaacagatacaagagacagaacgtagtcaaggacctgtccgtcgagctggatagactgagcgaagaatctgtgaacaacgacatctcctcctggacaaagggcagaagcggagaagctctgagcctcctgaagaaaagattctcccatagacccgtgcaggagaagttcgtgtgcctgaactgcggcttcgagacacacgcagccgagcaagccgccctgaacatcgccagatcctggctgttcctgcggagccaggagtacaagaaataccagacaaacaagacaaccggcaacaccgataagagagccttcgtcgagacctggcagtccttttaccggaagaagcttaaggaggtgtggaaacctgccgtgcggtctggcggatctggcggaggctccacaagcttccagaggagcgtgctgttcagcgacgtgagcatcgacttcagccccgaggagtgggagtacctggacctggagcagaaggacctgtacagggacgtgatgctggagaactacagcaacctggtgagcctgggctgcttcatcagcaagcccgacgtgatcagcctgctggagcagggcaaggagccctggaaggtggtgaggaagggcaggaggcagtaccccgacctggagaccaagtacaccagccccaagaaaaagagaaaagtctaagctgccttctgcggggcttgccttctggccatgcccttcttctctcccttgcacctgtacctcttggtctttgaataaagcctgagtaggaaggctagcaaaaaaaaaaaaaaaaaaaaaaaaaaaaaaaaaaaaaaaaaaaaaaaaaaaaaaaaaaaaaaaaaaaaaaaaaaaaaaaa

SEQ ID NO: 2556 - RNA, 5419 nt, synthetic construct
  source 1..5419: mol_type = other RNA
aggaaataagagagaaaagaagagtaagaagaaatataagagccaccatggcccctaagaagaagcgtaaagtgagccgggtgaacggcagcggcagcggcggcggcatgaaccacgaccaggagttcgacccccctaaggtgtaccctcccgtccccgccgagaagagaaagcccatccgggtcctgagcctgttcgatggcatcgccaccggtctgctggtgctgaaggacctgggcatccaggtggataggtacattgcctccgaggtgtgcgaggactccatcaccgtgggaatggtgcgtcatcagggcaagatcatgtacgtgggcgacgtgcggagcgtgacacagaagcatatccaggagtggggccctttcgacctggtgatcggcggcagcccttgcaatgacctgagcatcgtgaacccagcccggaagggcctgtacgagggaaccggcagactgttcttcgagttttacagactgctgcacgacgcccggcctaaggaaggcgacgaccggcccttcttttggctgttcgagaatgtggtggccatgggagtcagcgacaagcgggatattagccggttcctggagagcaaccccgtgatgatcgatgccaaggaagtgagcgccgcccaccgggccagatacttctggggcaatctgcctggcatgaacagacccctggccagcaccgtgaacgacaagctggagctgcaggagtgcctggagcacggccggatcgccaagttcagcaaggtgagaaccatcaccacccgaagcaacagcatcaaacaaggcaaggaccagcactttcctgtgttcatgaacgagaaggaggacatcctgtggtgtaccgagatggagagagtgttcgggttcccagtccactacacagatgtcagcaacatgtctagactggccagacagagactgctgggaagaagctggtccgtccctgtgatcagacacctgttcgcccctctgaaggagtacttcgcctgcgtgagcagcggcaacagcaacgccaacagccggggccccagcttctctagcggcctggtgccactgtccctgagagggagccacatgggccccatggagatctacaaaaccgtgagcgcctggaagcggcagcctgtgcgcgtgctgagcctgtttcggaatatcgataaagtcctgaaaagcctgggattcctggagagcggctctggctccggcggtggcaccctgaagtacgtggaggatgtgacaaacgtggtcagacgggatgtggagaagtggggccccttcgatctggtgtacggcagcacccaacccctgggcagctcttgtgaccggtgccctggctggtacatgtttcagttccaccggatcctgcagtacgccctgccgagacaggagtcccagcggccattcttttggattttcatggacaacttgctgctgaccgaggatgaccaggaaactaccactcggttcctgcagaccgaagccgtgaccctgcaggacgtgagaggccgggactaccagaacgccatgcgggtgtggtccaacatccctggactgaaaagcaagcacgcacctctgacccctaaagaagaggagtacctgcaggcccaggtgcggagcagaagcaagctggacgcccctaaggtggatctgctggtgaagaattgcctcctgcccctgagagagtacttcaagtatttcagccagaatagtctgcccctgggcggcccaagcagcggcgcccctcctcccagcggcggcagcccagccggctccccaacctctaccgaggagggcacctctgagtccgccacccccgagagcggccctggcacctccaccgagcccagcgagggcagcgcacccggcagccctgccggcagccccacctccacagaggagggaaccagcaccgagcccagcgaaggcagcgccccaggcaccagcaccgagcctagtgagggcggctctggcggcggcagcgcccaggagattaaacggatcaacaagatcagaagaagacttgtgaaagacagcaacaccaagaaggccggcaagacaggccccatgaaaaccctgctggttagagtgatgacacccgatctgagagagcggctggaaaacctgagaaagaagcctgaaaatatcccccagcccatcagcaatacatctagagccaacctgaataagctgctgaccgattacaccgaaatgaagaaggcgatcctgcatgtgtactgggaagagttccagaaggaccctgtgggcctgatgagccgggtggcccagcctgccagcaagaagatcgatcagaacaagctgaaacctgagatggacgagaagggcaacctgaccaccgccggctttgcctgctctcagtgtggccagcccctgttcgtgtacaagctggagcaggtgtctgagaagggcaaggcttacaccaactacttcggacggtgcaatgtggccgagcacgaaaagctgatcctgctggcccagctgaagcccgagaaggatagcgacgaagccgtgacatatagcctgggaaagtttgggcagagggccctggatttctacagcattcatgtgaccaaggagtccacccaccccgtgaagcccctggcccagatcgccggaaacagatacgcctccggacctgtgggaaaggccctgagcgacgcatgtatgggcacaatcgcctccttcctgtctaagtaccaggacatcatcatcgaacaccagaaggtggtgaagggcaaccagaagagactggagagcctgcgggagctggccggcaaggaaaacctggaataccctagcgtgaccctgccacctcagcctcacaccaaggagggcgttgatgcctacaacgaagtgatcgcccgggtgcgaatgtgggtgaacctgaacctgtggcagaagctgaagctaagcagagatgatgccaagcctctgctgagactgaagggattcccttcctttcctctggtcgagagacaggccaacgaagtggactggtgggacatggtgtgtaacgtgaagaagctgatcaacgagaaaaaggaggatggcaaggtgttttggcagaatctggctggctacaagagacaggaagccctgagaccatacctgagcagcgaggaagatcggaagaagggaaagaaattcgctcggtaccagctgggcgacctgctgctgcacctggaaaagaagcacggcgaggactggggaaaggtgtacgacgaggcctgggagcggattgacaagaaagtggaaggcctgagcaagcacatcaagctggaagaggaacggagaagcgaggacgcccagagcaaggccgccctgaccgactggctgcgggctaaggccagcttcgtgatcgagggcctgaaggaggccgacaaggacgagttctgcagatgcgagctgaagctgcagaagtggtacggggacctgcggggaaagcccttcgccatcgaagccgagaacagcatcctggacatcagcggcttcagcaagcagtacaactgtgccttcatctggcagaaggacggcgtgaagaagctgaacctgtacctgatcatcaactacttcaagggcggcaagctgcggttcaagaagatcaaacctgaagccttcgaagccaacagattctacaccgtgatcaacaaaaagagcggcgagatcgtgcccatggaggtgaacttcaacttcgacgaccccaacctgatcatcctgcctctggcctttggcaagagacagggcagagaattcatctggaacgacctgctgtccctggaaaccggcagcctgaagctggccaacggaagagtgatcgagaagacactgtacaacagaagaacccggcaggatgagcctgccctgttcgtggccctgaccttcgagcggcgggaggtcctggactcctccaatatcaaaccaatgaacctgatcggcgtggcaagaggcgaaaacatccccgccgtgatcgccctgaccgaccccgagggctgcccactgagccggtttaaggatagcctgggaaacccaacccacatcctgagaatcggcgagagctataaggagaagcagcggaccatccaggccaagaaggaggtggagcagcggagagccggcggctacagccggaagtacgccagcaaagccaagaatctggcagacgatatggtgagaaacaccgctagagatctgctgtactacgccgtgacccaggatgccatgctgatcttcgccaacctgagccggggcttcggccggcagggcaagcggaccttcatggccgagagacagtacacacggatggaggactggctgaccgccaagctggcctacgagggcctgagcaagacctacctgtccaagacactggcccagtacacctccaagacatgcagcaactgtgggtttaccatcaccagcgccgactacgacagggtgctggagaagctgaagaagacagcaacaggctggatgaccacaattaacggcaaggagctgaaggtggagggccagattacctactacaacagatacaagagacagaacgtagtcaaggacctgtccgtcgagctggatagactgagcgaagaatctgtgaacaacgacatctcctcctggacaaagggcagaagcggagaagctctgagcctcctgaagaaaagattctcccatagacccgtgcaggagaagttcgtgtgcctgaactgcggcttcgagacacacgcagccgagcaagccgccctgaacatcgccagatcctggctgttcctgcggagccaggagtacaagaaataccagacaaacaagacaaccggcaacaccgataagagagccttcgtcgagacctggcagtccttttaccggaagaagcttaaggaggtgtggaaacctgccgtgcggtctggcggatctggcggaggctccacaagcatggccttcgaggacgtggccgtgtacttcagccaggaggagtggggcctgctggacaccgcccagagggccctgtacaggagggtgatgctggacaacttcgccctggtggccagcctgggcctgagcaccagcaggcccagggtggtgatccagctggagaggggcgaggagccctgggtgcccagcggcaccgacaccatcctgagcaggaacacctacaggaggaggaaccccggcagcaccagccccaagaaaaagagaaaagtctaagctgccttctgcggggcttgccttctggccatgcccttcttctctcccttgcacctgtacctcttggtctttgaataaagcctgagtaggaaggctagcaaaaaaaaaaaaaaaaaaaaaaaaaaaaaaaaaaaaaaaaaaaaaaaaaaaaaaaaaaaaaaaaaaaaaaaaaaaaaaaa

SEQ ID NO: 2557 - RNA, 5419 nt, synthetic construct
  source 1..5419: mol_type = other RNA
aggaaataagagagaaaagaagagtaagaagaaatataagagccaccatggcccctaagaagaagcgtaaagtgagccgggtgaacggcagcggcagcggcggcggcatgaaccacgaccaggagttcgacccccctaaggtgtaccctcccgtccccgccgagaagagaaagcccatccgggtcctgagcctgttcgatggcatcgccaccggtctgctggtgctgaaggacctgggcatccaggtggataggtacattgcctccgaggtgtgcgaggactccatcaccgtgggaatggtgcgtcatcagggcaagatcatgtacgtgggcgacgtgcggagcgtgacacagaagcatatccaggagtggggccctttcgacctggtgatcggcggcagcccttgcaatgacctgagcatcgtgaacccagcccggaagggcctgtacgagggaaccggcagactgttcttcgagttttacagactgctgcacgacgcccggcctaaggaaggcgacgaccggcccttcttttggctgttcgagaatgtggtggccatgggagtcagcgacaagcgggatattagccggttcctggagagcaaccccgtgatgatcgatgccaaggaagtgagcgccgcccaccgggccagatacttctggggcaatctgcctggcatgaacagacccctggccagcaccgtgaacgacaagctggagctgcaggagtgcctggagcacggccggatcgccaagttcagcaaggtgagaaccatcaccacccgaagcaacagcatcaaacaaggcaaggaccagcactttcctgtgttcatgaacgagaaggaggacatcctgtggtgtaccgagatggagagagtgttcgggttcccagtccactacacagatgtcagcaacatgtctagactggccagacagagactgctgggaagaagctggtccgtccctgtgatcagacacctgttcgcccctctgaaggagtacttcgcctgcgtgagcagcggcaacagcaacgccaacagccggggccccagcttctctagcggcctggtgccactgtccctgagagggagccacatgggccccatggagatctacaaaaccgtgagcgcctggaagcggcagcctgtgcgcgtgctgagcctgtttcggaatatcgataaagtcctgaaaagcctgggattcctggagagcggctctggctccggcggtggcaccctgaagtacgtggaggatgtgacaaacgtggtcagacgggatgtggagaagtggggccccttcgatctggtgtacggcagcacccaacccctgggcagctcttgtgaccggtgccctggctggtacatgtttcagttccaccggatcctgcagtacgccctgccgagacaggagtcccagcggccattcttttggattttcatggacaacttgctgctgaccgaggatgaccaggaaactaccactcggttcctgcagaccgaagccgtgaccctgcaggacgtgagaggccgggactaccagaacgccatgcgggtgtggtccaacatccctggactgaaaagcaagcacgcacctctgacccctaaagaagaggagtacctgcaggcccaggtgcggagcagaagcaagctggacgcccctaaggtggatctgctggtgaagaattgcctcctgcccctgagagagtacttcaagtatttcagccagaatagtctgcccctgggcggcccaagcagcggcgcccctcctcccagcggcggcagcccagccggctccccaacctctaccgaggagggcacctctgagtccgccacccccgagagcggccctggcacctccaccgagcccagcgagggcagcgcacccggcagccctgccggcagccccacctccacagaggagggaaccagcaccgagcccagcgaaggcagcgccccaggcaccagcaccgagcctagtgagggcggctctggcggcggcagcgcccaggagattaaacggatcaacaagatcagaagaagacttgtgaaagacagcaacaccaagaaggccggcaagacaggccccatgaaaaccctgctggttagagtgatgacacccgatctgagagagcggctggaaaacctgagaaagaagcctgaaaatatcccccagcccatcagcaatacatctagagccaacctgaataagctgctgaccgattacaccgaaatgaagaaggcgatcctgcatgtgtactgggaagagttccagaaggaccctgtgggcctgatgagccgggtggcccagcctgccagcaagaagatcgatcagaacaagctgaaacctgagatggacgagaagggcaacctgaccaccgccggctttgcctgctctcagtgtggccagcccctgttcgtgtacaagctggagcaggtgtctgagaagggcaaggcttacaccaactacttcggacggtgcaatgtggccgagcacgaaaagctgatcctgctggcccagctgaagcccgagaaggatagcgacgaagccgtgacatatagcctgggaaagtttgggcagagggccctggatttctacagcattcatgtgaccaaggagtccacccaccccgtgaagcccctggcccagatcgccggaaacagatacgcctccggacctgtgggaaaggccctgagcgacgcatgtatgggcacaatcgcctccttcctgtctaagtaccaggacatcatcatcgaacaccagaaggtggtgaagggcaaccagaagagactggagagcctgcgggagctggccggcaaggaaaacctggaataccctagcgtgaccctgccacctcagcctcacaccaaggagggcgttgatgcctacaacgaagtgatcgcccgggtgcgaatgtgggtgaacctgaacctgtggcagaagctgaagctaagcagagatgatgccaagcctctgctgagactgaagggattcccttcctttcctctggtcgagagacaggccaacgaagtggactggtgggacatggtgtgtaacgtgaagaagctgatcaacgagaaaaaggaggatggcaaggtgttttggcagaatctggctggctacaagagacaggaagccctgagaccatacctgagcagcgaggaagatcggaagaagggaaagaaattcgctcggtaccagctgggcgacctgctgctgcacctggaaaagaagcacggcgaggactggggaaaggtgtacgacgaggcctgggagcggattgacaagaaagtggaaggcctgagcaagcacatcaagctggaagaggaacggagaagcgaggacgcccagagcaaggccgccctgaccgactggctgcgggctaaggccagcttcgtgatcgagggcctgaaggaggccgacaaggacgagttctgcagatgcgagctgaagctgcagaagtggtacggggacctgcggggaaagcccttcgccatcgaagccgagaacagcatcctggacatcagcggcttcagcaagcagtacaactgtgccttcatctggcagaaggacggcgtgaagaagctgaacctgtacctgatcatcaactacttcaagggcggcaagctgcggttcaagaagatcaaacctgaagccttcgaagccaacagattctacaccgtgatcaacaaaaagagcggcgagatcgtgcccatggaggtgaacttcaacttcgacgaccccaacctgatcatcctgcctctggcctttggcaagagacagggcagagaattcatctggaacgacctgctgtccctggaaaccggcagcctgaagctggccaacggaagagtgatcgagaagacactgtacaacagaagaacccggcaggatgagcctgccctgttcgtggccctgaccttcgagcggcgggaggtcctggactcctccaatatcaaaccaatgaacctgatcggcgtggcaagaggcgaaaacatccccgccgtgatcgccctgaccgaccccgagggctgcccactgagccggtttaaggatagcctgggaaacccaacccacatcctgagaatcggcgagagctataaggagaagcagcggaccatccaggccaagaaggaggtggagcagcggagagccggcggctacagccggaagtacgccagcaaagccaagaatctggcagacgatatggtgagaaacaccgctagagatctgctgtactacgccgtgacccaggatgccatgctgatcttcgccaacctgagccggggcttcggccggcagggcaagcggaccttcatggccgagagacagtacacacggatggaggactggctgaccgccaagctggcctacgagggcctgagcaagacctacctgtccaagacactggcccagtacacctccaagacatgcagcaactgtgggtttaccatcaccagcgccgactacgacagggtgctggagaagctgaagaagacagcaacaggctggatgaccacaattaacggcaaggagctgaaggtggagggccagattacctactacaacagatacaagagacagaacgtagtcaaggacctgtccgtcgagctggatagactgagcgaagaatctgtgaacaacgacatctcctcctggacaaagggcagaagcggagaagctctgagcctcctgaagaaaagattctcccatagacccgtgcaggagaagttcgtgtgcctgaactgcggcttcgagacacacgcagccgagcaagccgccctgaacatcgccagatcctggctgttcctgcggagccaggagtacaagaaataccagacaaacaagacaaccggcaacaccgataagagagccttcgtcgagacctggcagtccttttaccggaagaagcttaaggaggtgtggaaacctgccgtgcggtctggcggatctggcggaggctccacaagcgtgcaggagcccgtgaccttcaaggacgtggccgtggacttcacccaggaggagtggggccagctggacctggtgcagaggaccctgtacagggacgtgatgctggagacctacggccacctgctgagcgtgggcaaccagatcgccaagcccgaggtgatcagcctgctggagcagggcgaggagccctggagcatggagcaggcctgcccccagaggacctgccccgagtggatgaggaacaccagccccaagaaaaagagaaaagtctaagctgccttctgcggggcttgccttctggccatgcccttcttctctcccttgcacctgtacctcttggtctttgaataaagcctgagtaggaaggctagcaaaaaaaaaaaaaaaaaaaaaaaaaaaaaaaaaaaaaaaaaaaaaaaaaaaaaaaaaaaaaaaaaaaaaaaaaaaaaaaa

SEQ ID NO: 2558 - RNA, 5419 nt, synthetic construct
  source 1..5419: mol_type = other RNA
aggaaataagagagaaaagaagagtaagaagaaatataagagccaccatggcccctaagaagaagcgtaaagtgagccgggtgaacggcagcggcagcggcggcggcatgaaccacgaccaggagttcgacccccctaaggtgtaccctcccgtccccgccgagaagagaaagcccatccgggtcctgagcctgttcgatggcatcgccaccggtctgctggtgctgaaggacctgggcatccaggtggataggtacattgcctccgaggtgtgcgaggactccatcaccgtgggaatggtgcgtcatcagggcaagatcatgtacgtgggcgacgtgcggagcgtgacacagaagcatatccaggagtggggccctttcgacctggtgatcggcggcagcccttgcaatgacctgagcatcgtgaacccagcccggaagggcctgtacgagggaaccggcagactgttcttcgagttttacagactgctgcacgacgcccggcctaaggaaggcgacgaccggcccttcttttggctgttcgagaatgtggtggccatgggagtcagcgacaagcgggatattagccggttcctggagagcaaccccgtgatgatcgatgccaaggaagtgagcgccgcccaccgggccagatacttctggggcaatctgcctggcatgaacagacccctggccagcaccgtgaacgacaagctggagctgcaggagtgcctggagcacggccggatcgccaagttcagcaaggtgagaaccatcaccacccgaagcaacagcatcaaacaaggcaaggaccagcactttcctgtgttcatgaacgagaaggaggacatcctgtggtgtaccgagatggagagagtgttcgggttcccagtccactacacagatgtcagcaacatgtctagactggccagacagagactgctgggaagaagctggtccgtccctgtgatcagacacctgttcgcccctctgaaggagtacttcgcctgcgtgagcagcggcaacagcaacgccaacagccggggccccagcttctctagcggcctggtgccactgtccctgagagggagccacatgggccccatggagatctacaaaaccgtgagcgcctggaagcggcagcctgtgcgcgtgctgagcctgtttcggaatatcgataaagtcctgaaaagcctgggattcctggagagcggctctggctccggcggtggcaccctgaagtacgtggaggatgtgacaaacgtggtcagacgggatgtggagaagtggggccccttcgatctggtgtacggcagcacccaacccctgggcagctcttgtgaccggtgccctggctggtacatgtttcagttccaccggatcctgcagtacgccctgccgagacaggagtcccagcggccattcttttggattttcatggacaacttgctgctgaccgaggatgaccaggaaactaccactcggttcctgcagaccgaagccgtgaccctgcaggacgtgagaggccgggactaccagaacgccatgcgggtgtggtccaacatccctggactgaaaagcaagcacgcacctctgacccctaaagaagaggagtacctgcaggcccaggtgcggagcagaagcaagctggacgcccctaaggtggatctgctggtgaagaattgcctcctgcccctgagagagtacttcaagtatttcagccagaatagtctgcccctgggcggcccaagcagcggcgcccctcctcccagcggcggcagcccagccggctccccaacctctaccgaggagggcacctctgagtccgccacccccgagagcggccctggcacctccaccgagcccagcgagggcagcgcacccggcagccctgccggcagccccacctccacagaggagggaaccagcaccgagcccagcgaaggcagcgccccaggcaccagcaccgagcctagtgagggcggctctggcggcggcagcgcccaggagattaaacggatcaacaagatcagaagaagacttgtgaaagacagcaacaccaagaaggccggcaagacaggccccatgaaaaccctgctggttagagtgatgacacccgatctgagagagcggctggaaaacctgagaaagaagcctgaaaatatcccccagcccatcagcaatacatctagagccaacctgaataagctgctgaccgattacaccgaaatgaagaaggcgatcctgcatgtgtactgggaagagttccagaaggaccctgtgggcctgatgagccgggtggcccagcctgccagcaagaagatcgatcagaacaagctgaaacctgagatggacgagaagggcaacctgaccaccgccggctttgcctgctctcagtgtggccagcccctgttcgtgtacaagctggagcaggtgtctgagaagggcaaggcttacaccaactacttcggacggtgcaatgtggccgagcacgaaaagctgatcctgctggcccagctgaagcccgagaaggatagcgacgaagccgtgacatatagcctgggaaagtttgggcagagggccctggatttctacagcattcatgtgaccaaggagtccacccaccccgtgaagcccctggcccagatcgccggaaacagatacgcctccggacctgtgggaaaggccctgagcgacgcatgtatgggcacaatcgcctccttcctgtctaagtaccaggacatcatcatcgaacaccagaaggtggtgaagggcaaccagaagagactggagagcctgcgggagctggccggcaaggaaaacctggaataccctagcgtgaccctgccacctcagcctcacaccaaggagggcgttgatgcctacaacgaagtgatcgcccgggtgcgaatgtgggtgaacctgaacctgtggcagaagctgaagctaagcagagatgatgccaagcctctgctgagactgaagggattcccttcctttcctctggtcgagagacaggccaacgaagtggactggtgggacatggtgtgtaacgtgaagaagctgatcaacgagaaaaaggaggatggcaaggtgttttggcagaatctggctggctacaagagacaggaagccctgagaccatacctgagcagcgaggaagatcggaagaagggaaagaaattcgctcggtaccagctgggcgacctgctgctgcacctggaaaagaagcacggcgaggactggggaaaggtgtacgacgaggcctgggagcggattgacaagaaagtggaaggcctgagcaagcacatcaagctggaagaggaacggagaagcgaggacgcccagagcaaggccgccctgaccgactggctgcgggctaaggccagcttcgtgatcgagggcctgaaggaggccgacaaggacgagttctgcagatgcgagctgaagctgcagaagtggtacggggacctgcggggaaagcccttcgccatcgaagccgagaacagcatcctggacatcagcggcttcagcaagcagtacaactgtgccttcatctggcagaaggacggcgtgaagaagctgaacctgtacctgatcatcaactacttcaagggcggcaagctgcggttcaagaagatcaaacctgaagccttcgaagccaacagattctacaccgtgatcaacaaaaagagcggcgagatcgtgcccatggaggtgaacttcaacttcgacgaccccaacctgatcatcctgcctctggcctttggcaagagacagggcagagaattcatctggaacgacctgctgtccctggaaaccggcagcctgaagctggccaacggaagagtgatcgagaagacactgtacaacagaagaacccggcaggatgagcctgccctgttcgtggccctgaccttcgagcggcgggaggtcctggactcctccaatatcaaaccaatgaacctgatcggcgtggcaagaggcgaaaacatccccgccgtgatcgccctgaccgaccccgagggctgcccactgagccggtttaaggatagcctgggaaacccaacccacatcctgagaatcggcgagagctataaggagaagcagcggaccatccaggccaagaaggaggtggagcagcggagagccggcggctacagccggaagtacgccagcaaagccaagaatctggcagacgatatggtgagaaacaccgctagagatctgctgtactacgccgtgacccaggatgccatgctgatcttcgccaacctgagccggggcttcggccggcagggcaagcggaccttcatggccgagagacagtacacacggatggaggactggctgaccgccaagctggcctacgagggcctgagcaagacctacctgtccaagacactggcccagtacacctccaagacatgcagcaactgtgggtttaccatcaccagcgccgactacgacagggtgctggagaagctgaagaagacagcaacaggctggatgaccacaattaacggcaaggagctgaaggtggagggccagattacctactacaacagatacaagagacagaacgtagtcaaggacctgtccgtcgagctggatagactgagcgaagaatctgtgaacaacgacatctcctcctggacaaagggcagaagcggagaagctctgagcctcctgaagaaaagattctcccatagacccgtgcaggagaagttcgtgtgcctgaactgcggcttcgagacacacgcagccgagcaagccgccctgaacatcgccagatcctggctgttcctgcggagccaggagtacaagaaataccagacaaacaagacaaccggcaacaccgataagagagccttcgtcgagacctggcagtccttttaccggaagaagcttaaggaggtgtggaaacctgccgtgcggtctggcggatctggcggaggctccacaagcatgagccagggcagcgtgaccttcagggacgtggccatcgacttcagccaggaggagtggaagtggctgcagcccgcccagagggacctgtacaggtgcgtgatgctggagaactacggccacctggtgagcctgggcctgagcatcagcaagcccgacgtggtgagcctgctggagcagggcaaggagccctggctgggcaagaggaacgtgaacagggacctgttcagcgtgagcgagagcaccagccccaagaaaaagagaaaagtctaagctgccttctgcggggcttgccttctggccatgcccttcttctctcccttgcacctgtacctcttggtctttgaataaagcctgagtaggaaggctagcaaaaaaaaaaaaaaaaaaaaaaaaaaaaaaaaaaaaaaaaaaaaaaaaaaaaaaaaaaaaaaaaaaaaaaaaaaaaaaaa

SEQ ID NO: 2559 - RNA, 5419 nt, synthetic construct
  source 1..5419: mol_type = other RNA
aggaaataagagagaaaagaagagtaagaagaaatataagagccaccatggcccctaagaagaagcgtaaagtgagccgggtgaacggcagcggcagcggcggcggcatgaaccacgaccaggagttcgacccccctaaggtgtaccctcccgtccccgccgagaagagaaagcccatccgggtcctgagcctgttcgatggcatcgccaccggtctgctggtgctgaaggacctgggcatccaggtggataggtacattgcctccgaggtgtgcgaggactccatcaccgtgggaatggtgcgtcatcagggcaagatcatgtacgtgggcgacgtgcggagcgtgacacagaagcatatccaggagtggggccctttcgacctggtgatcggcggcagcccttgcaatgacctgagcatcgtgaacccagcccggaagggcctgtacgagggaaccggcagactgttcttcgagttttacagactgctgcacgacgcccggcctaaggaaggcgacgaccggcccttcttttggctgttcgagaatgtggtggccatgggagtcagcgacaagcgggatattagccggttcctggagagcaaccccgtgatgatcgatgccaaggaagtgagcgccgcccaccgggccagatacttctggggcaatctgcctggcatgaacagacccctggccagcaccgtgaacgacaagctggagctgcaggagtgcctggagcacggccggatcgccaagttcagcaaggtgagaaccatcaccacccgaagcaacagcatcaaacaaggcaaggaccagcactttcctgtgttcatgaacgagaaggaggacatcctgtggtgtaccgagatggagagagtgttcgggttcccagtccactacacagatgtcagcaacatgtctagactggccagacagagactgctgggaagaagctggtccgtccctgtgatcagacacctgttcgcccctctgaaggagtacttcgcctgcgtgagcagcggcaacagcaacgccaacagccggggccccagcttctctagcggcctggtgccactgtccctgagagggagccacatgggccccatggagatctacaaaaccgtgagcgcctggaagcggcagcctgtgcgcgtgctgagcctgtttcggaatatcgataaagtcctgaaaagcctgggattcctggagagcggctctggctccggcggtggcaccctgaagtacgtggaggatgtgacaaacgtggtcagacgggatgtggagaagtggggccccttcgatctggtgtacggcagcacccaacccctgggcagctcttgtgaccggtgccctggctggtacatgtttcagttccaccggatcctgcagtacgccctgccgagacaggagtcccagcggccattcttttggattttcatggacaacttgctgctgaccgaggatgaccaggaaactaccactcggttcctgcagaccgaagccgtgaccctgcaggacgtgagaggccgggactaccagaacgccatgcgggtgtggtccaacatccctggactgaaaagcaagcacgcacctctgacccctaaagaagaggagtacctgcaggcccaggtgcggagcagaagcaagctggacgcccctaaggtggatctgctggtgaagaattgcctcctgcccctgagagagtacttcaagtatttcagccagaatagtctgcccctgggcggcccaagcagcggcgcccctcctcccagcggcggcagcccagccggctccccaacctctaccgaggagggcacctctgagtccgccacccccgagagcggccctggcacctccaccgagcccagcgagggcagcgcacccggcagccctgccggcagccccacctccacagaggagggaaccagcaccgagcccagcgaaggcagcgccccaggcaccagcaccgagcctagtgagggcggctctggcggcggcagcgcccaggagattaaacggatcaacaagatcagaagaagacttgtgaaagacagcaacaccaagaaggccggcaagacaggccccatgaaaaccctgctggttagagtgatgacacccgatctgagagagcggctggaaaacctgagaaagaagcctgaaaatatcccccagcccatcagcaatacatctagagccaacctgaataagctgctgaccgattacaccgaaatgaagaaggcgatcctgcatgtgtactgggaagagttccagaaggaccctgtgggcctgatgagccgggtggcccagcctgccagcaagaagatcgatcagaacaagctgaaacctgagatggacgagaagggcaacctgaccaccgccggctttgcctgctctcagtgtggccagcccctgttcgtgtacaagctggagcaggtgtctgagaagggcaaggcttacaccaactacttcggacggtgcaatgtggccgagcacgaaaagctgatcctgctggcccagctgaagcccgagaaggatagcgacgaagccgtgacatatagcctgggaaagtttgggcagagggccctggatttctacagcattcatgtgaccaaggagtccacccaccccgtgaagcccctggcccagatcgccggaaacagatacgcctccggacctgtgggaaaggccctgagcgacgcatgtatgggcacaatcgcctccttcctgtctaagtaccaggacatcatcatcgaacaccagaaggtggtgaagggcaaccagaagagactggagagcctgcgggagctggccggcaaggaaaacctggaataccctagcgtgaccctgccacctcagcctcacaccaaggagggcgttgatgcctacaacgaagtgatcgcccgggtgcgaatgtgggtgaacctgaacctgtggcagaagctgaagctaagcagagatgatgccaagcctctgctgagactgaagggattcccttcctttcctctggtcgagagacaggccaacgaagtggactggtgggacatggtgtgtaacgtgaagaagctgatcaacgagaaaaaggaggatggcaaggtgttttggcagaatctggctggctacaagagacaggaagccctgagaccatacctgagcagcgaggaagatcggaagaagggaaagaaattcgctcggtaccagctgggcgacctgctgctgcacctggaaaagaagcacggcgaggactggggaaaggtgtacgacgaggcctgggagcggattgacaagaaagtggaaggcctgagcaagcacatcaagctggaagaggaacggagaagcgaggacgcccagagcaaggccgccctgaccgactggctgcgggctaaggccagcttcgtgatcgagggcctgaaggaggccgacaaggacgagttctgcagatgcgagctgaagctgcagaagtggtacggggacctgcggggaaagcccttcgccatcgaagccgagaacagcatcctggacatcagcggcttcagcaagcagtacaactgtgccttcatctggcagaaggacggcgtgaagaagctgaacctgtacctgatcatcaactacttcaagggcggcaagctgcggttcaagaagatcaaacctgaagccttcgaagccaacagattctacaccgtgatcaacaaaaagagcggcgagatcgtgcccatggaggtgaacttcaacttcgacgaccccaacctgatcatcctgcctctggcctttggcaagagacagggcagagaattcatctggaacgacctgctgtccctggaaaccggcagcctgaagctggccaacggaagagtgatcgagaagacactgtacaacagaagaacccggcaggatgagcctgccctgttcgtggccctgaccttcgagcggcgggaggtcctggactcctccaatatcaaaccaatgaacctgatcggcgtggcaagaggcgaaaacatccccgccgtgatcgccctgaccgaccccgagggctgcccactgagccggtttaaggatagcctgggaaacccaacccacatcctgagaatcggcgagagctataaggagaagcagcggaccatccaggccaagaaggaggtggagcagcggagagccggcggctacagccggaagtacgccagcaaagccaagaatctggcagacgatatggtgagaaacaccgctagagatctgctgtactacgccgtgacccaggatgccatgctgatcttcgccaacctgagccggggcttcggccggcagggcaagcggaccttcatggccgagagacagtacacacggatggaggactggctgaccgccaagctggcctacgagggcctgagcaagacctacctgtccaagacactggcccagtacacctccaagacatgcagcaactgtgggtttaccatcaccagcgccgactacgacagggtgctggagaagctgaagaagacagcaacaggctggatgaccacaattaacggcaaggagctgaaggtggagggccagattacctactacaacagatacaagagacagaacgtagtcaaggacctgtccgtcgagctggatagactgagcgaagaatctgtgaacaacgacatctcctcctggacaaagggcagaagcggagaagctctgagcctcctgaagaaaagattctcccatagacccgtgcaggagaagttcgtgtgcctgaactgcggcttcgagacacacgcagccgagcaagccgccctgaacatcgccagatcctggctgttcctgcggagccaggagtacaagaaataccagacaaacaagacaaccggcaacaccgataagagagccttcgtcgagacctggcagtccttttaccggaagaagcttaaggaggtgtggaaacctgccgtgcggtctggcggatctggcggaggctccacaagctggcccgagagcgtgaccttcgaggacgtggccgtgtacttcacccagaaccagtgggccagcctggaccccgcccagagggccctgtacggcgaggtgatgctggagaactacgccaacgtggccagcctggtggccttccccttccccaagcccgccctgatcagccacctggagaggggcgaggccccctggggccccgacccctgggacaccgagatccccaggggcatcagccagggcaccagccccaagaaaaagagaaaagtctaagctgccttctgcggggcttgccttctggccatgcccttcttctctcccttgcacctgtacctcttggtctttgaataaagcctgagtaggaaggctagcaaaaaaaaaaaaaaaaaaaaaaaaaaaaaaaaaaaaaaaaaaaaaaaaaaaaaaaaaaaaaaaaaaaaaaaaaaaaaaaa

SEQ ID NO: 2560 - RNA, 5419 nt, synthetic construct
  source 1..5419: mol_type = other RNA
aggaaataagagagaaaagaagagtaagaagaaatataagagccaccatggcccctaagaagaagcgtaaagtgagccgggtgaacggcagcggcagcggcggcggcatgaaccacgaccaggagttcgacccccctaaggtgtaccctcccgtccccgccgagaagagaaagcccatccgggtcctgagcctgttcgatggcatcgccaccggtctgctggtgctgaaggacctgggcatccaggtggataggtacattgcctccgaggtgtgcgaggactccatcaccgtgggaatggtgcgtcatcagggcaagatcatgtacgtgggcgacgtgcggagcgtgacacagaagcatatccaggagtggggccctttcgacctggtgatcggcggcagcccttgcaatgacctgagcatcgtgaacccagcccggaagggcctgtacgagggaaccggcagactgttcttcgagttttacagactgctgcacgacgcccggcctaaggaaggcgacgaccggcccttcttttggctgttcgagaatgtggtggccatgggagtcagcgacaagcgggatattagccggttcctggagagcaaccccgtgatgatcgatgccaaggaagtgagcgccgcccaccgggccagatacttctggggcaatctgcctggcatgaacagacccctggccagcaccgtgaacgacaagctggagctgcaggagtgcctggagcacggccggatcgccaagttcagcaaggtgagaaccatcaccacccgaagcaacagcatcaaacaaggcaaggaccagcactttcctgtgttcatgaacgagaaggaggacatcctgtggtgtaccgagatggagagagtgttcgggttcccagtccactacacagatgtcagcaacatgtctagactggccagacagagactgctgggaagaagctggtccgtccctgtgatcagacacctgttcgcccctctgaaggagtacttcgcctgcgtgagcagcggcaacagcaacgccaacagccggggccccagcttctctagcggcctggtgccactgtccctgagagggagccacatgggccccatggagatctacaaaaccgtgagcgcctggaagcggcagcctgtgcgcgtgctgagcctgtttcggaatatcgataaagtcctgaaaagcctgggattcctggagagcggctctggctccggcggtggcaccctgaagtacgtggaggatgtgacaaacgtggtcagacgggatgtggagaagtggggccccttcgatctggtgtacggcagcacccaacccctgggcagctcttgtgaccggtgccctggctggtacatgtttcagttccaccggatcctgcagtacgccctgccgagacaggagtcccagcggccattcttttggattttcatggacaacttgctgctgaccgaggatgaccaggaaactaccactcggttcctgcagaccgaagccgtgaccctgcaggacgtgagaggccgggactaccagaacgccatgcgggtgtggtccaacatccctggactgaaaagcaagcacgcacctctgacccctaaagaagaggagtacctgcaggcccaggtgcggagcagaagcaagctggacgcccctaaggtggatctgctggtgaagaattgcctcctgcccctgagagagtacttcaagtatttcagccagaatagtctgcccctgggcggcccaagcagcggcgcccctcctcccagcggcggcagcccagccggctccccaacctctaccgaggagggcacctctgagtccgccacccccgagagcggccctggcacctccaccgagcccagcgagggcagcgcacccggcagccctgccggcagccccacctccacagaggagggaaccagcaccgagcccagcgaaggcagcgccccaggcaccagcaccgagcctagtgagggcggctctggcggcggcagcgcccaggagattaaacggatcaacaagatcagaagaagacttgtgaaagacagcaacaccaagaaggccggcaagacaggccccatgaaaaccctgctggttagagtgatgacacccgatctgagagagcggctggaaaacctgagaaagaagcctgaaaatatcccccagcccatcagcaatacatctagagccaacctgaataagctgctgaccgattacaccgaaatgaagaaggcgatcctgcatgtgtactgggaagagttccagaaggaccctgtgggcctgatgagccgggtggcccagcctgccagcaagaagatcgatcagaacaagctgaaacctgagatggacgagaagggcaacctgaccaccgccggctttgcctgctctcagtgtggccagcccctgttcgtgtacaagctggagcaggtgtctgagaagggcaaggcttacaccaactacttcggacggtgcaatgtggccgagcacgaaaagctgatcctgctggcccagctgaagcccgagaaggatagcgacgaagccgtgacatatagcctgggaaagtttgggcagagggccctggatttctacagcattcatgtgaccaaggagtccacccaccccgtgaagcccctggcccagatcgccggaaacagatacgcctccggacctgtgggaaaggccctgagcgacgcatgtatgggcacaatcgcctccttcctgtctaagtaccaggacatcatcatcgaacaccagaaggtggtgaagggcaaccagaagagactggagagcctgcgggagctggccggcaaggaaaacctggaataccctagcgtgaccctgccacctcagcctcacaccaaggagggcgttgatgcctacaacgaagtgatcgcccgggtgcgaatgtgggtgaacctgaacctgtggcagaagctgaagctaagcagagatgatgccaagcctctgctgagactgaagggattcccttcctttcctctggtcgagagacaggccaacgaagtggactggtgggacatggtgtgtaacgtgaagaagctgatcaacgagaaaaaggaggatggcaaggtgttttggcagaatctggctggctacaagagacaggaagccctgagaccatacctgagcagcgaggaagatcggaagaagggaaagaaattcgctcggtaccagctgggcgacctgctgctgcacctggaaaagaagcacggcgaggactggggaaaggtgtacgacgaggcctgggagcggattgacaagaaagtggaaggcctgagcaagcacatcaagctggaagaggaacggagaagcgaggacgcccagagcaaggccgccctgaccgactggctgcgggctaaggccagcttcgtgatcgagggcctgaaggaggccgacaaggacgagttctgcagatgcgagctgaagctgcagaagtggtacggggacctgcggggaaagcccttcgccatcgaagccgagaacagcatcctggacatcagcggcttcagcaagcagtacaactgtgccttcatctggcagaaggacggcgtgaagaagctgaacctgtacctgatcatcaactacttcaagggcggcaagctgcggttcaagaagatcaaacctgaagccttcgaagccaacagattctacaccgtgatcaacaaaaagagcggcgagatcgtgcccatggaggtgaacttcaacttcgacgaccccaacctgatcatcctgcctctggcctttggcaagagacagggcagagaattcatctggaacgacctgctgtccctggaaaccggcagcctgaagctggccaacggaagagtgatcgagaagacactgtacaacagaagaacccggcaggatgagcctgccctgttcgtggccctgaccttcgagcggcgggaggtcctggactcctccaatatcaaaccaatgaacctgatcggcgtggcaagaggcgaaaacatccccgccgtgatcgccctgaccgaccccgagggctgcccactgagccggtttaaggatagcctgggaaacccaacccacatcctgagaatcggcgagagctataaggagaagcagcggaccatccaggccaagaaggaggtggagcagcggagagccggcggctacagccggaagtacgccagcaaagccaagaatctggcagacgatatggtgagaaacaccgctagagatctgctgtactacgccgtgacccaggatgccatgctgatcttcgccaacctgagccggggcttcggccggcagggcaagcggaccttcatggccgagagacagtacacacggatggaggactggctgaccgccaagctggcctacgagggcctgagcaagacctacctgtccaagacactggcccagtacacctccaagacatgcagcaactgtgggtttaccatcaccagcgccgactacgacagggtgctggagaagctgaagaagacagcaacaggctggatgaccacaattaacggcaaggagctgaaggtggagggccagattacctactacaacagatacaagagacagaacgtagtcaaggacctgtccgtcgagctggatagactgagcgaagaatctgtgaacaacgacatctcctcctggacaaagggcagaagcggagaagctctgagcctcctgaagaaaagattctcccatagacccgtgcaggagaagttcgtgtgcctgaactgcggcttcgagacacacgcagccgagcaagccgccctgaacatcgccagatcctggctgttcctgcggagccaggagtacaagaaataccagacaaacaagacaaccggcaacaccgataagagagccttcgtcgagacctggcagtccttttaccggaagaagcttaaggaggtgtggaaacctgccgtgcggtctggcggatctggcggaggctccacaagcgcccacagcatggtgatgttcagggacgtgaccgtggacttcagccaggaggagtgggagtgcctgagcagctacgagagggacctgtacagggacgtgatgctggagaactacagccacctggtgagcctgggctgcagcatcagcaagcccgacgtgatcaccctgctggagcagggcaaggagccctggatgatcgtgagggccgagaagaggaggtggagcagggacctggagagcaggaccagccccaagaaaaagagaaaagtctaagctgccttctgcggggcttgccttctggccatgcccttcttctctcccttgcacctgtacctcttggtctttgaataaagcctgagtaggaaggctagcaaaaaaaaaaaaaaaaaaaaaaaaaaaaaaaaaaaaaaaaaaaaaaaaaaaaaaaaaaaaaaaaaaaaaaaaaaaaaaaa

SEQ ID NO: 2561 - RNA, 5419 nt, synthetic construct
  source 1..5419: mol_type = other RNA
aggaaataagagagaaaagaagagtaagaagaaatataagagccaccatggcccctaagaagaagcgtaaagtgagccgggtgaacggcagcggcagcggcggcggcatgaaccacgaccaggagttcgacccccctaaggtgtaccctcccgtccccgccgagaagagaaagcccatccgggtcctgagcctgttcgatggcatcgccaccggtctgctggtgctgaaggacctgggcatccaggtggataggtacattgcctccgaggtgtgcgaggactccatcaccgtgggaatggtgcgtcatcagggcaagatcatgtacgtgggcgacgtgcggagcgtgacacagaagcatatccaggagtggggccctttcgacctggtgatcggcggcagcccttgcaatgacctgagcatcgtgaacccagcccggaagggcctgtacgagggaaccggcagactgttcttcgagttttacagactgctgcacgacgcccggcctaaggaaggcgacgaccggcccttcttttggctgttcgagaatgtggtggccatgggagtcagcgacaagcgggatattagccggttcctggagagcaaccccgtgatgatcgatgccaaggaagtgagcgccgcccaccgggccagatacttctggggcaatctgcctggcatgaacagacccctggccagcaccgtgaacgacaagctggagctgcaggagtgcctggagcacggccggatcgccaagttcagcaaggtgagaaccatcaccacccgaagcaacagcatcaaacaaggcaaggaccagcactttcctgtgttcatgaacgagaaggaggacatcctgtggtgtaccgagatggagagagtgttcgggttcccagtccactacacagatgtcagcaacatgtctagactggccagacagagactgctgggaagaagctggtccgtccctgtgatcagacacctgttcgcccctctgaaggagtacttcgcctgcgtgagcagcggcaacagcaacgccaacagccggggccccagcttctctagcggcctggtgccactgtccctgagagggagccacatgggccccatggagatctacaaaaccgtgagcgcctggaagcggcagcctgtgcgcgtgctgagcctgtttcggaatatcgataaagtcctgaaaagcctgggattcctggagagcggctctggctccggcggtggcaccctgaagtacgtggaggatgtgacaaacgtggtcagacgggatgtggagaagtggggccccttcgatctggtgtacggcagcacccaacccctgggcagctcttgtgaccggtgccctggctggtacatgtttcagttccaccggatcctgcagtacgccctgccgagacaggagtcccagcggccattcttttggattttcatggacaacttgctgctgaccgaggatgaccaggaaactaccactcggttcctgcagaccgaagccgtgaccctgcaggacgtgagaggccgggactaccagaacgccatgcgggtgtggtccaacatccctggactgaaaagcaagcacgcacctctgacccctaaagaagaggagtacctgcaggcccaggtgcggagcagaagcaagctggacgcccctaaggtggatctgctggtgaagaattgcctcctgcccctgagagagtacttcaagtatttcagccagaatagtctgcccctgggcggcccaagcagcggcgcccctcctcccagcggcggcagcccagccggctccccaacctctaccgaggagggcacctctgagtccgccacccccgagagcggccctggcacctccaccgagcccagcgagggcagcgcacccggcagccctgccggcagccccacctccacagaggagggaaccagcaccgagcccagcgaaggcagcgccccaggcaccagcaccgagcctagtgagggcggctctggcggcggcagcgcccaggagattaaacggatcaacaagatcagaagaagacttgtgaaagacagcaacaccaagaaggccggcaagacaggccccatgaaaaccctgctggttagagtgatgacacccgatctgagagagcggctggaaaacctgagaaagaagcctgaaaatatcccccagcccatcagcaatacatctagagccaacctgaataagctgctgaccgattacaccgaaatgaagaaggcgatcctgcatgtgtactgggaagagttccagaaggaccctgtgggcctgatgagccgggtggcccagcctgccagcaagaagatcgatcagaacaagctgaaacctgagatggacgagaagggcaacctgaccaccgccggctttgcctgctctcagtgtggccagcccctgttcgtgtacaagctggagcaggtgtctgagaagggcaaggcttacaccaactacttcggacggtgcaatgtggccgagcacgaaaagctgatcctgctggcccagctgaagcccgagaaggatagcgacgaagccgtgacatatagcctgggaaagtttgggcagagggccctggatttctacagcattcatgtgaccaaggagtccacccaccccgtgaagcccctggcccagatcgccggaaacagatacgcctccggacctgtgggaaaggccctgagcgacgcatgtatgggcacaatcgcctccttcctgtctaagtaccaggacatcatcatcgaacaccagaaggtggtgaagggcaaccagaagagactggagagcctgcgggagctggccggcaaggaaaacctggaataccctagcgtgaccctgccacctcagcctcacaccaaggagggcgttgatgcctacaacgaagtgatcgcccgggtgcgaatgtgggtgaacctgaacctgtggcagaagctgaagctaagcagagatgatgccaagcctctgctgagactgaagggattcccttcctttcctctggtcgagagacaggccaacgaagtggactggtgggacatggtgtgtaacgtgaagaagctgatcaacgagaaaaaggaggatggcaaggtgttttggcagaatctggctggctacaagagacaggaagccctgagaccatacctgagcagcgaggaagatcggaagaagggaaagaaattcgctcggtaccagctgggcgacctgctgctgcacctggaaaagaagcacggcgaggactggggaaaggtgtacgacgaggcctgggagcggattgacaagaaagtggaaggcctgagcaagcacatcaagctggaagaggaacggagaagcgaggacgcccagagcaaggccgccctgaccgactggctgcgggctaaggccagcttcgtgatcgagggcctgaaggaggccgacaaggacgagttctgcagatgcgagctgaagctgcagaagtggtacggggacctgcggggaaagcccttcgccatcgaagccgagaacagcatcctggacatcagcggcttcagcaagcagtacaactgtgccttcatctggcagaaggacggcgtgaagaagctgaacctgtacctgatcatcaactacttcaagggcggcaagctgcggttcaagaagatcaaacctgaagccttcgaagccaacagattctacaccgtgatcaacaaaaagagcggcgagatcgtgcccatggaggtgaacttcaacttcgacgaccccaacctgatcatcctgcctctggcctttggcaagagacagggcagagaattcatctggaacgacctgctgtccctggaaaccggcagcctgaagctggccaacggaagagtgatcgagaagacactgtacaacagaagaacccggcaggatgagcctgccctgttcgtggccctgaccttcgagcggcgggaggtcctggactcctccaatatcaaaccaatgaacctgatcggcgtggcaagaggcgaaaacatccccgccgtgatcgccctgaccgaccccgagggctgcccactgagccggtttaaggatagcctgggaaacccaacccacatcctgagaatcggcgagagctataaggagaagcagcggaccatccaggccaagaaggaggtggagcagcggagagccggcggctacagccggaagtacgccagcaaagccaagaatctggcagacgatatggtgagaaacaccgctagagatctgctgtactacgccgtgacccaggatgccatgctgatcttcgccaacctgagccggggcttcggccggcagggcaagcggaccttcatggccgagagacagtacacacggatggaggactggctgaccgccaagctggcctacgagggcctgagcaagacctacctgtccaagacactggcccagtacacctccaagacatgcagcaactgtgggtttaccatcaccagcgccgactacgacagggtgctggagaagctgaagaagacagcaacaggctggatgaccacaattaacggcaaggagctgaaggtggagggccagattacctactacaacagatacaagagacagaacgtagtcaaggacctgtccgtcgagctggatagactgagcgaagaatctgtgaacaacgacatctcctcctggacaaagggcagaagcggagaagctctgagcctcctgaagaaaagattctcccatagacccgtgcaggagaagttcgtgtgcctgaactgcggcttcgagacacacgcagccgagcaagccgccctgaacatcgccagatcctggctgttcctgcggagccaggagtacaagaaataccagacaaacaagacaaccggcaacaccgataagagagccttcgtcgagacctggcagtccttttaccggaagaagcttaaggaggtgtggaaacctgccgtgcggtctggcggatctggcggaggctccacaagcagcaaggcccccgtgaccttcggcgacctggccatctacttcagccaggaggagtgggagtggctgagccccaaccagaaggacctgtacgaggacgtgatgctggagaactaccacaacctggtgagcgtgggcctggcctgcaggaggcccaacatcatcgccctgctggagaagggcaaggccccctggatggtggagcccagcaggaagaggaggggccccgagctgggcagcaaggacaccagccccaagaaaaagagaaaagtctaagctgccttctgcggggcttgccttctggccatgcccttcttctctcccttgcacctgtacctcttggtctttgaataaagcctgagtaggaaggctagcaaaaaaaaaaaaaaaaaaaaaaaaaaaaaaaaaaaaaaaaaaaaaaaaaaaaaaaaaaaaaaaaaaaaaaaaaaaaaaaa

SEQ ID NO: 2562 - RNA, 5419 nt, synthetic construct
  source 1..5419: mol_type = other RNA
aggaaataagagagaaaagaagagtaagaagaaatataagagccaccatggcccctaagaagaagcgtaaagtgagccgggtgaacggcagcggcagcggcggcggcatgaaccacgaccaggagttcgacccccctaaggtgtaccctcccgtccccgccgagaagagaaagcccatccgggtcctgagcctgttcgatggcatcgccaccggtctgctggtgctgaaggacctgggcatccaggtggataggtacattgcctccgaggtgtgcgaggactccatcaccgtgggaatggtgcgtcatcagggcaagatcatgtacgtgggcgacgtgcggagcgtgacacagaagcatatccaggagtggggccctttcgacctggtgatcggcggcagcccttgcaatgacctgagcatcgtgaacccagcccggaagggcctgtacgagggaaccggcagactgttcttcgagttttacagactgctgcacgacgcccggcctaaggaaggcgacgaccggcccttcttttggctgttcgagaatgtggtggccatgggagtcagcgacaagcgggatattagccggttcctggagagcaaccccgtgatgatcgatgccaaggaagtgagcgccgcccaccgggccagatacttctggggcaatctgcctggcatgaacagacccctggccagcaccgtgaacgacaagctggagctgcaggagtgcctggagcacggccggatcgccaagttcagcaaggtgagaaccatcaccacccgaagcaacagcatcaaacaaggcaaggaccagcactttcctgtgttcatgaacgagaaggaggacatcctgtggtgtaccgagatggagagagtgttcgggttcccagtccactacacagatgtcagcaacatgtctagactggccagacagagactgctgggaagaagctggtccgtccctgtgatcagacacctgttcgcccctctgaaggagtacttcgcctgcgtgagcagcggcaacagcaacgccaacagccggggccccagcttctctagcggcctggtgccactgtccctgagagggagccacatgggccccatggagatctacaaaaccgtgagcgcctggaagcggcagcctgtgcgcgtgctgagcctgtttcggaatatcgataaagtcctgaaaagcctgggattcctggagagcggctctggctccggcggtggcaccctgaagtacgtggaggatgtgacaaacgtggtcagacgggatgtggagaagtggggccccttcgatctggtgtacggcagcacccaacccctgggcagctcttgtgaccggtgccctggctggtacatgtttcagttccaccggatcctgcagtacgccctgccgagacaggagtcccagcggccattcttttggattttcatggacaacttgctgctgaccgaggatgaccaggaaactaccactcggttcctgcagaccgaagccgtgaccctgcaggacgtgagaggccgggactaccagaacgccatgcgggtgtggtccaacatccctggactgaaaagcaagcacgcacctctgacccctaaagaagaggagtacctgcaggcccaggtgcggagcagaagcaagctggacgcccctaaggtggatctgctggtgaagaattgcctcctgcccctgagagagtacttcaagtatttcagccagaatagtctgcccctgggcggcccaagcagcggcgcccctcctcccagcggcggcagcccagccggctccccaacctctaccgaggagggcacctctgagtccgccacccccgagagcggccctggcacctccaccgagcccagcgagggcagcgcacccggcagccctgccggcagccccacctccacagaggagggaaccagcaccgagcccagcgaaggcagcgccccaggcaccagcaccgagcctagtgagggcggctctggcggcggcagcgcccaggagattaaacggatcaacaagatcagaagaagacttgtgaaagacagcaacaccaagaaggccggcaagacaggccccatgaaaaccctgctggttagagtgatgacacccgatctgagagagcggctggaaaacctgagaaagaagcctgaaaatatcccccagcccatcagcaatacatctagagccaacctgaataagctgctgaccgattacaccgaaatgaagaaggcgatcctgcatgtgtactgggaagagttccagaaggaccctgtgggcctgatgagccgggtggcccagcctgccagcaagaagatcgatcagaacaagctgaaacctgagatggacgagaagggcaacctgaccaccgccggctttgcctgctctcagtgtggccagcccctgttcgtgtacaagctggagcaggtgtctgagaagggcaaggcttacaccaactacttcggacggtgcaatgtggccgagcacgaaaagctgatcctgctggcccagctgaagcccgagaaggatagcgacgaagccgtgacatatagcctgggaaagtttgggcagagggccctggatttctacagcattcatgtgaccaaggagtccacccaccccgtgaagcccctggcccagatcgccggaaacagatacgcctccggacctgtgggaaaggccctgagcgacgcatgtatgggcacaatcgcctccttcctgtctaagtaccaggacatcatcatcgaacaccagaaggtggtgaagggcaaccagaagagactggagagcctgcgggagctggccggcaaggaaaacctggaataccctagcgtgaccctgccacctcagcctcacaccaaggagggcgttgatgcctacaacgaagtgatcgcccgggtgcgaatgtgggtgaacctgaacctgtggcagaagctgaagctaagcagagatgatgccaagcctctgctgagactgaagggattcccttcctttcctctggtcgagagacaggccaacgaagtggactggtgggacatggtgtgtaacgtgaagaagctgatcaacgagaaaaaggaggatggcaaggtgttttggcagaatctggctggctacaagagacaggaagccctgagaccatacctgagcagcgaggaagatcggaagaagggaaagaaattcgctcggtaccagctgggcgacctgctgctgcacctggaaaagaagcacggcgaggactggggaaaggtgtacgacgaggcctgggagcggattgacaagaaagtggaaggcctgagcaagcacatcaagctggaagaggaacggagaagcgaggacgcccagagcaaggccgccctgaccgactggctgcgggctaaggccagcttcgtgatcgagggcctgaaggaggccgacaaggacgagttctgcagatgcgagctgaagctgcagaagtggtacggggacctgcggggaaagcccttcgccatcgaagccgagaacagcatcctggacatcagcggcttcagcaagcagtacaactgtgccttcatctggcagaaggacggcgtgaagaagctgaacctgtacctgatcatcaactacttcaagggcggcaagctgcggttcaagaagatcaaacctgaagccttcgaagccaacagattctacaccgtgatcaacaaaaagagcggcgagatcgtgcccatggaggtgaacttcaacttcgacgaccccaacctgatcatcctgcctctggcctttggcaagagacagggcagagaattcatctggaacgacctgctgtccctggaaaccggcagcctgaagctggccaacggaagagtgatcgagaagacactgtacaacagaagaacccggcaggatgagcctgccctgttcgtggccctgaccttcgagcggcgggaggtcctggactcctccaatatcaaaccaatgaacctgatcggcgtggcaagaggcgaaaacatccccgccgtgatcgccctgaccgaccccgagggctgcccactgagccggtttaaggatagcctgggaaacccaacccacatcctgagaatcggcgagagctataaggagaagcagcggaccatccaggccaagaaggaggtggagcagcggagagccggcggctacagccggaagtacgccagcaaagccaagaatctggcagacgatatggtgagaaacaccgctagagatctgctgtactacgccgtgacccaggatgccatgctgatcttcgccaacctgagccggggcttcggccggcagggcaagcggaccttcatggccgagagacagtacacacggatggaggactggctgaccgccaagctggcctacgagggcctgagcaagacctacctgtccaagacactggcccagtacacctccaagacatgcagcaactgtgggtttaccatcaccagcgccgactacgacagggtgctggagaagctgaagaagacagcaacaggctggatgaccacaattaacggcaaggagctgaaggtggagggccagattacctactacaacagatacaagagacagaacgtagtcaaggacctgtccgtcgagctggatagactgagcgaagaatctgtgaacaacgacatctcctcctggacaaagggcagaagcggagaagctctgagcctcctgaagaaaagattctcccatagacccgtgcaggagaagttcgtgtgcctgaactgcggcttcgagacacacgcagccgagcaagccgccctgaacatcgccagatcctggctgttcctgcggagccaggagtacaagaaataccagacaaacaagacaaccggcaacaccgataagagagccttcgtcgagacctggcagtccttttaccggaagaagcttaaggaggtgtggaaacctgccgtgcggtctggcggatctggcggaggctccacaagcatggtgagcttcgaggacgtggccgtgctgctgagccaggaggagtgggactgcctgatccccgcccagaggggcctgtacagggacgtgatgctggagacctacggcaacctggtgagcctgggcctgcaggccagcaagcccgacgtgatcagcaggctggagcagggcgacgagccctggaccccccacatcctgaggacccagaggagctggagctggaggcacaagagggagtgctacaccagccccaagaaaaagagaaaagtctaagctgccttctgcggggcttgccttctggccatgcccttcttctctcccttgcacctgtacctcttggtctttgaataaagcctgagtaggaaggctagcaaaaaaaaaaaaaaaaaaaaaaaaaaaaaaaaaaaaaaaaaaaaaaaaaaaaaaaaaaaaaaaaaaaaaaaaaaaaaaaa

SEQ ID NO: 2563 - RNA, 5419 nt, synthetic construct
  source 1..5419: mol_type = other RNA
aggaaataagagagaaaagaagagtaagaagaaatataagagccaccatggcccctaagaagaagcgtaaagtgagccgggtgaacggcagcggcagcggcggcggcatgaaccacgaccaggagttcgacccccctaaggtgtaccctcccgtccccgccgagaagagaaagcccatccgggtcctgagcctgttcgatggcatcgccaccggtctgctggtgctgaaggacctgggcatccaggtggataggtacattgcctccgaggtgtgcgaggactccatcaccgtgggaatggtgcgtcatcagggcaagatcatgtacgtgggcgacgtgcggagcgtgacacagaagcatatccaggagtggggccctttcgacctggtgatcggcggcagcccttgcaatgacctgagcatcgtgaacccagcccggaagggcctgtacgagggaaccggcagactgttcttcgagttttacagactgctgcacgacgcccggcctaaggaaggcgacgaccggcccttcttttggctgttcgagaatgtggtggccatgggagtcagcgacaagcgggatattagccggttcctggagagcaaccccgtgatgatcgatgccaaggaagtgagcgccgcccaccgggccagatacttctggggcaatctgcctggcatgaacagacccctggccagcaccgtgaacgacaagctggagctgcaggagtgcctggagcacggccggatcgccaagttcagcaaggtgagaaccatcaccacccgaagcaacagcatcaaacaaggcaaggaccagcactttcctgtgttcatgaacgagaaggaggacatcctgtggtgtaccgagatggagagagtgttcgggttcccagtccactacacagatgtcagcaacatgtctagactggccagacagagactgctgggaagaagctggtccgtccctgtgatcagacacctgttcgcccctctgaaggagtacttcgcctgcgtgagcagcggcaacagcaacgccaacagccggggccccagcttctctagcggcctggtgccactgtccctgagagggagccacatgggccccatggagatctacaaaaccgtgagcgcctggaagcggcagcctgtgcgcgtgctgagcctgtttcggaatatcgataaagtcctgaaaagcctgggattcctggagagcggctctggctccggcggtggcaccctgaagtacgtggaggatgtgacaaacgtggtcagacgggatgtggagaagtggggccccttcgatctggtgtacggcagcacccaacccctgggcagctcttgtgaccggtgccctggctggtacatgtttcagttccaccggatcctgcagtacgccctgccgagacaggagtcccagcggccattcttttggattttcatggacaacttgctgctgaccgaggatgaccaggaaactaccactcggttcctgcagaccgaagccgtgaccctgcaggacgtgagaggccgggactaccagaacgccatgcgggtgtggtccaacatccctggactgaaaagcaagcacgcacctctgacccctaaagaagaggagtacctgcaggcccaggtgcggagcagaagcaagctggacgcccctaaggtggatctgctggtgaagaattgcctcctgcccctgagagagtacttcaagtatttcagccagaatagtctgcccctgggcggcccaagcagcggcgcccctcctcccagcggcggcagcccagccggctccccaacctctaccgaggagggcacctctgagtccgccacccccgagagcggccctggcacctccaccgagcccagcgagggcagcgcacccggcagccctgccggcagccccacctccacagaggagggaaccagcaccgagcccagcgaaggcagcgccccaggcaccagcaccgagcctagtgagggcggctctggcggcggcagcgcccaggagattaaacggatcaacaagatcagaagaagacttgtgaaagacagcaacaccaagaaggccggcaagacaggccccatgaaaaccctgctggttagagtgatgacacccgatctgagagagcggctggaaaacctgagaaagaagcctgaaaatatcccccagcccatcagcaatacatctagagccaacctgaataagctgctgaccgattacaccgaaatgaagaaggcgatcctgcatgtgtactgggaagagttccagaaggaccctgtgggcctgatgagccgggtggcccagcctgccagcaagaagatcgatcagaacaagctgaaacctgagatggacgagaagggcaacctgaccaccgccggctttgcctgctctcagtgtggccagcccctgttcgtgtacaagctggagcaggtgtctgagaagggcaaggcttacaccaactacttcggacggtgcaatgtggccgagcacgaaaagctgatcctgctggcccagctgaagcccgagaaggatagcgacgaagccgtgacatatagcctgggaaagtttgggcagagggccctggatttctacagcattcatgtgaccaaggagtccacccaccccgtgaagcccctggcccagatcgccggaaacagatacgcctccggacctgtgggaaaggccctgagcgacgcatgtatgggcacaatcgcctccttcctgtctaagtaccaggacatcatcatcgaacaccagaaggtggtgaagggcaaccagaagagactggagagcctgcgggagctggccggcaaggaaaacctggaataccctagcgtgaccctgccacctcagcctcacaccaaggagggcgttgatgcctacaacgaagtgatcgcccgggtgcgaatgtgggtgaacctgaacctgtggcagaagctgaagctaagcagagatgatgccaagcctctgctgagactgaagggattcccttcctttcctctggtcgagagacaggccaacgaagtggactggtgggacatggtgtgtaacgtgaagaagctgatcaacgagaaaaaggaggatggcaaggtgttttggcagaatctggctggctacaagagacaggaagccctgagaccatacctgagcagcgaggaagatcggaagaagggaaagaaattcgctcggtaccagctgggcgacctgctgctgcacctggaaaagaagcacggcgaggactggggaaaggtgtacgacgaggcctgggagcggattgacaagaaagtggaaggcctgagcaagcacatcaagctggaagaggaacggagaagcgaggacgcccagagcaaggccgccctgaccgactggctgcgggctaaggccagcttcgtgatcgagggcctgaaggaggccgacaaggacgagttctgcagatgcgagctgaagctgcagaagtggtacggggacctgcggggaaagcccttcgccatcgaagccgagaacagcatcctggacatcagcggcttcagcaagcagtacaactgtgccttcatctggcagaaggacggcgtgaagaagctgaacctgtacctgatcatcaactacttcaagggcggcaagctgcggttcaagaagatcaaacctgaagccttcgaagccaacagattctacaccgtgatcaacaaaaagagcggcgagatcgtgcccatggaggtgaacttcaacttcgacgaccccaacctgatcatcctgcctctggcctttggcaagagacagggcagagaattcatctggaacgacctgctgtccctggaaaccggcagcctgaagctggccaacggaagagtgatcgagaagacactgtacaacagaagaacccggcaggatgagcctgccctgttcgtggccctgaccttcgagcggcgggaggtcctggactcctccaatatcaaaccaatgaacctgatcggcgtggcaagaggcgaaaacatccccgccgtgatcgccctgaccgaccccgagggctgcccactgagccggtttaaggatagcctgggaaacccaacccacatcctgagaatcggcgagagctataaggagaagcagcggaccatccaggccaagaaggaggtggagcagcggagagccggcggctacagccggaagtacgccagcaaagccaagaatctggcagacgatatggtgagaaacaccgctagagatctgctgtactacgccgtgacccaggatgccatgctgatcttcgccaacctgagccggggcttcggccggcagggcaagcggaccttcatggccgagagacagtacacacggatggaggactggctgaccgccaagctggcctacgagggcctgagcaagacctacctgtccaagacactggcccagtacacctccaagacatgcagcaactgtgggtttaccatcaccagcgccgactacgacagggtgctggagaagctgaagaagacagcaacaggctggatgaccacaattaacggcaaggagctgaaggtggagggccagattacctactacaacagatacaagagacagaacgtagtcaaggacctgtccgtcgagctggatagactgagcgaagaatctgtgaacaacgacatctcctcctggacaaagggcagaagcggagaagctctgagcctcctgaagaaaagattctcccatagacccgtgcaggagaagttcgtgtgcctgaactgcggcttcgagacacacgcagccgagcaagccgccctgaacatcgccagatcctggctgttcctgcggagccaggagtacaagaaataccagacaaacaagacaaccggcaacaccgataagagagccttcgtcgagacctggcagtccttttaccggaagaagcttaaggaggtgtggaaacctgccgtgcggtctggcggatctggcggaggctccacaagcccccagaagagcgtgaccttcgaggacgtggccgtgtacttcacccagaccgagtgggacggcctgagccccgcccagagggccctgtacagggacgtgatgctggagaactacggcaacgtggccagcctgggcttcagcctgctgaagcccgccgtgatcagccagctggagggcgccggcgagctggagggccccagccccctggccgccggcaccgagatcggcccccagggcctgtggaccagccccaagaaaaagagaaaagtctaagctgccttctgcggggcttgccttctggccatgcccttcttctctcccttgcacctgtacctcttggtctttgaataaagcctgagtaggaaggctagcaaaaaaaaaaaaaaaaaaaaaaaaaaaaaaaaaaaaaaaaaaaaaaaaaaaaaaaaaaaaaaaaaaaaaaaaaaaaaaaa

SEQ ID NO: 2564 - RNA, 5419 nt, synthetic construct
  source 1..5419: mol_type = other RNA
aggaaataagagagaaaagaagagtaagaagaaatataagagccaccatggcccctaagaagaagcgtaaagtgagccgggtgaacggcagcggcagcggcggcggcatgaaccacgaccaggagttcgacccccctaaggtgtaccctcccgtccccgccgagaagagaaagcccatccgggtcctgagcctgttcgatggcatcgccaccggtctgctggtgctgaaggacctgggcatccaggtggataggtacattgcctccgaggtgtgcgaggactccatcaccgtgggaatggtgcgtcatcagggcaagatcatgtacgtgggcgacgtgcggagcgtgacacagaagcatatccaggagtggggccctttcgacctggtgatcggcggcagcccttgcaatgacctgagcatcgtgaacccagcccggaagggcctgtacgagggaaccggcagactgttcttcgagttttacagactgctgcacgacgcccggcctaaggaaggcgacgaccggcccttcttttggctgttcgagaatgtggtggccatgggagtcagcgacaagcgggatattagccggttcctggagagcaaccccgtgatgatcgatgccaaggaagtgagcgccgcccaccgggccagatacttctggggcaatctgcctggcatgaacagacccctggccagcaccgtgaacgacaagctggagctgcaggagtgcctggagcacggccggatcgccaagttcagcaaggtgagaaccatcaccacccgaagcaacagcatcaaacaaggcaaggaccagcactttcctgtgttcatgaacgagaaggaggacatcctgtggtgtaccgagatggagagagtgttcgggttcccagtccactacacagatgtcagcaacatgtctagactggccagacagagactgctgggaagaagctggtccgtccctgtgatcagacacctgttcgcccctctgaaggagtacttcgcctgcgtgagcagcggcaacagcaacgccaacagccggggccccagcttctctagcggcctggtgccactgtccctgagagggagccacatgggccccatggagatctacaaaaccgtgagcgcctggaagcggcagcctgtgcgcgtgctgagcctgtttcggaatatcgataaagtcctgaaaagcctgggattcctggagagcggctctggctccggcggtggcaccctgaagtacgtggaggatgtgacaaacgtggtcagacgggatgtggagaagtggggccccttcgatctggtgtacggcagcacccaacccctgggcagctcttgtgaccggtgccctggctggtacatgtttcagttccaccggatcctgcagtacgccctgccgagacaggagtcccagcggccattcttttggattttcatggacaacttgctgctgaccgaggatgaccaggaaactaccactcggttcctgcagaccgaagccgtgaccctgcaggacgtgagaggccgggactaccagaacgccatgcgggtgtggtccaacatccctggactgaaaagcaagcacgcacctctgacccctaaagaagaggagtacctgcaggcccaggtgcggagcagaagcaagctggacgcccctaaggtggatctgctggtgaagaattgcctcctgcccctgagagagtacttcaagtatttcagccagaatagtctgcccctgggcggcccaagcagcggcgcccctcctcccagcggcggcagcccagccggctccccaacctctaccgaggagggcacctctgagtccgccacccccgagagcggccctggcacctccaccgagcccagcgagggcagcgcacccggcagccctgccggcagccccacctccacagaggagggaaccagcaccgagcccagcgaaggcagcgccccaggcaccagcaccgagcctagtgagggcggctctggcggcggcagcgcccaggagattaaacggatcaacaagatcagaagaagacttgtgaaagacagcaacaccaagaaggccggcaagacaggccccatgaaaaccctgctggttagagtgatgacacccgatctgagagagcggctggaaaacctgagaaagaagcctgaaaatatcccccagcccatcagcaatacatctagagccaacctgaataagctgctgaccgattacaccgaaatgaagaaggcgatcctgcatgtgtactgggaagagttccagaaggaccctgtgggcctgatgagccgggtggcccagcctgccagcaagaagatcgatcagaacaagctgaaacctgagatggacgagaagggcaacctgaccaccgccggctttgcctgctctcagtgtggccagcccctgttcgtgtacaagctggagcaggtgtctgagaagggcaaggcttacaccaactacttcggacggtgcaatgtggccgagcacgaaaagctgatcctgctggcccagctgaagcccgagaaggatagcgacgaagccgtgacatatagcctgggaaagtttgggcagagggccctggatttctacagcattcatgtgaccaaggagtccacccaccccgtgaagcccctggcccagatcgccggaaacagatacgcctccggacctgtgggaaaggccctgagcgacgcatgtatgggcacaatcgcctccttcctgtctaagtaccaggacatcatcatcgaacaccagaaggtggtgaagggcaaccagaagagactggagagcctgcgggagctggccggcaaggaaaacctggaataccctagcgtgaccctgccacctcagcctcacaccaaggagggcgttgatgcctacaacgaagtgatcgcccgggtgcgaatgtgggtgaacctgaacctgtggcagaagctgaagctaagcagagatgatgccaagcctctgctgagactgaagggattcccttcctttcctctggtcgagagacaggccaacgaagtggactggtgggacatggtgtgtaacgtgaagaagctgatcaacgagaaaaaggaggatggcaaggtgttttggcagaatctggctggctacaagagacaggaagccctgagaccatacctgagcagcgaggaagatcggaagaagggaaagaaattcgctcggtaccagctgggcgacctgctgctgcacctggaaaagaagcacggcgaggactggggaaaggtgtacgacgaggcctgggagcggattgacaagaaagtggaaggcctgagcaagcacatcaagctggaagaggaacggagaagcgaggacgcccagagcaaggccgccctgaccgactggctgcgggctaaggccagcttcgtgatcgagggcctgaaggaggccgacaaggacgagttctgcagatgcgagctgaagctgcagaagtggtacggggacctgcggggaaagcccttcgccatcgaagccgagaacagcatcctggacatcagcggcttcagcaagcagtacaactgtgccttcatctggcagaaggacggcgtgaagaagctgaacctgtacctgatcatcaactacttcaagggcggcaagctgcggttcaagaagatcaaacctgaagccttcgaagccaacagattctacaccgtgatcaacaaaaagagcggcgagatcgtgcccatggaggtgaacttcaacttcgacgaccccaacctgatcatcctgcctctggcctttggcaagagacagggcagagaattcatctggaacgacctgctgtccctggaaaccggcagcctgaagctggccaacggaagagtgatcgagaagacactgtacaacagaagaacccggcaggatgagcctgccctgttcgtggccctgaccttcgagcggcgggaggtcctggactcctccaatatcaaaccaatgaacctgatcggcgtggcaagaggcgaaaacatccccgccgtgatcgccctgaccgaccccgagggctgcccactgagccggtttaaggatagcctgggaaacccaacccacatcctgagaatcggcgagagctataaggagaagcagcggaccatccaggccaagaaggaggtggagcagcggagagccggcggctacagccggaagtacgccagcaaagccaagaatctggcagacgatatggtgagaaacaccgctagagatctgctgtactacgccgtgacccaggatgccatgctgatcttcgccaacctgagccggggcttcggccggcagggcaagcggaccttcatggccgagagacagtacacacggatggaggactggctgaccgccaagctggcctacgagggcctgagcaagacctacctgtccaagacactggcccagtacacctccaagacatgcagcaactgtgggtttaccatcaccagcgccgactacgacagggtgctggagaagctgaagaagacagcaacaggctggatgaccacaattaacggcaaggagctgaaggtggagggccagattacctactacaacagatacaagagacagaacgtagtcaaggacctgtccgtcgagctggatagactgagcgaagaatctgtgaacaacgacatctcctcctggacaaagggcagaagcggagaagctctgagcctcctgaagaaaagattctcccatagacccgtgcaggagaagttcgtgtgcctgaactgcggcttcgagacacacgcagccgagcaagccgccctgaacatcgccagatcctggctgttcctgcggagccaggagtacaagaaataccagacaaacaagacaaccggcaacaccgataagagagccttcgtcgagacctggcagtccttttaccggaagaagcttaaggaggtgtggaaacctgccgtgcggtctggcggatctggcggaggctccacaagcggcctgctgagcttcgaggacgtggccctgtacttcaccagggaggagtgggacaccctggactgggcccagaaggccctgtacagggacgtgatgctggacaactacaggcacatcgtgagcctgggcttccccttccccaagcccgaggtgatctgccagctggagcagtgggaggagccctggaccctggacctgcccagggccggcaccaggaaggccagcggcagcgcctgccccgacaccagccccaagaaaaagagaaaagtctaagctgccttctgcggggcttgccttctggccatgcccttcttctctcccttgcacctgtacctcttggtctttgaataaagcctgagtaggaaggctagcaaaaaaaaaaaaaaaaaaaaaaaaaaaaaaaaaaaaaaaaaaaaaaaaaaaaaaaaaaaaaaaaaaaaaaaaaaaaaaaa

SEQ ID NO: 2565 - RNA, 5419 nt, synthetic construct
  source 1..5419: mol_type = other RNA
aggaaataagagagaaaagaagagtaagaagaaatataagagccaccatggcccctaagaagaagcgtaaagtgagccgggtgaacggcagcggcagcggcggcggcatgaaccacgaccaggagttcgacccccctaaggtgtaccctcccgtccccgccgagaagagaaagcccatccgggtcctgagcctgttcgatggcatcgccaccggtctgctggtgctgaaggacctgggcatccaggtggataggtacattgcctccgaggtgtgcgaggactccatcaccgtgggaatggtgcgtcatcagggcaagatcatgtacgtgggcgacgtgcggagcgtgacacagaagcatatccaggagtggggccctttcgacctggtgatcggcggcagcccttgcaatgacctgagcatcgtgaacccagcccggaagggcctgtacgagggaaccggcagactgttcttcgagttttacagactgctgcacgacgcccggcctaaggaaggcgacgaccggcccttcttttggctgttcgagaatgtggtggccatgggagtcagcgacaagcgggatattagccggttcctggagagcaaccccgtgatgatcgatgccaaggaagtgagcgccgcccaccgggccagatacttctggggcaatctgcctggcatgaacagacccctggccagcaccgtgaacgacaagctggagctgcaggagtgcctggagcacggccggatcgccaagttcagcaaggtgagaaccatcaccacccgaagcaacagcatcaaacaaggcaaggaccagcactttcctgtgttcatgaacgagaaggaggacatcctgtggtgtaccgagatggagagagtgttcgggttcccagtccactacacagatgtcagcaacatgtctagactggccagacagagactgctgggaagaagctggtccgtccctgtgatcagacacctgttcgcccctctgaaggagtacttcgcctgcgtgagcagcggcaacagcaacgccaacagccggggccccagcttctctagcggcctggtgccactgtccctgagagggagccacatgggccccatggagatctacaaaaccgtgagcgcctggaagcggcagcctgtgcgcgtgctgagcctgtttcggaatatcgataaagtcctgaaaagcctgggattcctggagagcggctctggctccggcggtggcaccctgaagtacgtggaggatgtgacaaacgtggtcagacgggatgtggagaagtggggccccttcgatctggtgtacggcagcacccaacccctgggcagctcttgtgaccggtgccctggctggtacatgtttcagttccaccggatcctgcagtacgccctgccgagacaggagtcccagcggccattcttttggattttcatggacaacttgctgctgaccgaggatgaccaggaaactaccactcggttcctgcagaccgaagccgtgaccctgcaggacgtgagaggccgggactaccagaacgccatgcgggtgtggtccaacatccctggactgaaaagcaagcacgcacctctgacccctaaagaagaggagtacctgcaggcccaggtgcggagcagaagcaagctggacgcccctaaggtggatctgctggtgaagaattgcctcctgcccctgagagagtacttcaagtatttcagccagaatagtctgcccctgggcggcccaagcagcggcgcccctcctcccagcggcggcagcccagccggctccccaacctctaccgaggagggcacctctgagtccgccacccccgagagcggccctggcacctccaccgagcccagcgagggcagcgcacccggcagccctgccggcagccccacctccacagaggagggaaccagcaccgagcccagcgaaggcagcgccccaggcaccagcaccgagcctagtgagggcggctctggcggcggcagcgcccaggagattaaacggatcaacaagatcagaagaagacttgtgaaagacagcaacaccaagaaggccggcaagacaggccccatgaaaaccctgctggttagagtgatgacacccgatctgagagagcggctggaaaacctgagaaagaagcctgaaaatatcccccagcccatcagcaatacatctagagccaacctgaataagctgctgaccgattacaccgaaatgaagaaggcgatcctgcatgtgtactgggaagagttccagaaggaccctgtgggcctgatgagccgggtggcccagcctgccagcaagaagatcgatcagaacaagctgaaacctgagatggacgagaagggcaacctgaccaccgccggctttgcctgctctcagtgtggccagcccctgttcgtgtacaagctggagcaggtgtctgagaagggcaaggcttacaccaactacttcggacggtgcaatgtggccgagcacgaaaagctgatcctgctggcccagctgaagcccgagaaggatagcgacgaagccgtgacatatagcctgggaaagtttgggcagagggccctggatttctacagcattcatgtgaccaaggagtccacccaccccgtgaagcccctggcccagatcgccggaaacagatacgcctccggacctgtgggaaaggccctgagcgacgcatgtatgggcacaatcgcctccttcctgtctaagtaccaggacatcatcatcgaacaccagaaggtggtgaagggcaaccagaagagactggagagcctgcgggagctggccggcaaggaaaacctggaataccctagcgtgaccctgccacctcagcctcacaccaaggagggcgttgatgcctacaacgaagtgatcgcccgggtgcgaatgtgggtgaacctgaacctgtggcagaagctgaagctaagcagagatgatgccaagcctctgctgagactgaagggattcccttcctttcctctggtcgagagacaggccaacgaagtggactggtgggacatggtgtgtaacgtgaagaagctgatcaacgagaaaaaggaggatggcaaggtgttttggcagaatctggctggctacaagagacaggaagccctgagaccatacctgagcagcgaggaagatcggaagaagggaaagaaattcgctcggtaccagctgggcgacctgctgctgcacctggaaaagaagcacggcgaggactggggaaaggtgtacgacgaggcctgggagcggattgacaagaaagtggaaggcctgagcaagcacatcaagctggaagaggaacggagaagcgaggacgcccagagcaaggccgccctgaccgactggctgcgggctaaggccagcttcgtgatcgagggcctgaaggaggccgacaaggacgagttctgcagatgcgagctgaagctgcagaagtggtacggggacctgcggggaaagcccttcgccatcgaagccgagaacagcatcctggacatcagcggcttcagcaagcagtacaactgtgccttcatctggcagaaggacggcgtgaagaagctgaacctgtacctgatcatcaactacttcaagggcggcaagctgcggttcaagaagatcaaacctgaagccttcgaagccaacagattctacaccgtgatcaacaaaaagagcggcgagatcgtgcccatggaggtgaacttcaacttcgacgaccccaacctgatcatcctgcctctggcctttggcaagagacagggcagagaattcatctggaacgacctgctgtccctggaaaccggcagcctgaagctggccaacggaagagtgatcgagaagacactgtacaacagaagaacccggcaggatgagcctgccctgttcgtggccctgaccttcgagcggcgggaggtcctggactcctccaatatcaaaccaatgaacctgatcggcgtggcaagaggcgaaaacatccccgccgtgatcgccctgaccgaccccgagggctgcccactgagccggtttaaggatagcctgggaaacccaacccacatcctgagaatcggcgagagctataaggagaagcagcggaccatccaggccaagaaggaggtggagcagcggagagccggcggctacagccggaagtacgccagcaaagccaagaatctggcagacgatatggtgagaaacaccgctagagatctgctgtactacgccgtgacccaggatgccatgctgatcttcgccaacctgagccggggcttcggccggcagggcaagcggaccttcatggccgagagacagtacacacggatggaggactggctgaccgccaagctggcctacgagggcctgagcaagacctacctgtccaagacactggcccagtacacctccaagacatgcagcaactgtgggtttaccatcaccagcgccgactacgacagggtgctggagaagctgaagaagacagcaacaggctggatgaccacaattaacggcaaggagctgaaggtggagggccagattacctactacaacagatacaagagacagaacgtagtcaaggacctgtccgtcgagctggatagactgagcgaagaatctgtgaacaacgacatctcctcctggacaaagggcagaagcggagaagctctgagcctcctgaagaaaagattctcccatagacccgtgcaggagaagttcgtgtgcctgaactgcggcttcgagacacacgcagccgagcaagccgccctgaacatcgccagatcctggctgttcctgcggagccaggagtacaagaaataccagacaaacaagacaaccggcaacaccgataagagagccttcgtcgagacctggcagtccttttaccggaagaagcttaaggaggtgtggaaacctgccgtgcggtctggcggatctggcggaggctccacaagcaagcccggcgccgtgagcttcgccgacgtggccgtgtacttcagccccgaggagtggggctgcctgaggcccgcccagagggccctgtacagggacgtgatgagggagacctacggccacctgggcgccctgggcttccccggccccaagcccgccctgatcagctggatggagcaggagagcgaggcctggagcagcgccgcccaggaccccgagaagggcgagagcctgggcggcgccaggaccagccccaagaaaaagagaaaagtctaagctgccttctgcggggcttgccttctggccatgcccttcttctctcccttgcacctgtacctcttggtctttgaataaagcctgagtaggaaggctagcaaaaaaaaaaaaaaaaaaaaaaaaaaaaaaaaaaaaaaaaaaaaaaaaaaaaaaaaaaaaaaaaaaaaaaaaaaaaaaaa

SEQ ID NO: 2566 - RNA, 5419 nt, synthetic construct
  source 1..5419: mol_type = other RNA
aggaaataagagagaaaagaagagtaagaagaaatataagagccaccatggcccctaagaagaagcgtaaagtgagccgggtgaacggcagcggcagcggcggcggcatgaaccacgaccaggagttcgacccccctaaggtgtaccctcccgtccccgccgagaagagaaagcccatccgggtcctgagcctgttcgatggcatcgccaccggtctgctggtgctgaaggacctgggcatccaggtggataggtacattgcctccgaggtgtgcgaggactccatcaccgtgggaatggtgcgtcatcagggcaagatcatgtacgtgggcgacgtgcggagcgtgacacagaagcatatccaggagtggggccctttcgacctggtgatcggcggcagcccttgcaatgacctgagcatcgtgaacccagcccggaagggcctgtacgagggaaccggcagactgttcttcgagttttacagactgctgcacgacgcccggcctaaggaaggcgacgaccggcccttcttttggctgttcgagaatgtggtggccatgggagtcagcgacaagcgggatattagccggttcctggagagcaaccccgtgatgatcgatgccaaggaagtgagcgccgcccaccgggccagatacttctggggcaatctgcctggcatgaacagacccctggccagcaccgtgaacgacaagctggagctgcaggagtgcctggagcacggccggatcgccaagttcagcaaggtgagaaccatcaccacccgaagcaacagcatcaaacaaggcaaggaccagcactttcctgtgttcatgaacgagaaggaggacatcctgtggtgtaccgagatggagagagtgttcgggttcccagtccactacacagatgtcagcaacatgtctagactggccagacagagactgctgggaagaagctggtccgtccctgtgatcagacacctgttcgcccctctgaaggagtacttcgcctgcgtgagcagcggcaacagcaacgccaacagccggggccccagcttctctagcggcctggtgccactgtccctgagagggagccacatgggccccatggagatctacaaaaccgtgagcgcctggaagcggcagcctgtgcgcgtgctgagcctgtttcggaatatcgataaagtcctgaaaagcctgggattcctggagagcggctctggctccggcggtggcaccctgaagtacgtggaggatgtgacaaacgtggtcagacgggatgtggagaagtggggccccttcgatctggtgtacggcagcacccaacccctgggcagctcttgtgaccggtgccctggctggtacatgtttcagttccaccggatcctgcagtacgccctgccgagacaggagtcccagcggccattcttttggattttcatggacaacttgctgctgaccgaggatgaccaggaaactaccactcggttcctgcagaccgaagccgtgaccctgcaggacgtgagaggccgggactaccagaacgccatgcgggtgtggtccaacatccctggactgaaaagcaagcacgcacctctgacccctaaagaagaggagtacctgcaggcccaggtgcggagcagaagcaagctggacgcccctaaggtggatctgctggtgaagaattgcctcctgcccctgagagagtacttcaagtatttcagccagaatagtctgcccctgggcggcccaagcagcggcgcccctcctcccagcggcggcagcccagccggctccccaacctctaccgaggagggcacctctgagtccgccacccccgagagcggccctggcacctccaccgagcccagcgagggcagcgcacccggcagccctgccggcagccccacctccacagaggagggaaccagcaccgagcccagcgaaggcagcgccccaggcaccagcaccgagcctagtgagggcggctctggcggcggcagcgcccaggagattaaacggatcaacaagatcagaagaagacttgtgaaagacagcaacaccaagaaggccggcaagacaggccccatgaaaaccctgctggttagagtgatgacacccgatctgagagagcggctggaaaacctgagaaagaagcctgaaaatatcccccagcccatcagcaatacatctagagccaacctgaataagctgctgaccgattacaccgaaatgaagaaggcgatcctgcatgtgtactgggaagagttccagaaggaccctgtgggcctgatgagccgggtggcccagcctgccagcaagaagatcgatcagaacaagctgaaacctgagatggacgagaagggcaacctgaccaccgccggctttgcctgctctcagtgtggccagcccctgttcgtgtacaagctggagcaggtgtctgagaagggcaaggcttacaccaactacttcggacggtgcaatgtggccgagcacgaaaagctgatcctgctggcccagctgaagcccgagaaggatagcgacgaagccgtgacatatagcctgggaaagtttgggcagagggccctggatttctacagcattcatgtgaccaaggagtccacccaccccgtgaagcccctggcccagatcgccggaaacagatacgcctccggacctgtgggaaaggccctgagcgacgcatgtatgggcacaatcgcctccttcctgtctaagtaccaggacatcatcatcgaacaccagaaggtggtgaagggcaaccagaagagactggagagcctgcgggagctggccggcaaggaaaacctggaataccctagcgtgaccctgccacctcagcctcacaccaaggagggcgttgatgcctacaacgaagtgatcgcccgggtgcgaatgtgggtgaacctgaacctgtggcagaagctgaagctaagcagagatgatgccaagcctctgctgagactgaagggattcccttcctttcctctggtcgagagacaggccaacgaagtggactggtgggacatggtgtgtaacgtgaagaagctgatcaacgagaaaaaggaggatggcaaggtgttttggcagaatctggctggctacaagagacaggaagccctgagaccatacctgagcagcgaggaagatcggaagaagggaaagaaattcgctcggtaccagctgggcgacctgctgctgcacctggaaaagaagcacggcgaggactggggaaaggtgtacgacgaggcctgggagcggattgacaagaaagtggaaggcctgagcaagcacatcaagctggaagaggaacggagaagcgaggacgcccagagcaaggccgccctgaccgactggctgcgggctaaggccagcttcgtgatcgagggcctgaaggaggccgacaaggacgagttctgcagatgcgagctgaagctgcagaagtggtacggggacctgcggggaaagcccttcgccatcgaagccgagaacagcatcctggacatcagcggcttcagcaagcagtacaactgtgccttcatctggcagaaggacggcgtgaagaagctgaacctgtacctgatcatcaactacttcaagggcggcaagctgcggttcaagaagatcaaacctgaagccttcgaagccaacagattctacaccgtgatcaacaaaaagagcggcgagatcgtgcccatggaggtgaacttcaacttcgacgaccccaacctgatcatcctgcctctggcctttggcaagagacagggcagagaattcatctggaacgacctgctgtccctggaaaccggcagcctgaagctggccaacggaagagtgatcgagaagacactgtacaacagaagaacccggcaggatgagcctgccctgttcgtggccctgaccttcgagcggcgggaggtcctggactcctccaatatcaaaccaatgaacctgatcggcgtggcaagaggcgaaaacatccccgccgtgatcgccctgaccgaccccgagggctgcccactgagccggtttaaggatagcctgggaaacccaacccacatcctgagaatcggcgagagctataaggagaagcagcggaccatccaggccaagaaggaggtggagcagcggagagccggcggctacagccggaagtacgccagcaaagccaagaatctggcagacgatatggtgagaaacaccgctagagatctgctgtactacgccgtgacccaggatgccatgctgatcttcgccaacctgagccggggcttcggccggcagggcaagcggaccttcatggccgagagacagtacacacggatggaggactggctgaccgccaagctggcctacgagggcctgagcaagacctacctgtccaagacactggcccagtacacctccaagacatgcagcaactgtgggtttaccatcaccagcgccgactacgacagggtgctggagaagctgaagaagacagcaacaggctggatgaccacaattaacggcaaggagctgaaggtggagggccagattacctactacaacagatacaagagacagaacgtagtcaaggacctgtccgtcgagctggatagactgagcgaagaatctgtgaacaacgacatctcctcctggacaaagggcagaagcggagaagctctgagcctcctgaagaaaagattctcccatagacccgtgcaggagaagttcgtgtgcctgaactgcggcttcgagacacacgcagccgagcaagccgccctgaacatcgccagatcctggctgttcctgcggagccaggagtacaagaaataccagacaaacaagacaaccggcaacaccgataagagagccttcgtcgagacctggcagtccttttaccggaagaagcttaaggaggtgtggaaacctgccgtgcggtctggcggatctggcggaggctccacaagcaagcccggcgccgtgagcttcgccgacgtggccgtgtacttcagccccgaggagtggggctgcctgaggcccgcccagagggccctgtacagggacgtgatgagggagacctacggccacctgggcgccctgggcttccccggccccaagcccgccctgatcagctggatggagcaggagagcgaggagagcgaggcctggagccccgccgccaaggaccccgaggagggcgagagcctgggcaccagccccaagaaaaagagaaaagtctaagctgccttctgcggggcttgccttctggccatgcccttcttctctcccttgcacctgtacctcttggtctttgaataaagcctgagtaggaaggctagcaaaaaaaaaaaaaaaaaaaaaaaaaaaaaaaaaaaaaaaaaaaaaaaaaaaaaaaaaaaaaaaaaaaaaaaaaaaaaaaa

SEQ ID NO: 2567 - RNA, 5419 nt, synthetic construct
  source 1..5419: mol_type = other RNA
aggaaataagagagaaaagaagagtaagaagaaatataagagccaccatggcccctaagaagaagcgtaaagtgagccgggtgaacggcagcggcagcggcggcggcatgaaccacgaccaggagttcgacccccctaaggtgtaccctcccgtccccgccgagaagagaaagcccatccgggtcctgagcctgttcgatggcatcgccaccggtctgctggtgctgaaggacctgggcatccaggtggataggtacattgcctccgaggtgtgcgaggactccatcaccgtgggaatggtgcgtcatcagggcaagatcatgtacgtgggcgacgtgcggagcgtgacacagaagcatatccaggagtggggccctttcgacctggtgatcggcggcagcccttgcaatgacctgagcatcgtgaacccagcccggaagggcctgtacgagggaaccggcagactgttcttcgagttttacagactgctgcacgacgcccggcctaaggaaggcgacgaccggcccttcttttggctgttcgagaatgtggtggccatgggagtcagcgacaagcgggatattagccggttcctggagagcaaccccgtgatgatcgatgccaaggaagtgagcgccgcccaccgggccagatacttctggggcaatctgcctggcatgaacagacccctggccagcaccgtgaacgacaagctggagctgcaggagtgcctggagcacggccggatcgccaagttcagcaaggtgagaaccatcaccacccgaagcaacagcatcaaacaaggcaaggaccagcactttcctgtgttcatgaacgagaaggaggacatcctgtggtgtaccgagatggagagagtgttcgggttcccagtccactacacagatgtcagcaacatgtctagactggccagacagagactgctgggaagaagctggtccgtccctgtgatcagacacctgttcgcccctctgaaggagtacttcgcctgcgtgagcagcggcaacagcaacgccaacagccggggccccagcttctctagcggcctggtgccactgtccctgagagggagccacatgggccccatggagatctacaaaaccgtgagcgcctggaagcggcagcctgtgcgcgtgctgagcctgtttcggaatatcgataaagtcctgaaaagcctgggattcctggagagcggctctggctccggcggtggcaccctgaagtacgtggaggatgtgacaaacgtggtcagacgggatgtggagaagtggggccccttcgatctggtgtacggcagcacccaacccctgggcagctcttgtgaccggtgccctggctggtacatgtttcagttccaccggatcctgcagtacgccctgccgagacaggagtcccagcggccattcttttggattttcatggacaacttgctgctgaccgaggatgaccaggaaactaccactcggttcctgcagaccgaagccgtgaccctgcaggacgtgagaggccgggactaccagaacgccatgcgggtgtggtccaacatccctggactgaaaagcaagcacgcacctctgacccctaaagaagaggagtacctgcaggcccaggtgcggagcagaagcaagctggacgcccctaaggtggatctgctggtgaagaattgcctcctgcccctgagagagtacttcaagtatttcagccagaatagtctgcccctgggcggcccaagcagcggcgcccctcctcccagcggcggcagcccagccggctccccaacctctaccgaggagggcacctctgagtccgccacccccgagagcggccctggcacctccaccgagcccagcgagggcagcgcacccggcagccctgccggcagccccacctccacagaggagggaaccagcaccgagcccagcgaaggcagcgccccaggcaccagcaccgagcctagtgagggcggctctggcggcggcagcgcccaggagattaaacggatcaacaagatcagaagaagacttgtgaaagacagcaacaccaagaaggccggcaagacaggccccatgaaaaccctgctggttagagtgatgacacccgatctgagagagcggctggaaaacctgagaaagaagcctgaaaatatcccccagcccatcagcaatacatctagagccaacctgaataagctgctgaccgattacaccgaaatgaagaaggcgatcctgcatgtgtactgggaagagttccagaaggaccctgtgggcctgatgagccgggtggcccagcctgccagcaagaagatcgatcagaacaagctgaaacctgagatggacgagaagggcaacctgaccaccgccggctttgcctgctctcagtgtggccagcccctgttcgtgtacaagctggagcaggtgtctgagaagggcaaggcttacaccaactacttcggacggtgcaatgtggccgagcacgaaaagctgatcctgctggcccagctgaagcccgagaaggatagcgacgaagccgtgacatatagcctgggaaagtttgggcagagggccctggatttctacagcattcatgtgaccaaggagtccacccaccccgtgaagcccctggcccagatcgccggaaacagatacgcctccggacctgtgggaaaggccctgagcgacgcatgtatgggcacaatcgcctccttcctgtctaagtaccaggacatcatcatcgaacaccagaaggtggtgaagggcaaccagaagagactggagagcctgcgggagctggccggcaaggaaaacctggaataccctagcgtgaccctgccacctcagcctcacaccaaggagggcgttgatgcctacaacgaagtgatcgcccgggtgcgaatgtgggtgaacctgaacctgtggcagaagctgaagctaagcagagatgatgccaagcctctgctgagactgaagggattcccttcctttcctctggtcgagagacaggccaacgaagtggactggtgggacatggtgtgtaacgtgaagaagctgatcaacgagaaaaaggaggatggcaaggtgttttggcagaatctggctggctacaagagacaggaagccctgagaccatacctgagcagcgaggaagatcggaagaagggaaagaaattcgctcggtaccagctgggcgacctgctgctgcacctggaaaagaagcacggcgaggactggggaaaggtgtacgacgaggcctgggagcggattgacaagaaagtggaaggcctgagcaagcacatcaagctggaagaggaacggagaagcgaggacgcccagagcaaggccgccctgaccgactggctgcgggctaaggccagcttcgtgatcgagggcctgaaggaggccgacaaggacgagttctgcagatgcgagctgaagctgcagaagtggtacggggacctgcggggaaagcccttcgccatcgaagccgagaacagcatcctggacatcagcggcttcagcaagcagtacaactgtgccttcatctggcagaaggacggcgtgaagaagctgaacctgtacctgatcatcaactacttcaagggcggcaagctgcggttcaagaagatcaaacctgaagccttcgaagccaacagattctacaccgtgatcaacaaaaagagcggcgagatcgtgcccatggaggtgaacttcaacttcgacgaccccaacctgatcatcctgcctctggcctttggcaagagacagggcagagaattcatctggaacgacctgctgtccctggaaaccggcagcctgaagctggccaacggaagagtgatcgagaagacactgtacaacagaagaacccggcaggatgagcctgccctgttcgtggccctgaccttcgagcggcgggaggtcctggactcctccaatatcaaaccaatgaacctgatcggcgtggcaagaggcgaaaacatccccgccgtgatcgccctgaccgaccccgagggctgcccactgagccggtttaaggatagcctgggaaacccaacccacatcctgagaatcggcgagagctataaggagaagcagcggaccatccaggccaagaaggaggtggagcagcggagagccggcggctacagccggaagtacgccagcaaagccaagaatctggcagacgatatggtgagaaacaccgctagagatctgctgtactacgccgtgacccaggatgccatgctgatcttcgccaacctgagccggggcttcggccggcagggcaagcggaccttcatggccgagagacagtacacacggatggaggactggctgaccgccaagctggcctacgagggcctgagcaagacctacctgtccaagacactggcccagtacacctccaagacatgcagcaactgtgggtttaccatcaccagcgccgactacgacagggtgctggagaagctgaagaagacagcaacaggctggatgaccacaattaacggcaaggagctgaaggtggagggccagattacctactacaacagatacaagagacagaacgtagtcaaggacctgtccgtcgagctggatagactgagcgaagaatctgtgaacaacgacatctcctcctggacaaagggcagaagcggagaagctctgagcctcctgaagaaaagattctcccatagacccgtgcaggagaagttcgtgtgcctgaactgcggcttcgagacacacgcagccgagcaagccgccctgaacatcgccagatcctggctgttcctgcggagccaggagtacaagaaataccagacaaacaagacaaccggcaacaccgataagagagccttcgtcgagacctggcagtccttttaccggaagaagcttaaggaggtgtggaaacctgccgtgcggtctggcggatctggcggaggctccacaagcagccagagccccctgaccttcggcgacgtggccgtggagttcagcggcgacgagtgggcctggctggacagcgcccagaggagcctgcacaggagcgtgatgctggagaactacaggaacctggccagcctgggcctgtgcatgagcaagcccgagatgatcagcagcctggagcagagcaaggagccctgggccgtgaaggccaagagcaccaggggcaggtgccccggcctggaggccatcaccagccccaagaaaaagagaaaagtctaagctgccttctgcggggcttgccttctggccatgcccttcttctctcccttgcacctgtacctcttggtctttgaataaagcctgagtaggaaggctagcaaaaaaaaaaaaaaaaaaaaaaaaaaaaaaaaaaaaaaaaaaaaaaaaaaaaaaaaaaaaaaaaaaaaaaaaaaaaaaaa

SEQ ID NO: 2568 - RNA, 5419 nt, synthetic construct
  source 1..5419: mol_type = other RNA
aggaaataagagagaaaagaagagtaagaagaaatataagagccaccatggcccctaagaagaagcgtaaagtgagccgggtgaacggcagcggcagcggcggcggcatgaaccacgaccaggagttcgacccccctaaggtgtaccctcccgtccccgccgagaagagaaagcccatccgggtcctgagcctgttcgatggcatcgccaccggtctgctggtgctgaaggacctgggcatccaggtggataggtacattgcctccgaggtgtgcgaggactccatcaccgtgggaatggtgcgtcatcagggcaagatcatgtacgtgggcgacgtgcggagcgtgacacagaagcatatccaggagtggggccctttcgacctggtgatcggcggcagcccttgcaatgacctgagcatcgtgaacccagcccggaagggcctgtacgagggaaccggcagactgttcttcgagttttacagactgctgcacgacgcccggcctaaggaaggcgacgaccggcccttcttttggctgttcgagaatgtggtggccatgggagtcagcgacaagcgggatattagccggttcctggagagcaaccccgtgatgatcgatgccaaggaagtgagcgccgcccaccgggccagatacttctggggcaatctgcctggcatgaacagacccctggccagcaccgtgaacgacaagctggagctgcaggagtgcctggagcacggccggatcgccaagttcagcaaggtgagaaccatcaccacccgaagcaacagcatcaaacaaggcaaggaccagcactttcctgtgttcatgaacgagaaggaggacatcctgtggtgtaccgagatggagagagtgttcgggttcccagtccactacacagatgtcagcaacatgtctagactggccagacagagactgctgggaagaagctggtccgtccctgtgatcagacacctgttcgcccctctgaaggagtacttcgcctgcgtgagcagcggcaacagcaacgccaacagccggggccccagcttctctagcggcctggtgccactgtccctgagagggagccacatgggccccatggagatctacaaaaccgtgagcgcctggaagcggcagcctgtgcgcgtgctgagcctgtttcggaatatcgataaagtcctgaaaagcctgggattcctggagagcggctctggctccggcggtggcaccctgaagtacgtggaggatgtgacaaacgtggtcagacgggatgtggagaagtggggccccttcgatctggtgtacggcagcacccaacccctgggcagctcttgtgaccggtgccctggctggtacatgtttcagttccaccggatcctgcagtacgccctgccgagacaggagtcccagcggccattcttttggattttcatggacaacttgctgctgaccgaggatgaccaggaaactaccactcggttcctgcagaccgaagccgtgaccctgcaggacgtgagaggccgggactaccagaacgccatgcgggtgtggtccaacatccctggactgaaaagcaagcacgcacctctgacccctaaagaagaggagtacctgcaggcccaggtgcggagcagaagcaagctggacgcccctaaggtggatctgctggtgaagaattgcctcctgcccctgagagagtacttcaagtatttcagccagaatagtctgcccctgggcggcccaagcagcggcgcccctcctcccagcggcggcagcccagccggctccccaacctctaccgaggagggcacctctgagtccgccacccccgagagcggccctggcacctccaccgagcccagcgagggcagcgcacccggcagccctgccggcagccccacctccacagaggagggaaccagcaccgagcccagcgaaggcagcgccccaggcaccagcaccgagcctagtgagggcggctctggcggcggcagcgcccaggagattaaacggatcaacaagatcagaagaagacttgtgaaagacagcaacaccaagaaggccggcaagacaggccccatgaaaaccctgctggttagagtgatgacacccgatctgagagagcggctggaaaacctgagaaagaagcctgaaaatatcccccagcccatcagcaatacatctagagccaacctgaataagctgctgaccgattacaccgaaatgaagaaggcgatcctgcatgtgtactgggaagagttccagaaggaccctgtgggcctgatgagccgggtggcccagcctgccagcaagaagatcgatcagaacaagctgaaacctgagatggacgagaagggcaacctgaccaccgccggctttgcctgctctcagtgtggccagcccctgttcgtgtacaagctggagcaggtgtctgagaagggcaaggcttacaccaactacttcggacggtgcaatgtggccgagcacgaaaagctgatcctgctggcccagctgaagcccgagaaggatagcgacgaagccgtgacatatagcctgggaaagtttgggcagagggccctggatttctacagcattcatgtgaccaaggagtccacccaccccgtgaagcccctggcccagatcgccggaaacagatacgcctccggacctgtgggaaaggccctgagcgacgcatgtatgggcacaatcgcctccttcctgtctaagtaccaggacatcatcatcgaacaccagaaggtggtgaagggcaaccagaagagactggagagcctgcgggagctggccggcaaggaaaacctggaataccctagcgtgaccctgccacctcagcctcacaccaaggagggcgttgatgcctacaacgaagtgatcgcccgggtgcgaatgtgggtgaacctgaacctgtggcagaagctgaagctaagcagagatgatgccaagcctctgctgagactgaagggattcccttcctttcctctggtcgagagacaggccaacgaagtggactggtgggacatggtgtgtaacgtgaagaagctgatcaacgagaaaaaggaggatggcaaggtgttttggcagaatctggctggctacaagagacaggaagccctgagaccatacctgagcagcgaggaagatcggaagaagggaaagaaattcgctcggtaccagctgggcgacctgctgctgcacctggaaaagaagcacggcgaggactggggaaaggtgtacgacgaggcctgggagcggattgacaagaaagtggaaggcctgagcaagcacatcaagctggaagaggaacggagaagcgaggacgcccagagcaaggccgccctgaccgactggctgcgggctaaggccagcttcgtgatcgagggcctgaaggaggccgacaaggacgagttctgcagatgcgagctgaagctgcagaagtggtacggggacctgcggggaaagcccttcgccatcgaagccgagaacagcatcctggacatcagcggcttcagcaagcagtacaactgtgccttcatctggcagaaggacggcgtgaagaagctgaacctgtacctgatcatcaactacttcaagggcggcaagctgcggttcaagaagatcaaacctgaagccttcgaagccaacagattctacaccgtgatcaacaaaaagagcggcgagatcgtgcccatggaggtgaacttcaacttcgacgaccccaacctgatcatcctgcctctggcctttggcaagagacagggcagagaattcatctggaacgacctgctgtccctggaaaccggcagcctgaagctggccaacggaagagtgatcgagaagacactgtacaacagaagaacccggcaggatgagcctgccctgttcgtggccctgaccttcgagcggcgggaggtcctggactcctccaatatcaaaccaatgaacctgatcggcgtggcaagaggcgaaaacatccccgccgtgatcgccctgaccgaccccgagggctgcccactgagccggtttaaggatagcctgggaaacccaacccacatcctgagaatcggcgagagctataaggagaagcagcggaccatccaggccaagaaggaggtggagcagcggagagccggcggctacagccggaagtacgccagcaaagccaagaatctggcagacgatatggtgagaaacaccgctagagatctgctgtactacgccgtgacccaggatgccatgctgatcttcgccaacctgagccggggcttcggccggcagggcaagcggaccttcatggccgagagacagtacacacggatggaggactggctgaccgccaagctggcctacgagggcctgagcaagacctacctgtccaagacactggcccagtacacctccaagacatgcagcaactgtgggtttaccatcaccagcgccgactacgacagggtgctggagaagctgaagaagacagcaacaggctggatgaccacaattaacggcaaggagctgaaggtggagggccagattacctactacaacagatacaagagacagaacgtagtcaaggacctgtccgtcgagctggatagactgagcgaagaatctgtgaacaacgacatctcctcctggacaaagggcagaagcggagaagctctgagcctcctgaagaaaagattctcccatagacccgtgcaggagaagttcgtgtgcctgaactgcggcttcgagacacacgcagccgagcaagccgccctgaacatcgccagatcctggctgttcctgcggagccaggagtacaagaaataccagacaaacaagacaaccggcaacaccgataagagagccttcgtcgagacctggcagtccttttaccggaagaagcttaaggaggtgtggaaacctgccgtgcggtctggcggatctggcggaggctccacaagcatggccttcgaggacgtggccgtgtacttcagccaggaggagtggggcctgctggacaccgcccagagggccctgtacaggcacgtgatgctggagaacttcaccctggtgaccagcctgggcctgagcaccagcaggccctacgtggtgatccagctggagaggggcgaggagccctgggtgcccagcggcaaggacatgaccctggccaggaacacctacaggaggctgaacgccggcagcaccagccccaagaaaaagagaaaagtctaagctgccttctgcggggcttgccttctggccatgcccttcttctctcccttgcacctgtacctcttggtctttgaataaagcctgagtaggaaggctagcaaaaaaaaaaaaaaaaaaaaaaaaaaaaaaaaaaaaaaaaaaaaaaaaaaaaaaaaaaaaaaaaaaaaaaaaaaaaaaaa

SEQ ID NO: 2569 - RNA, 5419 nt, synthetic construct
  source 1..5419: mol_type = other RNA
aggaaataagagagaaaagaagagtaagaagaaatataagagccaccatggcccctaagaagaagcgtaaagtgagccgggtgaacggcagcggcagcggcggcggcatgaaccacgaccaggagttcgacccccctaaggtgtaccctcccgtccccgccgagaagagaaagcccatccgggtcctgagcctgttcgatggcatcgccaccggtctgctggtgctgaaggacctgggcatccaggtggataggtacattgcctccgaggtgtgcgaggactccatcaccgtgggaatggtgcgtcatcagggcaagatcatgtacgtgggcgacgtgcggagcgtgacacagaagcatatccaggagtggggccctttcgacctggtgatcggcggcagcccttgcaatgacctgagcatcgtgaacccagcccggaagggcctgtacgagggaaccggcagactgttcttcgagttttacagactgctgcacgacgcccggcctaaggaaggcgacgaccggcccttcttttggctgttcgagaatgtggtggccatgggagtcagcgacaagcgggatattagccggttcctggagagcaaccccgtgatgatcgatgccaaggaagtgagcgccgcccaccgggccagatacttctggggcaatctgcctggcatgaacagacccctggccagcaccgtgaacgacaagctggagctgcaggagtgcctggagcacggccggatcgccaagttcagcaaggtgagaaccatcaccacccgaagcaacagcatcaaacaaggcaaggaccagcactttcctgtgttcatgaacgagaaggaggacatcctgtggtgtaccgagatggagagagtgttcgggttcccagtccactacacagatgtcagcaacatgtctagactggccagacagagactgctgggaagaagctggtccgtccctgtgatcagacacctgttcgcccctctgaaggagtacttcgcctgcgtgagcagcggcaacagcaacgccaacagccggggccccagcttctctagcggcctggtgccactgtccctgagagggagccacatgggccccatggagatctacaaaaccgtgagcgcctggaagcggcagcctgtgcgcgtgctgagcctgtttcggaatatcgataaagtcctgaaaagcctgggattcctggagagcggctctggctccggcggtggcaccctgaagtacgtggaggatgtgacaaacgtggtcagacgggatgtggagaagtggggccccttcgatctggtgtacggcagcacccaacccctgggcagctcttgtgaccggtgccctggctggtacatgtttcagttccaccggatcctgcagtacgccctgccgagacaggagtcccagcggccattcttttggattttcatggacaacttgctgctgaccgaggatgaccaggaaactaccactcggttcctgcagaccgaagccgtgaccctgcaggacgtgagaggccgggactaccagaacgccatgcgggtgtggtccaacatccctggactgaaaagcaagcacgcacctctgacccctaaagaagaggagtacctgcaggcccaggtgcggagcagaagcaagctggacgcccctaaggtggatctgctggtgaagaattgcctcctgcccctgagagagtacttcaagtatttcagccagaatagtctgcccctgggcggcccaagcagcggcgcccctcctcccagcggcggcagcccagccggctccccaacctctaccgaggagggcacctctgagtccgccacccccgagagcggccctggcacctccaccgagcccagcgagggcagcgcacccggcagccctgccggcagccccacctccacagaggagggaaccagcaccgagcccagcgaaggcagcgccccaggcaccagcaccgagcctagtgagggcggctctggcggcggcagcgcccaggagattaaacggatcaacaagatcagaagaagacttgtgaaagacagcaacaccaagaaggccggcaagacaggccccatgaaaaccctgctggttagagtgatgacacccgatctgagagagcggctggaaaacctgagaaagaagcctgaaaatatcccccagcccatcagcaatacatctagagccaacctgaataagctgctgaccgattacaccgaaatgaagaaggcgatcctgcatgtgtactgggaagagttccagaaggaccctgtgggcctgatgagccgggtggcccagcctgccagcaagaagatcgatcagaacaagctgaaacctgagatggacgagaagggcaacctgaccaccgccggctttgcctgctctcagtgtggccagcccctgttcgtgtacaagctggagcaggtgtctgagaagggcaaggcttacaccaactacttcggacggtgcaatgtggccgagcacgaaaagctgatcctgctggcccagctgaagcccgagaaggatagcgacgaagccgtgacatatagcctgggaaagtttgggcagagggccctggatttctacagcattcatgtgaccaaggagtccacccaccccgtgaagcccctggcccagatcgccggaaacagatacgcctccggacctgtgggaaaggccctgagcgacgcatgtatgggcacaatcgcctccttcctgtctaagtaccaggacatcatcatcgaacaccagaaggtggtgaagggcaaccagaagagactggagagcctgcgggagctggccggcaaggaaaacctggaataccctagcgtgaccctgccacctcagcctcacaccaaggagggcgttgatgcctacaacgaagtgatcgcccgggtgcgaatgtgggtgaacctgaacctgtggcagaagctgaagctaagcagagatgatgccaagcctctgctgagactgaagggattcccttcctttcctctggtcgagagacaggccaacgaagtggactggtgggacatggtgtgtaacgtgaagaagctgatcaacgagaaaaaggaggatggcaaggtgttttggcagaatctggctggctacaagagacaggaagccctgagaccatacctgagcagcgaggaagatcggaagaagggaaagaaattcgctcggtaccagctgggcgacctgctgctgcacctggaaaagaagcacggcgaggactggggaaaggtgtacgacgaggcctgggagcggattgacaagaaagtggaaggcctgagcaagcacatcaagctggaagaggaacggagaagcgaggacgcccagagcaaggccgccctgaccgactggctgcgggctaaggccagcttcgtgatcgagggcctgaaggaggccgacaaggacgagttctgcagatgcgagctgaagctgcagaagtggtacggggacctgcggggaaagcccttcgccatcgaagccgagaacagcatcctggacatcagcggcttcagcaagcagtacaactgtgccttcatctggcagaaggacggcgtgaagaagctgaacctgtacctgatcatcaactacttcaagggcggcaagctgcggttcaagaagatcaaacctgaagccttcgaagccaacagattctacaccgtgatcaacaaaaagagcggcgagatcgtgcccatggaggtgaacttcaacttcgacgaccccaacctgatcatcctgcctctggcctttggcaagagacagggcagagaattcatctggaacgacctgctgtccctggaaaccggcagcctgaagctggccaacggaagagtgatcgagaagacactgtacaacagaagaacccggcaggatgagcctgccctgttcgtggccctgaccttcgagcggcgggaggtcctggactcctccaatatcaaaccaatgaacctgatcggcgtggcaagaggcgaaaacatccccgccgtgatcgccctgaccgaccccgagggctgcccactgagccggtttaaggatagcctgggaaacccaacccacatcctgagaatcggcgagagctataaggagaagcagcggaccatccaggccaagaaggaggtggagcagcggagagccggcggctacagccggaagtacgccagcaaagccaagaatctggcagacgatatggtgagaaacaccgctagagatctgctgtactacgccgtgacccaggatgccatgctgatcttcgccaacctgagccggggcttcggccggcagggcaagcggaccttcatggccgagagacagtacacacggatggaggactggctgaccgccaagctggcctacgagggcctgagcaagacctacctgtccaagacactggcccagtacacctccaagacatgcagcaactgtgggtttaccatcaccagcgccgactacgacagggtgctggagaagctgaagaagacagcaacaggctggatgaccacaattaacggcaaggagctgaaggtggagggccagattacctactacaacagatacaagagacagaacgtagtcaaggacctgtccgtcgagctggatagactgagcgaagaatctgtgaacaacgacatctcctcctggacaaagggcagaagcggagaagctctgagcctcctgaagaaaagattctcccatagacccgtgcaggagaagttcgtgtgcctgaactgcggcttcgagacacacgcagccgagcaagccgccctgaacatcgccagatcctggctgttcctgcggagccaggagtacaagaaataccagacaaacaagacaaccggcaacaccgataagagagccttcgtcgagacctggcagtccttttaccggaagaagcttaaggaggtgtggaaacctgccgtgcggtctggcggatctggcggaggctccacaagcatggccttcgaggacgtggccgtgtacttcagccaggaggagtggggcctgctggacaccgcccagagggccctgtacaggagggtgatgctggacaacttcgccctggtggccagcctgggcctgagcaccagcaggcccagggtggtgatccagctggagaggggcgaggagccctgggtgcccagcggcaccgacatgaccatgagcaggaacacccacaggaggaggaacagcggcttcaccagccccaagaaaaagagaaaagtctaagctgccttctgcggggcttgccttctggccatgcccttcttctctcccttgcacctgtacctcttggtctttgaataaagcctgagtaggaaggctagcaaaaaaaaaaaaaaaaaaaaaaaaaaaaaaaaaaaaaaaaaaaaaaaaaaaaaaaaaaaaaaaaaaaaaaaaaaaaaaaa

SEQ ID NO: 2570 - RNA, 5419 nt, synthetic construct
  source 1..5419: mol_type = other RNA
aggaaataagagagaaaagaagagtaagaagaaatataagagccaccatggcccctaagaagaagcgtaaagtgagccgggtgaacggcagcggcagcggcggcggcatgaaccacgaccaggagttcgacccccctaaggtgtaccctcccgtccccgccgagaagagaaagcccatccgggtcctgagcctgttcgatggcatcgccaccggtctgctggtgctgaaggacctgggcatccaggtggataggtacattgcctccgaggtgtgcgaggactccatcaccgtgggaatggtgcgtcatcagggcaagatcatgtacgtgggcgacgtgcggagcgtgacacagaagcatatccaggagtggggccctttcgacctggtgatcggcggcagcccttgcaatgacctgagcatcgtgaacccagcccggaagggcctgtacgagggaaccggcagactgttcttcgagttttacagactgctgcacgacgcccggcctaaggaaggcgacgaccggcccttcttttggctgttcgagaatgtggtggccatgggagtcagcgacaagcgggatattagccggttcctggagagcaaccccgtgatgatcgatgccaaggaagtgagcgccgcccaccgggccagatacttctggggcaatctgcctggcatgaacagacccctggccagcaccgtgaacgacaagctggagctgcaggagtgcctggagcacggccggatcgccaagttcagcaaggtgagaaccatcaccacccgaagcaacagcatcaaacaaggcaaggaccagcactttcctgtgttcatgaacgagaaggaggacatcctgtggtgtaccgagatggagagagtgttcgggttcccagtccactacacagatgtcagcaacatgtctagactggccagacagagactgctgggaagaagctggtccgtccctgtgatcagacacctgttcgcccctctgaaggagtacttcgcctgcgtgagcagcggcaacagcaacgccaacagccggggccccagcttctctagcggcctggtgccactgtccctgagagggagccacatgggccccatggagatctacaaaaccgtgagcgcctggaagcggcagcctgtgcgcgtgctgagcctgtttcggaatatcgataaagtcctgaaaagcctgggattcctggagagcggctctggctccggcggtggcaccctgaagtacgtggaggatgtgacaaacgtggtcagacgggatgtggagaagtggggccccttcgatctggtgtacggcagcacccaacccctgggcagctcttgtgaccggtgccctggctggtacatgtttcagttccaccggatcctgcagtacgccctgccgagacaggagtcccagcggccattcttttggattttcatggacaacttgctgctgaccgaggatgaccaggaaactaccactcggttcctgcagaccgaagccgtgaccctgcaggacgtgagaggccgggactaccagaacgccatgcgggtgtggtccaacatccctggactgaaaagcaagcacgcacctctgacccctaaagaagaggagtacctgcaggcccaggtgcggagcagaagcaagctggacgcccctaaggtggatctgctggtgaagaattgcctcctgcccctgagagagtacttcaagtatttcagccagaatagtctgcccctgggcggcccaagcagcggcgcccctcctcccagcggcggcagcccagccggctccccaacctctaccgaggagggcacctctgagtccgccacccccgagagcggccctggcacctccaccgagcccagcgagggcagcgcacccggcagccctgccggcagccccacctccacagaggagggaaccagcaccgagcccagcgaaggcagcgccccaggcaccagcaccgagcctagtgagggcggctctggcggcggcagcgcccaggagattaaacggatcaacaagatcagaagaagacttgtgaaagacagcaacaccaagaaggccggcaagacaggccccatgaaaaccctgctggttagagtgatgacacccgatctgagagagcggctggaaaacctgagaaagaagcctgaaaatatcccccagcccatcagcaatacatctagagccaacctgaataagctgctgaccgattacaccgaaatgaagaaggcgatcctgcatgtgtactgggaagagttccagaaggaccctgtgggcctgatgagccgggtggcccagcctgccagcaagaagatcgatcagaacaagctgaaacctgagatggacgagaagggcaacctgaccaccgccggctttgcctgctctcagtgtggccagcccctgttcgtgtacaagctggagcaggtgtctgagaagggcaaggcttacaccaactacttcggacggtgcaatgtggccgagcacgaaaagctgatcctgctggcccagctgaagcccgagaaggatagcgacgaagccgtgacatatagcctgggaaagtttgggcagagggccctggatttctacagcattcatgtgaccaaggagtccacccaccccgtgaagcccctggcccagatcgccggaaacagatacgcctccggacctgtgggaaaggccctgagcgacgcatgtatgggcacaatcgcctccttcctgtctaagtaccaggacatcatcatcgaacaccagaaggtggtgaagggcaaccagaagagactggagagcctgcgggagctggccggcaaggaaaacctggaataccctagcgtgaccctgccacctcagcctcacaccaaggagggcgttgatgcctacaacgaagtgatcgcccgggtgcgaatgtgggtgaacctgaacctgtggcagaagctgaagctaagcagagatgatgccaagcctctgctgagactgaagggattcccttcctttcctctggtcgagagacaggccaacgaagtggactggtgggacatggtgtgtaacgtgaagaagctgatcaacgagaaaaaggaggatggcaaggtgttttggcagaatctggctggctacaagagacaggaagccctgagaccatacctgagcagcgaggaagatcggaagaagggaaagaaattcgctcggtaccagctgggcgacctgctgctgcacctggaaaagaagcacggcgaggactggggaaaggtgtacgacgaggcctgggagcggattgacaagaaagtggaaggcctgagcaagcacatcaagctggaagaggaacggagaagcgaggacgcccagagcaaggccgccctgaccgactggctgcgggctaaggccagcttcgtgatcgagggcctgaaggaggccgacaaggacgagttctgcagatgcgagctgaagctgcagaagtggtacggggacctgcggggaaagcccttcgccatcgaagccgagaacagcatcctggacatcagcggcttcagcaagcagtacaactgtgccttcatctggcagaaggacggcgtgaagaagctgaacctgtacctgatcatcaactacttcaagggcggcaagctgcggttcaagaagatcaaacctgaagccttcgaagccaacagattctacaccgtgatcaacaaaaagagcggcgagatcgtgcccatggaggtgaacttcaacttcgacgaccccaacctgatcatcctgcctctggcctttggcaagagacagggcagagaattcatctggaacgacctgctgtccctggaaaccggcagcctgaagctggccaacggaagagtgatcgagaagacactgtacaacagaagaacccggcaggatgagcctgccctgttcgtggccctgaccttcgagcggcgggaggtcctggactcctccaatatcaaaccaatgaacctgatcggcgtggcaagaggcgaaaacatccccgccgtgatcgccctgaccgaccccgagggctgcccactgagccggtttaaggatagcctgggaaacccaacccacatcctgagaatcggcgagagctataaggagaagcagcggaccatccaggccaagaaggaggtggagcagcggagagccggcggctacagccggaagtacgccagcaaagccaagaatctggcagacgatatggtgagaaacaccgctagagatctgctgtactacgccgtgacccaggatgccatgctgatcttcgccaacctgagccggggcttcggccggcagggcaagcggaccttcatggccgagagacagtacacacggatggaggactggctgaccgccaagctggcctacgagggcctgagcaagacctacctgtccaagacactggcccagtacacctccaagacatgcagcaactgtgggtttaccatcaccagcgccgactacgacagggtgctggagaagctgaagaagacagcaacaggctggatgaccacaattaacggcaaggagctgaaggtggagggccagattacctactacaacagatacaagagacagaacgtagtcaaggacctgtccgtcgagctggatagactgagcgaagaatctgtgaacaacgacatctcctcctggacaaagggcagaagcggagaagctctgagcctcctgaagaaaagattctcccatagacccgtgcaggagaagttcgtgtgcctgaactgcggcttcgagacacacgcagccgagcaagccgccctgaacatcgccagatcctggctgttcctgcggagccaggagtacaagaaataccagacaaacaagacaaccggcaacaccgataagagagccttcgtcgagacctggcagtccttttaccggaagaagcttaaggaggtgtggaaacctgccgtgcggtctggcggatctggcggaggctccacaagcagccagagcctggtgaccttcggcgacgtggccgtggacttcagccaggaggagtgggagcagctgacctgcgcccagagggccctgtacagggacgtgatgctggagaactacaggaacctggtgagcctgggcctgtgcttcagcaagcccgacatgatcagcagcctggagcagagggaggagccctggatggccaagaggaagctgaccaggggcccctgccccgactggagggccgtgaccagccccaagaaaaagagaaaagtctaagctgccttctgcggggcttgccttctggccatgcccttcttctctcccttgcacctgtacctcttggtctttgaataaagcctgagtaggaaggctagcaaaaaaaaaaaaaaaaaaaaaaaaaaaaaaaaaaaaaaaaaaaaaaaaaaaaaaaaaaaaaaaaaaaaaaaaaaaaaaaa

SEQ ID NO: 2571 - RNA, 5419 nt, synthetic construct
  source 1..5419: mol_type = other RNA
aggaaataagagagaaaagaagagtaagaagaaatataagagccaccatggcccctaagaagaagcgtaaagtgagccgggtgaacggcagcggcagcggcggcggcatgaaccacgaccaggagttcgacccccctaaggtgtaccctcccgtccccgccgagaagagaaagcccatccgggtcctgagcctgttcgatggcatcgccaccggtctgctggtgctgaaggacctgggcatccaggtggataggtacattgcctccgaggtgtgcgaggactccatcaccgtgggaatggtgcgtcatcagggcaagatcatgtacgtgggcgacgtgcggagcgtgacacagaagcatatccaggagtggggccctttcgacctggtgatcggcggcagcccttgcaatgacctgagcatcgtgaacccagcccggaagggcctgtacgagggaaccggcagactgttcttcgagttttacagactgctgcacgacgcccggcctaaggaaggcgacgaccggcccttcttttggctgttcgagaatgtggtggccatgggagtcagcgacaagcgggatattagccggttcctggagagcaaccccgtgatgatcgatgccaaggaagtgagcgccgcccaccgggccagatacttctggggcaatctgcctggcatgaacagacccctggccagcaccgtgaacgacaagctggagctgcaggagtgcctggagcacggccggatcgccaagttcagcaaggtgagaaccatcaccacccgaagcaacagcatcaaacaaggcaaggaccagcactttcctgtgttcatgaacgagaaggaggacatcctgtggtgtaccgagatggagagagtgttcgggttcccagtccactacacagatgtcagcaacatgtctagactggccagacagagactgctgggaagaagctggtccgtccctgtgatcagacacctgttcgcccctctgaaggagtacttcgcctgcgtgagcagcggcaacagcaacgccaacagccggggccccagcttctctagcggcctggtgccactgtccctgagagggagccacatgggccccatggagatctacaaaaccgtgagcgcctggaagcggcagcctgtgcgcgtgctgagcctgtttcggaatatcgataaagtcctgaaaagcctgggattcctggagagcggctctggctccggcggtggcaccctgaagtacgtggaggatgtgacaaacgtggtcagacgggatgtggagaagtggggccccttcgatctggtgtacggcagcacccaacccctgggcagctcttgtgaccggtgccctggctggtacatgtttcagttccaccggatcctgcagtacgccctgccgagacaggagtcccagcggccattcttttggattttcatggacaacttgctgctgaccgaggatgaccaggaaactaccactcggttcctgcagaccgaagccgtgaccctgcaggacgtgagaggccgggactaccagaacgccatgcgggtgtggtccaacatccctggactgaaaagcaagcacgcacctctgacccctaaagaagaggagtacctgcaggcccaggtgcggagcagaagcaagctggacgcccctaaggtggatctgctggtgaagaattgcctcctgcccctgagagagtacttcaagtatttcagccagaatagtctgcccctgggcggcccaagcagcggcgcccctcctcccagcggcggcagcccagccggctccccaacctctaccgaggagggcacctctgagtccgccacccccgagagcggccctggcacctccaccgagcccagcgagggcagcgcacccggcagccctgccggcagccccacctccacagaggagggaaccagcaccgagcccagcgaaggcagcgccccaggcaccagcaccgagcctagtgagggcggctctggcggcggcagcgcccaggagattaaacggatcaacaagatcagaagaagacttgtgaaagacagcaacaccaagaaggccggcaagacaggccccatgaaaaccctgctggttagagtgatgacacccgatctgagagagcggctggaaaacctgagaaagaagcctgaaaatatcccccagcccatcagcaatacatctagagccaacctgaataagctgctgaccgattacaccgaaatgaagaaggcgatcctgcatgtgtactgggaagagttccagaaggaccctgtgggcctgatgagccgggtggcccagcctgccagcaagaagatcgatcagaacaagctgaaacctgagatggacgagaagggcaacctgaccaccgccggctttgcctgctctcagtgtggccagcccctgttcgtgtacaagctggagcaggtgtctgagaagggcaaggcttacaccaactacttcggacggtgcaatgtggccgagcacgaaaagctgatcctgctggcccagctgaagcccgagaaggatagcgacgaagccgtgacatatagcctgggaaagtttgggcagagggccctggatttctacagcattcatgtgaccaaggagtccacccaccccgtgaagcccctggcccagatcgccggaaacagatacgcctccggacctgtgggaaaggccctgagcgacgcatgtatgggcacaatcgcctccttcctgtctaagtaccaggacatcatcatcgaacaccagaaggtggtgaagggcaaccagaagagactggagagcctgcgggagctggccggcaaggaaaacctggaataccctagcgtgaccctgccacctcagcctcacaccaaggagggcgttgatgcctacaacgaagtgatcgcccgggtgcgaatgtgggtgaacctgaacctgtggcagaagctgaagctaagcagagatgatgccaagcctctgctgagactgaagggattcccttcctttcctctggtcgagagacaggccaacgaagtggactggtgggacatggtgtgtaacgtgaagaagctgatcaacgagaaaaaggaggatggcaaggtgttttggcagaatctggctggctacaagagacaggaagccctgagaccatacctgagcagcgaggaagatcggaagaagggaaagaaattcgctcggtaccagctgggcgacctgctgctgcacctggaaaagaagcacggcgaggactggggaaaggtgtacgacgaggcctgggagcggattgacaagaaagtggaaggcctgagcaagcacatcaagctggaagaggaacggagaagcgaggacgcccagagcaaggccgccctgaccgactggctgcgggctaaggccagcttcgtgatcgagggcctgaaggaggccgacaaggacgagttctgcagatgcgagctgaagctgcagaagtggtacggggacctgcggggaaagcccttcgccatcgaagccgagaacagcatcctggacatcagcggcttcagcaagcagtacaactgtgccttcatctggcagaaggacggcgtgaagaagctgaacctgtacctgatcatcaactacttcaagggcggcaagctgcggttcaagaagatcaaacctgaagccttcgaagccaacagattctacaccgtgatcaacaaaaagagcggcgagatcgtgcccatggaggtgaacttcaacttcgacgaccccaacctgatcatcctgcctctggcctttggcaagagacagggcagagaattcatctggaacgacctgctgtccctggaaaccggcagcctgaagctggccaacggaagagtgatcgagaagacactgtacaacagaagaacccggcaggatgagcctgccctgttcgtggccctgaccttcgagcggcgggaggtcctggactcctccaatatcaaaccaatgaacctgatcggcgtggcaagaggcgaaaacatccccgccgtgatcgccctgaccgaccccgagggctgcccactgagccggtttaaggatagcctgggaaacccaacccacatcctgagaatcggcgagagctataaggagaagcagcggaccatccaggccaagaaggaggtggagcagcggagagccggcggctacagccggaagtacgccagcaaagccaagaatctggcagacgatatggtgagaaacaccgctagagatctgctgtactacgccgtgacccaggatgccatgctgatcttcgccaacctgagccggggcttcggccggcagggcaagcggaccttcatggccgagagacagtacacacggatggaggactggctgaccgccaagctggcctacgagggcctgagcaagacctacctgtccaagacactggcccagtacacctccaagacatgcagcaactgtgggtttaccatcaccagcgccgactacgacagggtgctggagaagctgaagaagacagcaacaggctggatgaccacaattaacggcaaggagctgaaggtggagggccagattacctactacaacagatacaagagacagaacgtagtcaaggacctgtccgtcgagctggatagactgagcgaagaatctgtgaacaacgacatctcctcctggacaaagggcagaagcggagaagctctgagcctcctgaagaaaagattctcccatagacccgtgcaggagaagttcgtgtgcctgaactgcggcttcgagacacacgcagccgagcaagccgccctgaacatcgccagatcctggctgttcctgcggagccaggagtacaagaaataccagacaaacaagacaaccggcaacaccgataagagagccttcgtcgagacctggcagtccttttaccggaagaagcttaaggaggtgtggaaacctgccgtgcggtctggcggatctggcggaggctccacaagcatgcacctgaccgcctggccccagaagagcgtgaccttcgaggacgtggccgtgtacttcacccaggccgagtgggacggcctgagccccgcccagaggaccctgtacagggacgtgatgctggagaactacggcaacgtggccagcctgggcttccccctgctgaagcccgccgtgatcagccagctggagggcggcggcgagctgggcggccccagccccctggccgccggcaccggcctgaccagccccaagaaaaagagaaaagtctaagctgccttctgcggggcttgccttctggccatgcccttcttctctcccttgcacctgtacctcttggtctttgaataaagcctgagtaggaaggctagcaaaaaaaaaaaaaaaaaaaaaaaaaaaaaaaaaaaaaaaaaaaaaaaaaaaaaaaaaaaaaaaaaaaaaaaaaaaaaaaa

SEQ ID NO: 2572 - RNA, 5419 nt, synthetic construct
  source 1..5419: mol_type = other RNA
aggaaataagagagaaaagaagagtaagaagaaatataagagccaccatggcccctaagaagaagcgtaaagtgagccgggtgaacggcagcggcagcggcggcggcatgaaccacgaccaggagttcgacccccctaaggtgtaccctcccgtccccgccgagaagagaaagcccatccgggtcctgagcctgttcgatggcatcgccaccggtctgctggtgctgaaggacctgggcatccaggtggataggtacattgcctccgaggtgtgcgaggactccatcaccgtgggaatggtgcgtcatcagggcaagatcatgtacgtgggcgacgtgcggagcgtgacacagaagcatatccaggagtggggccctttcgacctggtgatcggcggcagcccttgcaatgacctgagcatcgtgaacccagcccggaagggcctgtacgagggaaccggcagactgttcttcgagttttacagactgctgcacgacgcccggcctaaggaaggcgacgaccggcccttcttttggctgttcgagaatgtggtggccatgggagtcagcgacaagcgggatattagccggttcctggagagcaaccccgtgatgatcgatgccaaggaagtgagcgccgcccaccgggccagatacttctggggcaatctgcctggcatgaacagacccctggccagcaccgtgaacgacaagctggagctgcaggagtgcctggagcacggccggatcgccaagttcagcaaggtgagaaccatcaccacccgaagcaacagcatcaaacaaggcaaggaccagcactttcctgtgttcatgaacgagaaggaggacatcctgtggtgtaccgagatggagagagtgttcgggttcccagtccactacacagatgtcagcaacatgtctagactggccagacagagactgctgggaagaagctggtccgtccctgtgatcagacacctgttcgcccctctgaaggagtacttcgcctgcgtgagcagcggcaacagcaacgccaacagccggggccccagcttctctagcggcctggtgccactgtccctgagagggagccacatgggccccatggagatctacaaaaccgtgagcgcctggaagcggcagcctgtgcgcgtgctgagcctgtttcggaatatcgataaagtcctgaaaagcctgggattcctggagagcggctctggctccggcggtggcaccctgaagtacgtggaggatgtgacaaacgtggtcagacgggatgtggagaagtggggccccttcgatctggtgtacggcagcacccaacccctgggcagctcttgtgaccggtgccctggctggtacatgtttcagttccaccggatcctgcagtacgccctgccgagacaggagtcccagcggccattcttttggattttcatggacaacttgctgctgaccgaggatgaccaggaaactaccactcggttcctgcagaccgaagccgtgaccctgcaggacgtgagaggccgggactaccagaacgccatgcgggtgtggtccaacatccctggactgaaaagcaagcacgcacctctgacccctaaagaagaggagtacctgcaggcccaggtgcggagcagaagcaagctggacgcccctaaggtggatctgctggtgaagaattgcctcctgcccctgagagagtacttcaagtatttcagccagaatagtctgcccctgggcggcccaagcagcggcgcccctcctcccagcggcggcagcccagccggctccccaacctctaccgaggagggcacctctgagtccgccacccccgagagcggccctggcacctccaccgagcccagcgagggcagcgcacccggcagccctgccggcagccccacctccacagaggagggaaccagcaccgagcccagcgaaggcagcgccccaggcaccagcaccgagcctagtgagggcggctctggcggcggcagcgcccaggagattaaacggatcaacaagatcagaagaagacttgtgaaagacagcaacaccaagaaggccggcaagacaggccccatgaaaaccctgctggttagagtgatgacacccgatctgagagagcggctggaaaacctgagaaagaagcctgaaaatatcccccagcccatcagcaatacatctagagccaacctgaataagctgctgaccgattacaccgaaatgaagaaggcgatcctgcatgtgtactgggaagagttccagaaggaccctgtgggcctgatgagccgggtggcccagcctgccagcaagaagatcgatcagaacaagctgaaacctgagatggacgagaagggcaacctgaccaccgccggctttgcctgctctcagtgtggccagcccctgttcgtgtacaagctggagcaggtgtctgagaagggcaaggcttacaccaactacttcggacggtgcaatgtggccgagcacgaaaagctgatcctgctggcccagctgaagcccgagaaggatagcgacgaagccgtgacatatagcctgggaaagtttgggcagagggccctggatttctacagcattcatgtgaccaaggagtccacccaccccgtgaagcccctggcccagatcgccggaaacagatacgcctccggacctgtgggaaaggccctgagcgacgcatgtatgggcacaatcgcctccttcctgtctaagtaccaggacatcatcatcgaacaccagaaggtggtgaagggcaaccagaagagactggagagcctgcgggagctggccggcaaggaaaacctggaataccctagcgtgaccctgccacctcagcctcacaccaaggagggcgttgatgcctacaacgaagtgatcgcccgggtgcgaatgtgggtgaacctgaacctgtggcagaagctgaagctaagcagagatgatgccaagcctctgctgagactgaagggattcccttcctttcctctggtcgagagacaggccaacgaagtggactggtgggacatggtgtgtaacgtgaagaagctgatcaacgagaaaaaggaggatggcaaggtgttttggcagaatctggctggctacaagagacaggaagccctgagaccatacctgagcagcgaggaagatcggaagaagggaaagaaattcgctcggtaccagctgggcgacctgctgctgcacctggaaaagaagcacggcgaggactggggaaaggtgtacgacgaggcctgggagcggattgacaagaaagtggaaggcctgagcaagcacatcaagctggaagaggaacggagaagcgaggacgcccagagcaaggccgccctgaccgactggctgcgggctaaggccagcttcgtgatcgagggcctgaaggaggccgacaaggacgagttctgcagatgcgagctgaagctgcagaagtggtacggggacctgcggggaaagcccttcgccatcgaagccgagaacagcatcctggacatcagcggcttcagcaagcagtacaactgtgccttcatctggcagaaggacggcgtgaagaagctgaacctgtacctgatcatcaactacttcaagggcggcaagctgcggttcaagaagatcaaacctgaagccttcgaagccaacagattctacaccgtgatcaacaaaaagagcggcgagatcgtgcccatggaggtgaacttcaacttcgacgaccccaacctgatcatcctgcctctggcctttggcaagagacagggcagagaattcatctggaacgacctgctgtccctggaaaccggcagcctgaagctggccaacggaagagtgatcgagaagacactgtacaacagaagaacccggcaggatgagcctgccctgttcgtggccctgaccttcgagcggcgggaggtcctggactcctccaatatcaaaccaatgaacctgatcggcgtggcaagaggcgaaaacatccccgccgtgatcgccctgaccgaccccgagggctgcccactgagccggtttaaggatagcctgggaaacccaacccacatcctgagaatcggcgagagctataaggagaagcagcggaccatccaggccaagaaggaggtggagcagcggagagccggcggctacagccggaagtacgccagcaaagccaagaatctggcagacgatatggtgagaaacaccgctagagatctgctgtactacgccgtgacccaggatgccatgctgatcttcgccaacctgagccggggcttcggccggcagggcaagcggaccttcatggccgagagacagtacacacggatggaggactggctgaccgccaagctggcctacgagggcctgagcaagacctacctgtccaagacactggcccagtacacctccaagacatgcagcaactgtgggtttaccatcaccagcgccgactacgacagggtgctggagaagctgaagaagacagcaacaggctggatgaccacaattaacggcaaggagctgaaggtggagggccagattacctactacaacagatacaagagacagaacgtagtcaaggacctgtccgtcgagctggatagactgagcgaagaatctgtgaacaacgacatctcctcctggacaaagggcagaagcggagaagctctgagcctcctgaagaaaagattctcccatagacccgtgcaggagaagttcgtgtgcctgaactgcggcttcgagacacacgcagccgagcaagccgccctgaacatcgccagatcctggctgttcctgcggagccaggagtacaagaaataccagacaaacaagacaaccggcaacaccgataagagagccttcgtcgagacctggcagtccttttaccggaagaagcttaaggaggtgtggaaacctgccgtgcggtctggcggatctggcggaggctccacaagcgcccccgtgaccttcggcgacctggccatctacttcagccaggaggagtgggagtggctgagccccatccagaaggacctgtacgaggacgtgatgctggagaactaccagaacctggtgagcctgggcctgtgcttcaggaggcccaacgtgatcaccctgctggagaggggcaaggccccctggatggtggaccccgtgaagaggaggaggggcctggacctgggcagcaagggcgagaccaccagccccaagaaaaagagaaaagtctaagctgccttctgcggggcttgccttctggccatgcccttcttctctcccttgcacctgtacctcttggtctttgaataaagcctgagtaggaaggctagcaaaaaaaaaaaaaaaaaaaaaaaaaaaaaaaaaaaaaaaaaaaaaaaaaaaaaaaaaaaaaaaaaaaaaaaaaaaaaaaa

SEQ ID NO: 2573 - RNA, 5419 nt, synthetic construct
  source 1..5419: mol_type = other RNA
aggaaataagagagaaaagaagagtaagaagaaatataagagccaccatggcccctaagaagaagcgtaaagtgagccgggtgaacggcagcggcagcggcggcggcatgaaccacgaccaggagttcgacccccctaaggtgtaccctcccgtccccgccgagaagagaaagcccatccgggtcctgagcctgttcgatggcatcgccaccggtctgctggtgctgaaggacctgggcatccaggtggataggtacattgcctccgaggtgtgcgaggactccatcaccgtgggaatggtgcgtcatcagggcaagatcatgtacgtgggcgacgtgcggagcgtgacacagaagcatatccaggagtggggccctttcgacctggtgatcggcggcagcccttgcaatgacctgagcatcgtgaacccagcccggaagggcctgtacgagggaaccggcagactgttcttcgagttttacagactgctgcacgacgcccggcctaaggaaggcgacgaccggcccttcttttggctgttcgagaatgtggtggccatgggagtcagcgacaagcgggatattagccggttcctggagagcaaccccgtgatgatcgatgccaaggaagtgagcgccgcccaccgggccagatacttctggggcaatctgcctggcatgaacagacccctggccagcaccgtgaacgacaagctggagctgcaggagtgcctggagcacggccggatcgccaagttcagcaaggtgagaaccatcaccacccgaagcaacagcatcaaacaaggcaaggaccagcactttcctgtgttcatgaacgagaaggaggacatcctgtggtgtaccgagatggagagagtgttcgggttcccagtccactacacagatgtcagcaacatgtctagactggccagacagagactgctgggaagaagctggtccgtccctgtgatcagacacctgttcgcccctctgaaggagtacttcgcctgcgtgagcagcggcaacagcaacgccaacagccggggccccagcttctctagcggcctggtgccactgtccctgagagggagccacatgggccccatggagatctacaaaaccgtgagcgcctggaagcggcagcctgtgcgcgtgctgagcctgtttcggaatatcgataaagtcctgaaaagcctgggattcctggagagcggctctggctccggcggtggcaccctgaagtacgtggaggatgtgacaaacgtggtcagacgggatgtggagaagtggggccccttcgatctggtgtacggcagcacccaacccctgggcagctcttgtgaccggtgccctggctggtacatgtttcagttccaccggatcctgcagtacgccctgccgagacaggagtcccagcggccattcttttggattttcatggacaacttgctgctgaccgaggatgaccaggaaactaccactcggttcctgcagaccgaagccgtgaccctgcaggacgtgagaggccgggactaccagaacgccatgcgggtgtggtccaacatccctggactgaaaagcaagcacgcacctctgacccctaaagaagaggagtacctgcaggcccaggtgcggagcagaagcaagctggacgcccctaaggtggatctgctggtgaagaattgcctcctgcccctgagagagtacttcaagtatttcagccagaatagtctgcccctgggcggcccaagcagcggcgcccctcctcccagcggcggcagcccagccggctccccaacctctaccgaggagggcacctctgagtccgccacccccgagagcggccctggcacctccaccgagcccagcgagggcagcgcacccggcagccctgccggcagccccacctccacagaggagggaaccagcaccgagcccagcgaaggcagcgccccaggcaccagcaccgagcctagtgagggcggctctggcggcggcagcgcccaggagattaaacggatcaacaagatcagaagaagacttgtgaaagacagcaacaccaagaaggccggcaagacaggccccatgaaaaccctgctggttagagtgatgacacccgatctgagagagcggctggaaaacctgagaaagaagcctgaaaatatcccccagcccatcagcaatacatctagagccaacctgaataagctgctgaccgattacaccgaaatgaagaaggcgatcctgcatgtgtactgggaagagttccagaaggaccctgtgggcctgatgagccgggtggcccagcctgccagcaagaagatcgatcagaacaagctgaaacctgagatggacgagaagggcaacctgaccaccgccggctttgcctgctctcagtgtggccagcccctgttcgtgtacaagctggagcaggtgtctgagaagggcaaggcttacaccaactacttcggacggtgcaatgtggccgagcacgaaaagctgatcctgctggcccagctgaagcccgagaaggatagcgacgaagccgtgacatatagcctgggaaagtttgggcagagggccctggatttctacagcattcatgtgaccaaggagtccacccaccccgtgaagcccctggcccagatcgccggaaacagatacgcctccggacctgtgggaaaggccctgagcgacgcatgtatgggcacaatcgcctccttcctgtctaagtaccaggacatcatcatcgaacaccagaaggtggtgaagggcaaccagaagagactggagagcctgcgggagctggccggcaaggaaaacctggaataccctagcgtgaccctgccacctcagcctcacaccaaggagggcgttgatgcctacaacgaagtgatcgcccgggtgcgaatgtgggtgaacctgaacctgtggcagaagctgaagctaagcagagatgatgccaagcctctgctgagactgaagggattcccttcctttcctctggtcgagagacaggccaacgaagtggactggtgggacatggtgtgtaacgtgaagaagctgatcaacgagaaaaaggaggatggcaaggtgttttggcagaatctggctggctacaagagacaggaagccctgagaccatacctgagcagcgaggaagatcggaagaagggaaagaaattcgctcggtaccagctgggcgacctgctgctgcacctggaaaagaagcacggcgaggactggggaaaggtgtacgacgaggcctgggagcggattgacaagaaagtggaaggcctgagcaagcacatcaagctggaagaggaacggagaagcgaggacgcccagagcaaggccgccctgaccgactggctgcgggctaaggccagcttcgtgatcgagggcctgaaggaggccgacaaggacgagttctgcagatgcgagctgaagctgcagaagtggtacggggacctgcggggaaagcccttcgccatcgaagccgagaacagcatcctggacatcagcggcttcagcaagcagtacaactgtgccttcatctggcagaaggacggcgtgaagaagctgaacctgtacctgatcatcaactacttcaagggcggcaagctgcggttcaagaagatcaaacctgaagccttcgaagccaacagattctacaccgtgatcaacaaaaagagcggcgagatcgtgcccatggaggtgaacttcaacttcgacgaccccaacctgatcatcctgcctctggcctttggcaagagacagggcagagaattcatctggaacgacctgctgtccctggaaaccggcagcctgaagctggccaacggaagagtgatcgagaagacactgtacaacagaagaacccggcaggatgagcctgccctgttcgtggccctgaccttcgagcggcgggaggtcctggactcctccaatatcaaaccaatgaacctgatcggcgtggcaagaggcgaaaacatccccgccgtgatcgccctgaccgaccccgagggctgcccactgagccggtttaaggatagcctgggaaacccaacccacatcctgagaatcggcgagagctataaggagaagcagcggaccatccaggccaagaaggaggtggagcagcggagagccggcggctacagccggaagtacgccagcaaagccaagaatctggcagacgatatggtgagaaacaccgctagagatctgctgtactacgccgtgacccaggatgccatgctgatcttcgccaacctgagccggggcttcggccggcagggcaagcggaccttcatggccgagagacagtacacacggatggaggactggctgaccgccaagctggcctacgagggcctgagcaagacctacctgtccaagacactggcccagtacacctccaagacatgcagcaactgtgggtttaccatcaccagcgccgactacgacagggtgctggagaagctgaagaagacagcaacaggctggatgaccacaattaacggcaaggagctgaaggtggagggccagattacctactacaacagatacaagagacagaacgtagtcaaggacctgtccgtcgagctggatagactgagcgaagaatctgtgaacaacgacatctcctcctggacaaagggcagaagcggagaagctctgagcctcctgaagaaaagattctcccatagacccgtgcaggagaagttcgtgtgcctgaactgcggcttcgagacacacgcagccgagcaagccgccctgaacatcgccagatcctggctgttcctgcggagccaggagtacaagaaataccagacaaacaagacaaccggcaacaccgataagagagccttcgtcgagacctggcagtccttttaccggaagaagcttaaggaggtgtggaaacctgccgtgcggtctggcggatctggcggaggctccacaagcagcaaggcccccatcaccttcggcgacctggccatctacttcagccaggaggagtgggagtggctgagccccatccagaaggacctgtacgaggacgtgatgctggagaactacaggaacctggtgagcctgggcctgagcttcaggaggcccaacgtgatcaccctgctggagaagggcaaggccccctggatgatcgagcccgtgaggaggaggagggcccccgacagcggcagcaagtgcaccagccccaagaaaaagagaaaagtctaagctgccttctgcggggcttgccttctggccatgcccttcttctctcccttgcacctgtacctcttggtctttgaataaagcctgagtaggaaggctagcaaaaaaaaaaaaaaaaaaaaaaaaaaaaaaaaaaaaaaaaaaaaaaaaaaaaaaaaaaaaaaaaaaaaaaaaaaaaaaaa

SEQ ID NO: 2574 - RNA, 5419 nt, synthetic construct
  source 1..5419: mol_type = other RNA
aggaaataagagagaaaagaagagtaagaagaaatataagagccaccatggcccctaagaagaagcgtaaagtgagccgggtgaacggcagcggcagcggcggcggcatgaaccacgaccaggagttcgacccccctaaggtgtaccctcccgtccccgccgagaagagaaagcccatccgggtcctgagcctgttcgatggcatcgccaccggtctgctggtgctgaaggacctgggcatccaggtggataggtacattgcctccgaggtgtgcgaggactccatcaccgtgggaatggtgcgtcatcagggcaagatcatgtacgtgggcgacgtgcggagcgtgacacagaagcatatccaggagtggggccctttcgacctggtgatcggcggcagcccttgcaatgacctgagcatcgtgaacccagcccggaagggcctgtacgagggaaccggcagactgttcttcgagttttacagactgctgcacgacgcccggcctaaggaaggcgacgaccggcccttcttttggctgttcgagaatgtggtggccatgggagtcagcgacaagcgggatattagccggttcctggagagcaaccccgtgatgatcgatgccaaggaagtgagcgccgcccaccgggccagatacttctggggcaatctgcctggcatgaacagacccctggccagcaccgtgaacgacaagctggagctgcaggagtgcctggagcacggccggatcgccaagttcagcaaggtgagaaccatcaccacccgaagcaacagcatcaaacaaggcaaggaccagcactttcctgtgttcatgaacgagaaggaggacatcctgtggtgtaccgagatggagagagtgttcgggttcccagtccactacacagatgtcagcaacatgtctagactggccagacagagactgctgggaagaagctggtccgtccctgtgatcagacacctgttcgcccctctgaaggagtacttcgcctgcgtgagcagcggcaacagcaacgccaacagccggggccccagcttctctagcggcctggtgccactgtccctgagagggagccacatgggccccatggagatctacaaaaccgtgagcgcctggaagcggcagcctgtgcgcgtgctgagcctgtttcggaatatcgataaagtcctgaaaagcctgggattcctggagagcggctctggctccggcggtggcaccctgaagtacgtggaggatgtgacaaacgtggtcagacgggatgtggagaagtggggccccttcgatctggtgtacggcagcacccaacccctgggcagctcttgtgaccggtgccctggctggtacatgtttcagttccaccggatcctgcagtacgccctgccgagacaggagtcccagcggccattcttttggattttcatggacaacttgctgctgaccgaggatgaccaggaaactaccactcggttcctgcagaccgaagccgtgaccctgcaggacgtgagaggccgggactaccagaacgccatgcgggtgtggtccaacatccctggactgaaaagcaagcacgcacctctgacccctaaagaagaggagtacctgcaggcccaggtgcggagcagaagcaagctggacgcccctaaggtggatctgctggtgaagaattgcctcctgcccctgagagagtacttcaagtatttcagccagaatagtctgcccctgggcggcccaagcagcggcgcccctcctcccagcggcggcagcccagccggctccccaacctctaccgaggagggcacctctgagtccgccacccccgagagcggccctggcacctccaccgagcccagcgagggcagcgcacccggcagccctgccggcagccccacctccacagaggagggaaccagcaccgagcccagcgaaggcagcgccccaggcaccagcaccgagcctagtgagggcggctctggcggcggcagcgcccaggagattaaacggatcaacaagatcagaagaagacttgtgaaagacagcaacaccaagaaggccggcaagacaggccccatgaaaaccctgctggttagagtgatgacacccgatctgagagagcggctggaaaacctgagaaagaagcctgaaaatatcccccagcccatcagcaatacatctagagccaacctgaataagctgctgaccgattacaccgaaatgaagaaggcgatcctgcatgtgtactgggaagagttccagaaggaccctgtgggcctgatgagccgggtggcccagcctgccagcaagaagatcgatcagaacaagctgaaacctgagatggacgagaagggcaacctgaccaccgccggctttgcctgctctcagtgtggccagcccctgttcgtgtacaagctggagcaggtgtctgagaagggcaaggcttacaccaactacttcggacggtgcaatgtggccgagcacgaaaagctgatcctgctggcccagctgaagcccgagaaggatagcgacgaagccgtgacatatagcctgggaaagtttgggcagagggccctggatttctacagcattcatgtgaccaaggagtccacccaccccgtgaagcccctggcccagatcgccggaaacagatacgcctccggacctgtgggaaaggccctgagcgacgcatgtatgggcacaatcgcctccttcctgtctaagtaccaggacatcatcatcgaacaccagaaggtggtgaagggcaaccagaagagactggagagcctgcgggagctggccggcaaggaaaacctggaataccctagcgtgaccctgccacctcagcctcacaccaaggagggcgttgatgcctacaacgaagtgatcgcccgggtgcgaatgtgggtgaacctgaacctgtggcagaagctgaagctaagcagagatgatgccaagcctctgctgagactgaagggattcccttcctttcctctggtcgagagacaggccaacgaagtggactggtgggacatggtgtgtaacgtgaagaagctgatcaacgagaaaaaggaggatggcaaggtgttttggcagaatctggctggctacaagagacaggaagccctgagaccatacctgagcagcgaggaagatcggaagaagggaaagaaattcgctcggtaccagctgggcgacctgctgctgcacctggaaaagaagcacggcgaggactggggaaaggtgtacgacgaggcctgggagcggattgacaagaaagtggaaggcctgagcaagcacatcaagctggaagaggaacggagaagcgaggacgcccagagcaaggccgccctgaccgactggctgcgggctaaggccagcttcgtgatcgagggcctgaaggaggccgacaaggacgagttctgcagatgcgagctgaagctgcagaagtggtacggggacctgcggggaaagcccttcgccatcgaagccgagaacagcatcctggacatcagcggcttcagcaagcagtacaactgtgccttcatctggcagaaggacggcgtgaagaagctgaacctgtacctgatcatcaactacttcaagggcggcaagctgcggttcaagaagatcaaacctgaagccttcgaagccaacagattctacaccgtgatcaacaaaaagagcggcgagatcgtgcccatggaggtgaacttcaacttcgacgaccccaacctgatcatcctgcctctggcctttggcaagagacagggcagagaattcatctggaacgacctgctgtccctggaaaccggcagcctgaagctggccaacggaagagtgatcgagaagacactgtacaacagaagaacccggcaggatgagcctgccctgttcgtggccctgaccttcgagcggcgggaggtcctggactcctccaatatcaaaccaatgaacctgatcggcgtggcaagaggcgaaaacatccccgccgtgatcgccctgaccgaccccgagggctgcccactgagccggtttaaggatagcctgggaaacccaacccacatcctgagaatcggcgagagctataaggagaagcagcggaccatccaggccaagaaggaggtggagcagcggagagccggcggctacagccggaagtacgccagcaaagccaagaatctggcagacgatatggtgagaaacaccgctagagatctgctgtactacgccgtgacccaggatgccatgctgatcttcgccaacctgagccggggcttcggccggcagggcaagcggaccttcatggccgagagacagtacacacggatggaggactggctgaccgccaagctggcctacgagggcctgagcaagacctacctgtccaagacactggcccagtacacctccaagacatgcagcaactgtgggtttaccatcaccagcgccgactacgacagggtgctggagaagctgaagaagacagcaacaggctggatgaccacaattaacggcaaggagctgaaggtggagggccagattacctactacaacagatacaagagacagaacgtagtcaaggacctgtccgtcgagctggatagactgagcgaagaatctgtgaacaacgacatctcctcctggacaaagggcagaagcggagaagctctgagcctcctgaagaaaagattctcccatagacccgtgcaggagaagttcgtgtgcctgaactgcggcttcgagacacacgcagccgagcaagccgccctgaacatcgccagatcctggctgttcctgcggagccaggagtacaagaaataccagacaaacaagacaaccggcaacaccgataagagagccttcgtcgagacctggcagtccttttaccggaagaagcttaaggaggtgtggaaacctgccgtgcggtctggcggatctggcggaggctccacaagcatggcccacaggagcgtgatgttcagcgacatcagcatcgacttcagccccgaggagtgggagtacctggacctggagcagaaggacctgtacagggacgtgatgctggagaactacagcaacctggtgagcctgggctgcttcatcagcaagcccgacgtgatcagcctgctggagcagggcaaggagccctggaaggtggtgaggaagaggaggaggcagtaccccgacctggagaccaagaccagccccaagaaaaagagaaaagtctaagctgccttctgcggggcttgccttctggccatgcccttcttctctcccttgcacctgtacctcttggtctttgaataaagcctgagtaggaaggctagcaaaaaaaaaaaaaaaaaaaaaaaaaaaaaaaaaaaaaaaaaaaaaaaaaaaaaaaaaaaaaaaaaaaaaaaaaaaaaaaa

SEQ ID NO: 2575 - RNA, 5419 nt, synthetic construct
  source 1..5419: mol_type = other RNA
aggaaataagagagaaaagaagagtaagaagaaatataagagccaccatggcccctaagaagaagcgtaaagtgagccgggtgaacggcagcggcagcggcggcggcatgaaccacgaccaggagttcgacccccctaaggtgtaccctcccgtccccgccgagaagagaaagcccatccgggtcctgagcctgttcgatggcatcgccaccggtctgctggtgctgaaggacctgggcatccaggtggataggtacattgcctccgaggtgtgcgaggactccatcaccgtgggaatggtgcgtcatcagggcaagatcatgtacgtgggcgacgtgcggagcgtgacacagaagcatatccaggagtggggccctttcgacctggtgatcggcggcagcccttgcaatgacctgagcatcgtgaacccagcccggaagggcctgtacgagggaaccggcagactgttcttcgagttttacagactgctgcacgacgcccggcctaaggaaggcgacgaccggcccttcttttggctgttcgagaatgtggtggccatgggagtcagcgacaagcgggatattagccggttcctggagagcaaccccgtgatgatcgatgccaaggaagtgagcgccgcccaccgggccagatacttctggggcaatctgcctggcatgaacagacccctggccagcaccgtgaacgacaagctggagctgcaggagtgcctggagcacggccggatcgccaagttcagcaaggtgagaaccatcaccacccgaagcaacagcatcaaacaaggcaaggaccagcactttcctgtgttcatgaacgagaaggaggacatcctgtggtgtaccgagatggagagagtgttcgggttcccagtccactacacagatgtcagcaacatgtctagactggccagacagagactgctgggaagaagctggtccgtccctgtgatcagacacctgttcgcccctctgaaggagtacttcgcctgcgtgagcagcggcaacagcaacgccaacagccggggccccagcttctctagcggcctggtgccactgtccctgagagggagccacatgggccccatggagatctacaaaaccgtgagcgcctggaagcggcagcctgtgcgcgtgctgagcctgtttcggaatatcgataaagtcctgaaaagcctgggattcctggagagcggctctggctccggcggtggcaccctgaagtacgtggaggatgtgacaaacgtggtcagacgggatgtggagaagtggggccccttcgatctggtgtacggcagcacccaacccctgggcagctcttgtgaccggtgccctggctggtacatgtttcagttccaccggatcctgcagtacgccctgccgagacaggagtcccagcggccattcttttggattttcatggacaacttgctgctgaccgaggatgaccaggaaactaccactcggttcctgcagaccgaagccgtgaccctgcaggacgtgagaggccgggactaccagaacgccatgcgggtgtggtccaacatccctggactgaaaagcaagcacgcacctctgacccctaaagaagaggagtacctgcaggcccaggtgcggagcagaagcaagctggacgcccctaaggtggatctgctggtgaagaattgcctcctgcccctgagagagtacttcaagtatttcagccagaatagtctgcccctgggcggcccaagcagcggcgcccctcctcccagcggcggcagcccagccggctccccaacctctaccgaggagggcacctctgagtccgccacccccgagagcggccctggcacctccaccgagcccagcgagggcagcgcacccggcagccctgccggcagccccacctccacagaggagggaaccagcaccgagcccagcgaaggcagcgccccaggcaccagcaccgagcctagtgagggcggctctggcggcggcagcgcccaggagattaaacggatcaacaagatcagaagaagacttgtgaaagacagcaacaccaagaaggccggcaagacaggccccatgaaaaccctgctggttagagtgatgacacccgatctgagagagcggctggaaaacctgagaaagaagcctgaaaatatcccccagcccatcagcaatacatctagagccaacctgaataagctgctgaccgattacaccgaaatgaagaaggcgatcctgcatgtgtactgggaagagttccagaaggaccctgtgggcctgatgagccgggtggcccagcctgccagcaagaagatcgatcagaacaagctgaaacctgagatggacgagaagggcaacctgaccaccgccggctttgcctgctctcagtgtggccagcccctgttcgtgtacaagctggagcaggtgtctgagaagggcaaggcttacaccaactacttcggacggtgcaatgtggccgagcacgaaaagctgatcctgctggcccagctgaagcccgagaaggatagcgacgaagccgtgacatatagcctgggaaagtttgggcagagggccctggatttctacagcattcatgtgaccaaggagtccacccaccccgtgaagcccctggcccagatcgccggaaacagatacgcctccggacctgtgggaaaggccctgagcgacgcatgtatgggcacaatcgcctccttcctgtctaagtaccaggacatcatcatcgaacaccagaaggtggtgaagggcaaccagaagagactggagagcctgcgggagctggccggcaaggaaaacctggaataccctagcgtgaccctgccacctcagcctcacaccaaggagggcgttgatgcctacaacgaagtgatcgcccgggtgcgaatgtgggtgaacctgaacctgtggcagaagctgaagctaagcagagatgatgccaagcctctgctgagactgaagggattcccttcctttcctctggtcgagagacaggccaacgaagtggactggtgggacatggtgtgtaacgtgaagaagctgatcaacgagaaaaaggaggatggcaaggtgttttggcagaatctggctggctacaagagacaggaagccctgagaccatacctgagcagcgaggaagatcggaagaagggaaagaaattcgctcggtaccagctgggcgacctgctgctgcacctggaaaagaagcacggcgaggactggggaaaggtgtacgacgaggcctgggagcggattgacaagaaagtggaaggcctgagcaagcacatcaagctggaagaggaacggagaagcgaggacgcccagagcaaggccgccctgaccgactggctgcgggctaaggccagcttcgtgatcgagggcctgaaggaggccgacaaggacgagttctgcagatgcgagctgaagctgcagaagtggtacggggacctgcggggaaagcccttcgccatcgaagccgagaacagcatcctggacatcagcggcttcagcaagcagtacaactgtgccttcatctggcagaaggacggcgtgaagaagctgaacctgtacctgatcatcaactacttcaagggcggcaagctgcggttcaagaagatcaaacctgaagccttcgaagccaacagattctacaccgtgatcaacaaaaagagcggcgagatcgtgcccatggaggtgaacttcaacttcgacgaccccaacctgatcatcctgcctctggcctttggcaagagacagggcagagaattcatctggaacgacctgctgtccctggaaaccggcagcctgaagctggccaacggaagagtgatcgagaagacactgtacaacagaagaacccggcaggatgagcctgccctgttcgtggccctgaccttcgagcggcgggaggtcctggactcctccaatatcaaaccaatgaacctgatcggcgtggcaagaggcgaaaacatccccgccgtgatcgccctgaccgaccccgagggctgcccactgagccggtttaaggatagcctgggaaacccaacccacatcctgagaatcggcgagagctataaggagaagcagcggaccatccaggccaagaaggaggtggagcagcggagagccggcggctacagccggaagtacgccagcaaagccaagaatctggcagacgatatggtgagaaacaccgctagagatctgctgtactacgccgtgacccaggatgccatgctgatcttcgccaacctgagccggggcttcggccggcagggcaagcggaccttcatggccgagagacagtacacacggatggaggactggctgaccgccaagctggcctacgagggcctgagcaagacctacctgtccaagacactggcccagtacacctccaagacatgcagcaactgtgggtttaccatcaccagcgccgactacgacagggtgctggagaagctgaagaagacagcaacaggctggatgaccacaattaacggcaaggagctgaaggtggagggccagattacctactacaacagatacaagagacagaacgtagtcaaggacctgtccgtcgagctggatagactgagcgaagaatctgtgaacaacgacatctcctcctggacaaagggcagaagcggagaagctctgagcctcctgaagaaaagattctcccatagacccgtgcaggagaagttcgtgtgcctgaactgcggcttcgagacacacgcagccgagcaagccgccctgaacatcgccagatcctggctgttcctgcggagccaggagtacaagaaataccagacaaacaagacaaccggcaacaccgataagagagccttcgtcgagacctggcagtccttttaccggaagaagcttaaggaggtgtggaaacctgccgtgcggtctggcggatctggcggaggctccacaagcagcaggagccccctgaccttcggcgacgtggccgtggagttcagcggcgaggagtgggccaggctggacagcgcccagaggagcctgcacaggagcgtgatgctggagaactacaggaacctggccagcctgggcctgtgcatgagcaagcccgagatgatcagcagcctggagcagaggaaggagccctgggccgtgaagaggaagagcaccaggggcaggtgccccgacagccagaccgccaccagccccaagaaaaagagaaaagtctaagctgccttctgcggggcttgccttctggccatgcccttcttctctcccttgcacctgtacctcttggtctttgaataaagcctgagtaggaaggctagcaaaaaaaaaaaaaaaaaaaaaaaaaaaaaaaaaaaaaaaaaaaaaaaaaaaaaaaaaaaaaaaaaaaaaaaaaaaaaaaa

SEQ ID NO: 2576 - RNA, 5428 nt, synthetic construct
  source 1..5428: mol_type = other RNA
aggaaataagagagaaaagaagagtaagaagaaatataagagccaccatggcccctaagaagaagcgtaaagtgagccgggtgaacggcagcggcagcggcggcggcatgaaccacgaccaggagttcgacccccctaaggtgtaccctcccgtccccgccgagaagagaaagcccatccgggtcctgagcctgttcgatggcatcgccaccggtctgctggtgctgaaggacctgggcatccaggtggataggtacattgcctccgaggtgtgcgaggactccatcaccgtgggaatggtgcgtcatcagggcaagatcatgtacgtgggcgacgtgcggagcgtgacacagaagcatatccaggagtggggccctttcgacctggtgatcggcggcagcccttgcaatgacctgagcatcgtgaacccagcccggaagggcctgtacgagggaaccggcagactgttcttcgagttttacagactgctgcacgacgcccggcctaaggaaggcgacgaccggcccttcttttggctgttcgagaatgtggtggccatgggagtcagcgacaagcgggatattagccggttcctggagagcaaccccgtgatgatcgatgccaaggaagtgagcgccgcccaccgggccagatacttctggggcaatctgcctggcatgaacagacccctggccagcaccgtgaacgacaagctggagctgcaggagtgcctggagcacggccggatcgccaagttcagcaaggtgagaaccatcaccacccgaagcaacagcatcaaacaaggcaaggaccagcactttcctgtgttcatgaacgagaaggaggacatcctgtggtgtaccgagatggagagagtgttcgggttcccagtccactacacagatgtcagcaacatgtctagactggccagacagagactgctgggaagaagctggtccgtccctgtgatcagacacctgttcgcccctctgaaggagtacttcgcctgcgtgagcagcggcaacagcaacgccaacagccggggccccagcttctctagcggcctggtgccactgtccctgagagggagccacatgggccccatggagatctacaaaaccgtgagcgcctggaagcggcagcctgtgcgcgtgctgagcctgtttcggaatatcgataaagtcctgaaaagcctgggattcctggagagcggctctggctccggcggtggcaccctgaagtacgtggaggatgtgacaaacgtggtcagacgggatgtggagaagtggggccccttcgatctggtgtacggcagcacccaacccctgggcagctcttgtgaccggtgccctggctggtacatgtttcagttccaccggatcctgcagtacgccctgccgagacaggagtcccagcggccattcttttggattttcatggacaacttgctgctgaccgaggatgaccaggaaactaccactcggttcctgcagaccgaagccgtgaccctgcaggacgtgagaggccgggactaccagaacgccatgcgggtgtggtccaacatccctggactgaaaagcaagcacgcacctctgacccctaaagaagaggagtacctgcaggcccaggtgcggagcagaagcaagctggacgcccctaaggtggatctgctggtgaagaattgcctcctgcccctgagagagtacttcaagtatttcagccagaatagtctgcccctgggcggcccaagcagcggcgcccctcctcccagcggcggcagcccagccggctccccaacctctaccgaggagggcacctctgagtccgccacccccgagagcggccctggcacctccaccgagcccagcgagggcagcgcacccggcagccctgccggcagccccacctccacagaggagggaaccagcaccgagcccagcgaaggcagcgccccaggcaccagcaccgagcctagtgagggcggctctggcggcggcagcgcccaggagattaaacggatcaacaagatcagaagaagacttgtgaaagacagcaacaccaagaaggccggcaagacaggccccatgaaaaccctgctggttagagtgatgacacccgatctgagagagcggctggaaaacctgagaaagaagcctgaaaatatcccccagcccatcagcaatacatctagagccaacctgaataagctgctgaccgattacaccgaaatgaagaaggcgatcctgcatgtgtactgggaagagttccagaaggaccctgtgggcctgatgagccgggtggcccagcctgccagcaagaagatcgatcagaacaagctgaaacctgagatggacgagaagggcaacctgaccaccgccggctttgcctgctctcagtgtggccagcccctgttcgtgtacaagctggagcaggtgtctgagaagggcaaggcttacaccaactacttcggacggtgcaatgtggccgagcacgaaaagctgatcctgctggcccagctgaagcccgagaaggatagcgacgaagccgtgacatatagcctgggaaagtttgggcagagggccctggatttctacagcattcatgtgaccaaggagtccacccaccccgtgaagcccctggcccagatcgccggaaacagatacgcctccggacctgtgggaaaggccctgagcgacgcatgtatgggcacaatcgcctccttcctgtctaagtaccaggacatcatcatcgaacaccagaaggtggtgaagggcaaccagaagagactggagagcctgcgggagctggccggcaaggaaaacctggaataccctagcgtgaccctgccacctcagcctcacaccaaggagggcgttgatgcctacaacgaagtgatcgcccgggtgcgaatgtgggtgaacctgaacctgtggcagaagctgaagctaagcagagatgatgccaagcctctgctgagactgaagggattcccttcctttcctctggtcgagagacaggccaacgaagtggactggtgggacatggtgtgtaacgtgaagaagctgatcaacgagaaaaaggaggatggcaaggtgttttggcagaatctggctggctacaagagacaggaagccctgagaccatacctgagcagcgaggaagatcggaagaagggaaagaaattcgctcggtaccagctgggcgacctgctgctgcacctggaaaagaagcacggcgaggactggggaaaggtgtacgacgaggcctgggagcggattgacaagaaagtggaaggcctgagcaagcacatcaagctggaagaggaacggagaagcgaggacgcccagagcaaggccgccctgaccgactggctgcgggctaaggccagcttcgtgatcgagggcctgaaggaggccgacaaggacgagttctgcagatgcgagctgaagctgcagaagtggtacggggacctgcggggaaagcccttcgccatcgaagccgagaacagcatcctggacatcagcggcttcagcaagcagtacaactgtgccttcatctggcagaaggacggcgtgaagaagctgaacctgtacctgatcatcaactacttcaagggcggcaagctgcggttcaagaagatcaaacctgaagccttcgaagccaacagattctacaccgtgatcaacaaaaagagcggcgagatcgtgcccatggaggtgaacttcaacttcgacgaccccaacctgatcatcctgcctctggcctttggcaagagacagggcagagaattcatctggaacgacctgctgtccctggaaaccggcagcctgaagctggccaacggaagagtgatcgagaagacactgtacaacagaagaacccggcaggatgagcctgccctgttcgtggccctgaccttcgagcggcgggaggtcctggactcctccaatatcaaaccaatgaacctgatcggcgtggcaagaggcgaaaacatccccgccgtgatcgccctgaccgaccccgagggctgcccactgagccggtttaaggatagcctgggaaacccaacccacatcctgagaatcggcgagagctataaggagaagcagcggaccatccaggccaagaaggaggtggagcagcggagagccggcggctacagccggaagtacgccagcaaagccaagaatctggcagacgatatggtgagaaacaccgctagagatctgctgtactacgccgtgacccaggatgccatgctgatcttcgccaacctgagccggggcttcggccggcagggcaagcggaccttcatggccgagagacagtacacacggatggaggactggctgaccgccaagctggcctacgagggcctgagcaagacctacctgtccaagacactggcccagtacacctccaagacatgcagcaactgtgggtttaccatcaccagcgccgactacgacagggtgctggagaagctgaagaagacagcaacaggctggatgaccacaattaacggcaaggagctgaaggtggagggccagattacctactacaacagatacaagagacagaacgtagtcaaggacctgtccgtcgagctggatagactgagcgaagaatctgtgaacaacgacatctcctcctggacaaagggcagaagcggagaagctctgagcctcctgaagaaaagattctcccatagacccgtgcaggagaagttcgtgtgcctgaactgcggcttcgagacacacgcagccgagcaagccgccctgaacatcgccagatcctggctgttcctgcggagccaggagtacaagaaataccagacaaacaagacaaccggcaacaccgataagagagccttcgtcgagacctggcagtccttttaccggaagaagcttaaggaggtgtggaaacctgccgtgcggtctggcggatctggcggaggctccacaagcgtgacctacaacgacgtgcacgtggacatcacccaggaggagtgggccctgatggaccccagccagaggaacctgtacaaggacgtgatggtggagacctacatgaacctgaccgccatcggctacaactgggagaacctggaggtggaggagccctgccagaaccccctgaagcacggcaggcacgagaggccccacaccggcgagaagccctacgagtacaaccagtgcggcaaggccttcgcccagcccaccagccccaagaaaaagagaaaagtctaagctgccttctgcggggcttgccttctggccatgcccttcttctctcccttgcacctgtacctcttggtctttgaataaagcctgagtaggaaggctagcaaaaaaaaaaaaaaaaaaaaaaaaaaaaaaaaaaaaaaaaaaaaaaaaaaaaaaaaaaaaaaaaaaaaaaaaaaaaaaaa

SEQ ID NO: 2577 - RNA, 5419 nt, synthetic construct
  source 1..5419: mol_type = other RNA
aggaaataagagagaaaagaagagtaagaagaaatataagagccaccatggcccctaagaagaagcgtaaagtgagccgggtgaacggcagcggcagcggcggcggcatgaaccacgaccaggagttcgacccccctaaggtgtaccctcccgtccccgccgagaagagaaagcccatccgggtcctgagcctgttcgatggcatcgccaccggtctgctggtgctgaaggacctgggcatccaggtggataggtacattgcctccgaggtgtgcgaggactccatcaccgtgggaatggtgcgtcatcagggcaagatcatgtacgtgggcgacgtgcggagcgtgacacagaagcatatccaggagtggggccctttcgacctggtgatcggcggcagcccttgcaatgacctgagcatcgtgaacccagcccggaagggcctgtacgagggaaccggcagactgttcttcgagttttacagactgctgcacgacgcccggcctaaggaaggcgacgaccggcccttcttttggctgttcgagaatgtggtggccatgggagtcagcgacaagcgggatattagccggttcctggagagcaaccccgtgatgatcgatgccaaggaagtgagcgccgcccaccgggccagatacttctggggcaatctgcctggcatgaacagacccctggccagcaccgtgaacgacaagctggagctgcaggagtgcctggagcacggccggatcgccaagttcagcaaggtgagaaccatcaccacccgaagcaacagcatcaaacaaggcaaggaccagcactttcctgtgttcatgaacgagaaggaggacatcctgtggtgtaccgagatggagagagtgttcgggttcccagtccactacacagatgtcagcaacatgtctagactggccagacagagactgctgggaagaagctggtccgtccctgtgatcagacacctgttcgcccctctgaaggagtacttcgcctgcgtgagcagcggcaacagcaacgccaacagccggggccccagcttctctagcggcctggtgccactgtccctgagagggagccacatgggccccatggagatctacaaaaccgtgagcgcctggaagcggcagcctgtgcgcgtgctgagcctgtttcggaatatcgataaagtcctgaaaagcctgggattcctggagagcggctctggctccggcggtggcaccctgaagtacgtggaggatgtgacaaacgtggtcagacgggatgtggagaagtggggccccttcgatctggtgtacggcagcacccaacccctgggcagctcttgtgaccggtgccctggctggtacatgtttcagttccaccggatcctgcagtacgccctgccgagacaggagtcccagcggccattcttttggattttcatggacaacttgctgctgaccgaggatgaccaggaaactaccactcggttcctgcagaccgaagccgtgaccctgcaggacgtgagaggccgggactaccagaacgccatgcgggtgtggtccaacatccctggactgaaaagcaagcacgcacctctgacccctaaagaagaggagtacctgcaggcccaggtgcggagcagaagcaagctggacgcccctaaggtggatctgctggtgaagaattgcctcctgcccctgagagagtacttcaagtatttcagccagaatagtctgcccctgggcggcccaagcagcggcgcccctcctcccagcggcggcagcccagccggctccccaacctctaccgaggagggcacctctgagtccgccacccccgagagcggccctggcacctccaccgagcccagcgagggcagcgcacccggcagccctgccggcagccccacctccacagaggagggaaccagcaccgagcccagcgaaggcagcgccccaggcaccagcaccgagcctagtgagggcggctctggcggcggcagcgcccaggagattaaacggatcaacaagatcagaagaagacttgtgaaagacagcaacaccaagaaggccggcaagacaggccccatgaaaaccctgctggttagagtgatgacacccgatctgagagagcggctggaaaacctgagaaagaagcctgaaaatatcccccagcccatcagcaatacatctagagccaacctgaataagctgctgaccgattacaccgaaatgaagaaggcgatcctgcatgtgtactgggaagagttccagaaggaccctgtgggcctgatgagccgggtggcccagcctgccagcaagaagatcgatcagaacaagctgaaacctgagatggacgagaagggcaacctgaccaccgccggctttgcctgctctcagtgtggccagcccctgttcgtgtacaagctggagcaggtgtctgagaagggcaaggcttacaccaactacttcggacggtgcaatgtggccgagcacgaaaagctgatcctgctggcccagctgaagcccgagaaggatagcgacgaagccgtgacatatagcctgggaaagtttgggcagagggccctggatttctacagcattcatgtgaccaaggagtccacccaccccgtgaagcccctggcccagatcgccggaaacagatacgcctccggacctgtgggaaaggccctgagcgacgcatgtatgggcacaatcgcctccttcctgtctaagtaccaggacatcatcatcgaacaccagaaggtggtgaagggcaaccagaagagactggagagcctgcgggagctggccggcaaggaaaacctggaataccctagcgtgaccctgccacctcagcctcacaccaaggagggcgttgatgcctacaacgaagtgatcgcccgggtgcgaatgtgggtgaacctgaacctgtggcagaagctgaagctaagcagagatgatgccaagcctctgctgagactgaagggattcccttcctttcctctggtcgagagacaggccaacgaagtggactggtgggacatggtgtgtaacgtgaagaagctgatcaacgagaaaaaggaggatggcaaggtgttttggcagaatctggctggctacaagagacaggaagccctgagaccatacctgagcagcgaggaagatcggaagaagggaaagaaattcgctcggtaccagctgggcgacctgctgctgcacctggaaaagaagcacggcgaggactggggaaaggtgtacgacgaggcctgggagcggattgacaagaaagtggaaggcctgagcaagcacatcaagctggaagaggaacggagaagcgaggacgcccagagcaaggccgccctgaccgactggctgcgggctaaggccagcttcgtgatcgagggcctgaaggaggccgacaaggacgagttctgcagatgcgagctgaagctgcagaagtggtacggggacctgcggggaaagcccttcgccatcgaagccgagaacagcatcctggacatcagcggcttcagcaagcagtacaactgtgccttcatctggcagaaggacggcgtgaagaagctgaacctgtacctgatcatcaactacttcaagggcggcaagctgcggttcaagaagatcaaacctgaagccttcgaagccaacagattctacaccgtgatcaacaaaaagagcggcgagatcgtgcccatggaggtgaacttcaacttcgacgaccccaacctgatcatcctgcctctggcctttggcaagagacagggcagagaattcatctggaacgacctgctgtccctggaaaccggcagcctgaagctggccaacggaagagtgatcgagaagacactgtacaacagaagaacccggcaggatgagcctgccctgttcgtggccctgaccttcgagcggcgggaggtcctggactcctccaatatcaaaccaatgaacctgatcggcgtggcaagaggcgaaaacatccccgccgtgatcgccctgaccgaccccgagggctgcccactgagccggtttaaggatagcctgggaaacccaacccacatcctgagaatcggcgagagctataaggagaagcagcggaccatccaggccaagaaggaggtggagcagcggagagccggcggctacagccggaagtacgccagcaaagccaagaatctggcagacgatatggtgagaaacaccgctagagatctgctgtactacgccgtgacccaggatgccatgctgatcttcgccaacctgagccggggcttcggccggcagggcaagcggaccttcatggccgagagacagtacacacggatggaggactggctgaccgccaagctggcctacgagggcctgagcaagacctacctgtccaagacactggcccagtacacctccaagacatgcagcaactgtgggtttaccatcaccagcgccgactacgacagggtgctggagaagctgaagaagacagcaacaggctggatgaccacaattaacggcaaggagctgaaggtggagggccagattacctactacaacagatacaagagacagaacgtagtcaaggacctgtccgtcgagctggatagactgagcgaagaatctgtgaacaacgacatctcctcctggacaaagggcagaagcggagaagctctgagcctcctgaagaaaagattctcccatagacccgtgcaggagaagttcgtgtgcctgaactgcggcttcgagacacacgcagccgagcaagccgccctgaacatcgccagatcctggctgttcctgcggagccaggagtacaagaaataccagacaaacaagacaaccggcaacaccgataagagagccttcgtcgagacctggcagtccttttaccggaagaagcttaaggaggtgtggaaacctgccgtgcggtctggcggatctggcggaggctccacaagcagcaaggcccccgtgaccttcggcgacctggccatctacttcagccaggaggagtgggagtggctgagccccatccagaaggacctgtacgaggacgtgatgctggagaactaccagaacctggtgagcctgggcctgtgcttcaggaggcccaacgtgatcaccctgctggagaagggcaaggccccctggatggtggaccccgtgaagaggaggaggggcctggacctgggcagcaagggcaccagccccaagaaaaagagaaaagtctaagctgccttctgcggggcttgccttctggccatgcccttcttctctcccttgcacctgtacctcttggtctttgaataaagcctgagtaggaaggctagcaaaaaaaaaaaaaaaaaaaaaaaaaaaaaaaaaaaaaaaaaaaaaaaaaaaaaaaaaaaaaaaaaaaaaaaaaaaaaaaa

SEQ ID NO: 2578 - RNA, 5419 nt, synthetic construct
  source 1..5419: mol_type = other RNA
aggaaataagagagaaaagaagagtaagaagaaatataagagccaccatggcccctaagaagaagcgtaaagtgagccgggtgaacggcagcggcagcggcggcggcatgaaccacgaccaggagttcgacccccctaaggtgtaccctcccgtccccgccgagaagagaaagcccatccgggtcctgagcctgttcgatggcatcgccaccggtctgctggtgctgaaggacctgggcatccaggtggataggtacattgcctccgaggtgtgcgaggactccatcaccgtgggaatggtgcgtcatcagggcaagatcatgtacgtgggcgacgtgcggagcgtgacacagaagcatatccaggagtggggccctttcgacctggtgatcggcggcagcccttgcaatgacctgagcatcgtgaacccagcccggaagggcctgtacgagggaaccggcagactgttcttcgagttttacagactgctgcacgacgcccggcctaaggaaggcgacgaccggcccttcttttggctgttcgagaatgtggtggccatgggagtcagcgacaagcgggatattagccggttcctggagagcaaccccgtgatgatcgatgccaaggaagtgagcgccgcccaccgggccagatacttctggggcaatctgcctggcatgaacagacccctggccagcaccgtgaacgacaagctggagctgcaggagtgcctggagcacggccggatcgccaagttcagcaaggtgagaaccatcaccacccgaagcaacagcatcaaacaaggcaaggaccagcactttcctgtgttcatgaacgagaaggaggacatcctgtggtgtaccgagatggagagagtgttcgggttcccagtccactacacagatgtcagcaacatgtctagactggccagacagagactgctgggaagaagctggtccgtccctgtgatcagacacctgttcgcccctctgaaggagtacttcgcctgcgtgagcagcggcaacagcaacgccaacagccggggccccagcttctctagcggcctggtgccactgtccctgagagggagccacatgggccccatggagatctacaaaaccgtgagcgcctggaagcggcagcctgtgcgcgtgctgagcctgtttcggaatatcgataaagtcctgaaaagcctgggattcctggagagcggctctggctccggcggtggcaccctgaagtacgtggaggatgtgacaaacgtggtcagacgggatgtggagaagtggggccccttcgatctggtgtacggcagcacccaacccctgggcagctcttgtgaccggtgccctggctggtacatgtttcagttccaccggatcctgcagtacgccctgccgagacaggagtcccagcggccattcttttggattttcatggacaacttgctgctgaccgaggatgaccaggaaactaccactcggttcctgcagaccgaagccgtgaccctgcaggacgtgagaggccgggactaccagaacgccatgcgggtgtggtccaacatccctggactgaaaagcaagcacgcacctctgacccctaaagaagaggagtacctgcaggcccaggtgcggagcagaagcaagctggacgcccctaaggtggatctgctggtgaagaattgcctcctgcccctgagagagtacttcaagtatttcagccagaatagtctgcccctgggcggcccaagcagcggcgcccctcctcccagcggcggcagcccagccggctccccaacctctaccgaggagggcacctctgagtccgccacccccgagagcggccctggcacctccaccgagcccagcgagggcagcgcacccggcagccctgccggcagccccacctccacagaggagggaaccagcaccgagcccagcgaaggcagcgccccaggcaccagcaccgagcctagtgagggcggctctggcggcggcagcgcccaggagattaaacggatcaacaagatcagaagaagacttgtgaaagacagcaacaccaagaaggccggcaagacaggccccatgaaaaccctgctggttagagtgatgacacccgatctgagagagcggctggaaaacctgagaaagaagcctgaaaatatcccccagcccatcagcaatacatctagagccaacctgaataagctgctgaccgattacaccgaaatgaagaaggcgatcctgcatgtgtactgggaagagttccagaaggaccctgtgggcctgatgagccgggtggcccagcctgccagcaagaagatcgatcagaacaagctgaaacctgagatggacgagaagggcaacctgaccaccgccggctttgcctgctctcagtgtggccagcccctgttcgtgtacaagctggagcaggtgtctgagaagggcaaggcttacaccaactacttcggacggtgcaatgtggccgagcacgaaaagctgatcctgctggcccagctgaagcccgagaaggatagcgacgaagccgtgacatatagcctgggaaagtttgggcagagggccctggatttctacagcattcatgtgaccaaggagtccacccaccccgtgaagcccctggcccagatcgccggaaacagatacgcctccggacctgtgggaaaggccctgagcgacgcatgtatgggcacaatcgcctccttcctgtctaagtaccaggacatcatcatcgaacaccagaaggtggtgaagggcaaccagaagagactggagagcctgcgggagctggccggcaaggaaaacctggaataccctagcgtgaccctgccacctcagcctcacaccaaggagggcgttgatgcctacaacgaagtgatcgcccgggtgcgaatgtgggtgaacctgaacctgtggcagaagctgaagctaagcagagatgatgccaagcctctgctgagactgaagggattcccttcctttcctctggtcgagagacaggccaacgaagtggactggtgggacatggtgtgtaacgtgaagaagctgatcaacgagaaaaaggaggatggcaaggtgttttggcagaatctggctggctacaagagacaggaagccctgagaccatacctgagcagcgaggaagatcggaagaagggaaagaaattcgctcggtaccagctgggcgacctgctgctgcacctggaaaagaagcacggcgaggactggggaaaggtgtacgacgaggcctgggagcggattgacaagaaagtggaaggcctgagcaagcacatcaagctggaagaggaacggagaagcgaggacgcccagagcaaggccgccctgaccgactggctgcgggctaaggccagcttcgtgatcgagggcctgaaggaggccgacaaggacgagttctgcagatgcgagctgaagctgcagaagtggtacggggacctgcggggaaagcccttcgccatcgaagccgagaacagcatcctggacatcagcggcttcagcaagcagtacaactgtgccttcatctggcagaaggacggcgtgaagaagctgaacctgtacctgatcatcaactacttcaagggcggcaagctgcggttcaagaagatcaaacctgaagccttcgaagccaacagattctacaccgtgatcaacaaaaagagcggcgagatcgtgcccatggaggtgaacttcaacttcgacgaccccaacctgatcatcctgcctctggcctttggcaagagacagggcagagaattcatctggaacgacctgctgtccctggaaaccggcagcctgaagctggccaacggaagagtgatcgagaagacactgtacaacagaagaacccggcaggatgagcctgccctgttcgtggccctgaccttcgagcggcgggaggtcctggactcctccaatatcaaaccaatgaacctgatcggcgtggcaagaggcgaaaacatccccgccgtgatcgccctgaccgaccccgagggctgcccactgagccggtttaaggatagcctgggaaacccaacccacatcctgagaatcggcgagagctataaggagaagcagcggaccatccaggccaagaaggaggtggagcagcggagagccggcggctacagccggaagtacgccagcaaagccaagaatctggcagacgatatggtgagaaacaccgctagagatctgctgtactacgccgtgacccaggatgccatgctgatcttcgccaacctgagccggggcttcggccggcagggcaagcggaccttcatggccgagagacagtacacacggatggaggactggctgaccgccaagctggcctacgagggcctgagcaagacctacctgtccaagacactggcccagtacacctccaagacatgcagcaactgtgggtttaccatcaccagcgccgactacgacagggtgctggagaagctgaagaagacagcaacaggctggatgaccacaattaacggcaaggagctgaaggtggagggccagattacctactacaacagatacaagagacagaacgtagtcaaggacctgtccgtcgagctggatagactgagcgaagaatctgtgaacaacgacatctcctcctggacaaagggcagaagcggagaagctctgagcctcctgaagaaaagattctcccatagacccgtgcaggagaagttcgtgtgcctgaactgcggcttcgagacacacgcagccgagcaagccgccctgaacatcgccagatcctggctgttcctgcggagccaggagtacaagaaataccagacaaacaagacaaccggcaacaccgataagagagccttcgtcgagacctggcagtccttttaccggaagaagcttaaggaggtgtggaaacctgccgtgcggtctggcggatctggcggaggctccacaagcgcccaccacctggtgatgttcagggacgtggccgtggacttcagcaaggaggagtgggagtgcctgaacagctaccagaggaacctgtacagggacgtgatcctggagaactacagcaacctggtgagcgtggccggctgcagcatcagcaagcccgacgtgatcaccctgctggagcagggcaaggagccctggatggtggtgagggacgagaggaggaggaggagcctggacctggagagcaccagccccaagaaaaagagaaaagtctaagctgccttctgcggggcttgccttctggccatgcccttcttctctcccttgcacctgtacctcttggtctttgaataaagcctgagtaggaaggctagcaaaaaaaaaaaaaaaaaaaaaaaaaaaaaaaaaaaaaaaaaaaaaaaaaaaaaaaaaaaaaaaaaaaaaaaaaaaaaaaa

SEQ ID NO: 2579 - RNA, 5419 nt, synthetic construct
  source 1..5419: mol_type = other RNA
aggaaataagagagaaaagaagagtaagaagaaatataagagccaccatggcccctaagaagaagcgtaaagtgagccgggtgaacggcagcggcagcggcggcggcatgaaccacgaccaggagttcgacccccctaaggtgtaccctcccgtccccgccgagaagagaaagcccatccgggtcctgagcctgttcgatggcatcgccaccggtctgctggtgctgaaggacctgggcatccaggtggataggtacattgcctccgaggtgtgcgaggactccatcaccgtgggaatggtgcgtcatcagggcaagatcatgtacgtgggcgacgtgcggagcgtgacacagaagcatatccaggagtggggccctttcgacctggtgatcggcggcagcccttgcaatgacctgagcatcgtgaacccagcccggaagggcctgtacgagggaaccggcagactgttcttcgagttttacagactgctgcacgacgcccggcctaaggaaggcgacgaccggcccttcttttggctgttcgagaatgtggtggccatgggagtcagcgacaagcgggatattagccggttcctggagagcaaccccgtgatgatcgatgccaaggaagtgagcgccgcccaccgggccagatacttctggggcaatctgcctggcatgaacagacccctggccagcaccgtgaacgacaagctggagctgcaggagtgcctggagcacggccggatcgccaagttcagcaaggtgagaaccatcaccacccgaagcaacagcatcaaacaaggcaaggaccagcactttcctgtgttcatgaacgagaaggaggacatcctgtggtgtaccgagatggagagagtgttcgggttcccagtccactacacagatgtcagcaacatgtctagactggccagacagagactgctgggaagaagctggtccgtccctgtgatcagacacctgttcgcccctctgaaggagtacttcgcctgcgtgagcagcggcaacagcaacgccaacagccggggccccagcttctctagcggcctggtgccactgtccctgagagggagccacatgggccccatggagatctacaaaaccgtgagcgcctggaagcggcagcctgtgcgcgtgctgagcctgtttcggaatatcgataaagtcctgaaaagcctgggattcctggagagcggctctggctccggcggtggcaccctgaagtacgtggaggatgtgacaaacgtggtcagacgggatgtggagaagtggggccccttcgatctggtgtacggcagcacccaacccctgggcagctcttgtgaccggtgccctggctggtacatgtttcagttccaccggatcctgcagtacgccctgccgagacaggagtcccagcggccattcttttggattttcatggacaacttgctgctgaccgaggatgaccaggaaactaccactcggttcctgcagaccgaagccgtgaccctgcaggacgtgagaggccgggactaccagaacgccatgcgggtgtggtccaacatccctggactgaaaagcaagcacgcacctctgacccctaaagaagaggagtacctgcaggcccaggtgcggagcagaagcaagctggacgcccctaaggtggatctgctggtgaagaattgcctcctgcccctgagagagtacttcaagtatttcagccagaatagtctgcccctgggcggcccaagcagcggcgcccctcctcccagcggcggcagcccagccggctccccaacctctaccgaggagggcacctctgagtccgccacccccgagagcggccctggcacctccaccgagcccagcgagggcagcgcacccggcagccctgccggcagccccacctccacagaggagggaaccagcaccgagcccagcgaaggcagcgccccaggcaccagcaccgagcctagtgagggcggctctggcggcggcagcgcccaggagattaaacggatcaacaagatcagaagaagacttgtgaaagacagcaacaccaagaaggccggcaagacaggccccatgaaaaccctgctggttagagtgatgacacccgatctgagagagcggctggaaaacctgagaaagaagcctgaaaatatcccccagcccatcagcaatacatctagagccaacctgaataagctgctgaccgattacaccgaaatgaagaaggcgatcctgcatgtgtactgggaagagttccagaaggaccctgtgggcctgatgagccgggtggcccagcctgccagcaagaagatcgatcagaacaagctgaaacctgagatggacgagaagggcaacctgaccaccgccggctttgcctgctctcagtgtggccagcccctgttcgtgtacaagctggagcaggtgtctgagaagggcaaggcttacaccaactacttcggacggtgcaatgtggccgagcacgaaaagctgatcctgctggcccagctgaagcccgagaaggatagcgacgaagccgtgacatatagcctgggaaagtttgggcagagggccctggatttctacagcattcatgtgaccaaggagtccacccaccccgtgaagcccctggcccagatcgccggaaacagatacgcctccggacctgtgggaaaggccctgagcgacgcatgtatgggcacaatcgcctccttcctgtctaagtaccaggacatcatcatcgaacaccagaaggtggtgaagggcaaccagaagagactggagagcctgcgggagctggccggcaaggaaaacctggaataccctagcgtgaccctgccacctcagcctcacaccaaggagggcgttgatgcctacaacgaagtgatcgcccgggtgcgaatgtgggtgaacctgaacctgtggcagaagctgaagctaagcagagatgatgccaagcctctgctgagactgaagggattcccttcctttcctctggtcgagagacaggccaacgaagtggactggtgggacatggtgtgtaacgtgaagaagctgatcaacgagaaaaaggaggatggcaaggtgttttggcagaatctggctggctacaagagacaggaagccctgagaccatacctgagcagcgaggaagatcggaagaagggaaagaaattcgctcggtaccagctgggcgacctgctgctgcacctggaaaagaagcacggcgaggactggggaaaggtgtacgacgaggcctgggagcggattgacaagaaagtggaaggcctgagcaagcacatcaagctggaagaggaacggagaagcgaggacgcccagagcaaggccgccctgaccgactggctgcgggctaaggccagcttcgtgatcgagggcctgaaggaggccgacaaggacgagttctgcagatgcgagctgaagctgcagaagtggtacggggacctgcggggaaagcccttcgccatcgaagccgagaacagcatcctggacatcagcggcttcagcaagcagtacaactgtgccttcatctggcagaaggacggcgtgaagaagctgaacctgtacctgatcatcaactacttcaagggcggcaagctgcggttcaagaagatcaaacctgaagccttcgaagccaacagattctacaccgtgatcaacaaaaagagcggcgagatcgtgcccatggaggtgaacttcaacttcgacgaccccaacctgatcatcctgcctctggcctttggcaagagacagggcagagaattcatctggaacgacctgctgtccctggaaaccggcagcctgaagctggccaacggaagagtgatcgagaagacactgtacaacagaagaacccggcaggatgagcctgccctgttcgtggccctgaccttcgagcggcgggaggtcctggactcctccaatatcaaaccaatgaacctgatcggcgtggcaagaggcgaaaacatccccgccgtgatcgccctgaccgaccccgagggctgcccactgagccggtttaaggatagcctgggaaacccaacccacatcctgagaatcggcgagagctataaggagaagcagcggaccatccaggccaagaaggaggtggagcagcggagagccggcggctacagccggaagtacgccagcaaagccaagaatctggcagacgatatggtgagaaacaccgctagagatctgctgtactacgccgtgacccaggatgccatgctgatcttcgccaacctgagccggggcttcggccggcagggcaagcggaccttcatggccgagagacagtacacacggatggaggactggctgaccgccaagctggcctacgagggcctgagcaagacctacctgtccaagacactggcccagtacacctccaagacatgcagcaactgtgggtttaccatcaccagcgccgactacgacagggtgctggagaagctgaagaagacagcaacaggctggatgaccacaattaacggcaaggagctgaaggtggagggccagattacctactacaacagatacaagagacagaacgtagtcaaggacctgtccgtcgagctggatagactgagcgaagaatctgtgaacaacgacatctcctcctggacaaagggcagaagcggagaagctctgagcctcctgaagaaaagattctcccatagacccgtgcaggagaagttcgtgtgcctgaactgcggcttcgagacacacgcagccgagcaagccgccctgaacatcgccagatcctggctgttcctgcggagccaggagtacaagaaataccagacaaacaagacaaccggcaacaccgataagagagccttcgtcgagacctggcagtccttttaccggaagaagcttaaggaggtgtggaaacctgccgtgcggtctggcggatctggcggaggctccacaagcgccatcaggagcgtgatgttcagcgacatcagcatcgacttcagccccgaggagtgggagtacctggacctggagcagaaggacctgtacagggacgtgatgctggagaactacagcaacctggtgagcctgggctgcttcatcagcaagcccgacgtgatcagcctgctggagcagggcaaggagccctggaaggtggtgaggaagaggaggaggcagtaccccgagatgctgctgctgctgaccagccccaagaaaaagagaaaagtctaagctgccttctgcggggcttgccttctggccatgcccttcttctctcccttgcacctgtacctcttggtctttgaataaagcctgagtaggaaggctagcaaaaaaaaaaaaaaaaaaaaaaaaaaaaaaaaaaaaaaaaaaaaaaaaaaaaaaaaaaaaaaaaaaaaaaaaaaaaaaaa

SEQ ID NO: 2580 - RNA, 5416 nt, synthetic construct
  source 1..5416: mol_type = other RNA
aggaaataagagagaaaagaagagtaagaagaaatataagagccaccatggcccctaagaagaagcgtaaagtgagccgggtgaacggcagcggcagcggcggcggcatgaaccacgaccaggagttcgacccccctaaggtgtaccctcccgtccccgccgagaagagaaagcccatccgggtcctgagcctgttcgatggcatcgccaccggtctgctggtgctgaaggacctgggcatccaggtggataggtacattgcctccgaggtgtgcgaggactccatcaccgtgggaatggtgcgtcatcagggcaagatcatgtacgtgggcgacgtgcggagcgtgacacagaagcatatccaggagtggggccctttcgacctggtgatcggcggcagcccttgcaatgacctgagcatcgtgaacccagcccggaagggcctgtacgagggaaccggcagactgttcttcgagttttacagactgctgcacgacgcccggcctaaggaaggcgacgaccggcccttcttttggctgttcgagaatgtggtggccatgggagtcagcgacaagcgggatattagccggttcctggagagcaaccccgtgatgatcgatgccaaggaagtgagcgccgcccaccgggccagatacttctggggcaatctgcctggcatgaacagacccctggccagcaccgtgaacgacaagctggagctgcaggagtgcctggagcacggccggatcgccaagttcagcaaggtgagaaccatcaccacccgaagcaacagcatcaaacaaggcaaggaccagcactttcctgtgttcatgaacgagaaggaggacatcctgtggtgtaccgagatggagagagtgttcgggttcccagtccactacacagatgtcagcaacatgtctagactggccagacagagactgctgggaagaagctggtccgtccctgtgatcagacacctgttcgcccctctgaaggagtacttcgcctgcgtgagcagcggcaacagcaacgccaacagccggggccccagcttctctagcggcctggtgccactgtccctgagagggagccacatgggccccatggagatctacaaaaccgtgagcgcctggaagcggcagcctgtgcgcgtgctgagcctgtttcggaatatcgataaagtcctgaaaagcctgggattcctggagagcggctctggctccggcggtggcaccctgaagtacgtggaggatgtgacaaacgtggtcagacgggatgtggagaagtggggccccttcgatctggtgtacggcagcacccaacccctgggcagctcttgtgaccggtgccctggctggtacatgtttcagttccaccggatcctgcagtacgccctgccgagacaggagtcccagcggccattcttttggattttcatggacaacttgctgctgaccgaggatgaccaggaaactaccactcggttcctgcagaccgaagccgtgaccctgcaggacgtgagaggccgggactaccagaacgccatgcgggtgtggtccaacatccctggactgaaaagcaagcacgcacctctgacccctaaagaagaggagtacctgcaggcccaggtgcggagcagaagcaagctggacgcccctaaggtggatctgctggtgaagaattgcctcctgcccctgagagagtacttcaagtatttcagccagaatagtctgcccctgggcggcccaagcagcggcgcccctcctcccagcggcggcagcccagccggctccccaacctctaccgaggagggcacctctgagtccgccacccccgagagcggccctggcacctccaccgagcccagcgagggcagcgcacccggcagccctgccggcagccccacctccacagaggagggaaccagcaccgagcccagcgaaggcagcgccccaggcaccagcaccgagcctagtgagggcggctctggcggcggcagcgcccaggagattaaacggatcaacaagatcagaagaagacttgtgaaagacagcaacaccaagaaggccggcaagacaggccccatgaaaaccctgctggttagagtgatgacacccgatctgagagagcggctggaaaacctgagaaagaagcctgaaaatatcccccagcccatcagcaatacatctagagccaacctgaataagctgctgaccgattacaccgaaatgaagaaggcgatcctgcatgtgtactgggaagagttccagaaggaccctgtgggcctgatgagccgggtggcccagcctgccagcaagaagatcgatcagaacaagctgaaacctgagatggacgagaagggcaacctgaccaccgccggctttgcctgctctcagtgtggccagcccctgttcgtgtacaagctggagcaggtgtctgagaagggcaaggcttacaccaactacttcggacggtgcaatgtggccgagcacgaaaagctgatcctgctggcccagctgaagcccgagaaggatagcgacgaagccgtgacatatagcctgggaaagtttgggcagagggccctggatttctacagcattcatgtgaccaaggagtccacccaccccgtgaagcccctggcccagatcgccggaaacagatacgcctccggacctgtgggaaaggccctgagcgacgcatgtatgggcacaatcgcctccttcctgtctaagtaccaggacatcatcatcgaacaccagaaggtggtgaagggcaaccagaagagactggagagcctgcgggagctggccggcaaggaaaacctggaataccctagcgtgaccctgccacctcagcctcacaccaaggagggcgttgatgcctacaacgaagtgatcgcccgggtgcgaatgtgggtgaacctgaacctgtggcagaagctgaagctaagcagagatgatgccaagcctctgctgagactgaagggattcccttcctttcctctggtcgagagacaggccaacgaagtggactggtgggacatggtgtgtaacgtgaagaagctgatcaacgagaaaaaggaggatggcaaggtgttttggcagaatctggctggctacaagagacaggaagccctgagaccatacctgagcagcgaggaagatcggaagaagggaaagaaattcgctcggtaccagctgggcgacctgctgctgcacctggaaaagaagcacggcgaggactggggaaaggtgtacgacgaggcctgggagcggattgacaagaaagtggaaggcctgagcaagcacatcaagctggaagaggaacggagaagcgaggacgcccagagcaaggccgccctgaccgactggctgcgggctaaggccagcttcgtgatcgagggcctgaaggaggccgacaaggacgagttctgcagatgcgagctgaagctgcagaagtggtacggggacctgcggggaaagcccttcgccatcgaagccgagaacagcatcctggacatcagcggcttcagcaagcagtacaactgtgccttcatctggcagaaggacggcgtgaagaagctgaacctgtacctgatcatcaactacttcaagggcggcaagctgcggttcaagaagatcaaacctgaagccttcgaagccaacagattctacaccgtgatcaacaaaaagagcggcgagatcgtgcccatggaggtgaacttcaacttcgacgaccccaacctgatcatcctgcctctggcctttggcaagagacagggcagagaattcatctggaacgacctgctgtccctggaaaccggcagcctgaagctggccaacggaagagtgatcgagaagacactgtacaacagaagaacccggcaggatgagcctgccctgttcgtggccctgaccttcgagcggcgggaggtcctggactcctccaatatcaaaccaatgaacctgatcggcgtggcaagaggcgaaaacatccccgccgtgatcgccctgaccgaccccgagggctgcccactgagccggtttaaggatagcctgggaaacccaacccacatcctgagaatcggcgagagctataaggagaagcagcggaccatccaggccaagaaggaggtggagcagcggagagccggcggctacagccggaagtacgccagcaaagccaagaatctggcagacgatatggtgagaaacaccgctagagatctgctgtactacgccgtgacccaggatgccatgctgatcttcgccaacctgagccggggcttcggccggcagggcaagcggaccttcatggccgagagacagtacacacggatggaggactggctgaccgccaagctggcctacgagggcctgagcaagacctacctgtccaagacactggcccagtacacctccaagacatgcagcaactgtgggtttaccatcaccagcgccgactacgacagggtgctggagaagctgaagaagacagcaacaggctggatgaccacaattaacggcaaggagctgaaggtggagggccagattacctactacaacagatacaagagacagaacgtagtcaaggacctgtccgtcgagctggatagactgagcgaagaatctgtgaacaacgacatctcctcctggacaaagggcagaagcggagaagctctgagcctcctgaagaaaagattctcccatagacccgtgcaggagaagttcgtgtgcctgaactgcggcttcgagacacacgcagccgagcaagccgccctgaacatcgccagatcctggctgttcctgcggagccaggagtacaagaaataccagacaaacaagacaaccggcaacaccgataagagagccttcgtcgagacctggcagtccttttaccggaagaagcttaaggaggtgtggaaacctgccgtgcggtctggcggatctggcggaggctccacaagcatggcccccagccagggcaggctgaccttcgaggacgtggccatcgagttcagccaggaggagtgggagtgcctggaccccgcccagagggccctgtacggcgaggtgatgctggagacctacaggaacctggtgagcctgggcctgaccagcaaggacagctgcagcctgaggaagaagcccaggaggaggaggaggggccagaagaggaccagggagtggcccctgctgaggtaccacaccagccccaagaaaaagagaaaagtctaagctgccttctgcggggcttgccttctggccatgcccttcttctctcccttgcacctgtacctcttggtctttgaataaagcctgagtaggaaggctagcaaaaaaaaaaaaaaaaaaaaaaaaaaaaaaaaaaaaaaaaaaaaaaaaaaaaaaaaaaaaaaaaaaaaaaaaaaaaaaaa

SEQ ID NO: 2581 - RNA, 5419 nt, synthetic construct
  source 1..5419: mol_type = other RNA
aggaaataagagagaaaagaagagtaagaagaaatataagagccaccatggcccctaagaagaagcgtaaagtgagccgggtgaacggcagcggcagcggcggcggcatgaaccacgaccaggagttcgacccccctaaggtgtaccctcccgtccccgccgagaagagaaagcccatccgggtcctgagcctgttcgatggcatcgccaccggtctgctggtgctgaaggacctgggcatccaggtggataggtacattgcctccgaggtgtgcgaggactccatcaccgtgggaatggtgcgtcatcagggcaagatcatgtacgtgggcgacgtgcggagcgtgacacagaagcatatccaggagtggggccctttcgacctggtgatcggcggcagcccttgcaatgacctgagcatcgtgaacccagcccggaagggcctgtacgagggaaccggcagactgttcttcgagttttacagactgctgcacgacgcccggcctaaggaaggcgacgaccggcccttcttttggctgttcgagaatgtggtggccatgggagtcagcgacaagcgggatattagccggttcctggagagcaaccccgtgatgatcgatgccaaggaagtgagcgccgcccaccgggccagatacttctggggcaatctgcctggcatgaacagacccctggccagcaccgtgaacgacaagctggagctgcaggagtgcctggagcacggccggatcgccaagttcagcaaggtgagaaccatcaccacccgaagcaacagcatcaaacaaggcaaggaccagcactttcctgtgttcatgaacgagaaggaggacatcctgtggtgtaccgagatggagagagtgttcgggttcccagtccactacacagatgtcagcaacatgtctagactggccagacagagactgctgggaagaagctggtccgtccctgtgatcagacacctgttcgcccctctgaaggagtacttcgcctgcgtgagcagcggcaacagcaacgccaacagccggggccccagcttctctagcggcctggtgccactgtccctgagagggagccacatgggccccatggagatctacaaaaccgtgagcgcctggaagcggcagcctgtgcgcgtgctgagcctgtttcggaatatcgataaagtcctgaaaagcctgggattcctggagagcggctctggctccggcggtggcaccctgaagtacgtggaggatgtgacaaacgtggtcagacgggatgtggagaagtggggccccttcgatctggtgtacggcagcacccaacccctgggcagctcttgtgaccggtgccctggctggtacatgtttcagttccaccggatcctgcagtacgccctgccgagacaggagtcccagcggccattcttttggattttcatggacaacttgctgctgaccgaggatgaccaggaaactaccactcggttcctgcagaccgaagccgtgaccctgcaggacgtgagaggccgggactaccagaacgccatgcgggtgtggtccaacatccctggactgaaaagcaagcacgcacctctgacccctaaagaagaggagtacctgcaggcccaggtgcggagcagaagcaagctggacgcccctaaggtggatctgctggtgaagaattgcctcctgcccctgagagagtacttcaagtatttcagccagaatagtctgcccctgggcggcccaagcagcggcgcccctcctcccagcggcggcagcccagccggctccccaacctctaccgaggagggcacctctgagtccgccacccccgagagcggccctggcacctccaccgagcccagcgagggcagcgcacccggcagccctgccggcagccccacctccacagaggagggaaccagcaccgagcccagcgaaggcagcgccccaggcaccagcaccgagcctagtgagggcggctctggcggcggcagcgcccaggagattaaacggatcaacaagatcagaagaagacttgtgaaagacagcaacaccaagaaggccggcaagacaggccccatgaaaaccctgctggttagagtgatgacacccgatctgagagagcggctggaaaacctgagaaagaagcctgaaaatatcccccagcccatcagcaatacatctagagccaacctgaataagctgctgaccgattacaccgaaatgaagaaggcgatcctgcatgtgtactgggaagagttccagaaggaccctgtgggcctgatgagccgggtggcccagcctgccagcaagaagatcgatcagaacaagctgaaacctgagatggacgagaagggcaacctgaccaccgccggctttgcctgctctcagtgtggccagcccctgttcgtgtacaagctggagcaggtgtctgagaagggcaaggcttacaccaactacttcggacggtgcaatgtggccgagcacgaaaagctgatcctgctggcccagctgaagcccgagaaggatagcgacgaagccgtgacatatagcctgggaaagtttgggcagagggccctggatttctacagcattcatgtgaccaaggagtccacccaccccgtgaagcccctggcccagatcgccggaaacagatacgcctccggacctgtgggaaaggccctgagcgacgcatgtatgggcacaatcgcctccttcctgtctaagtaccaggacatcatcatcgaacaccagaaggtggtgaagggcaaccagaagagactggagagcctgcgggagctggccggcaaggaaaacctggaataccctagcgtgaccctgccacctcagcctcacaccaaggagggcgttgatgcctacaacgaagtgatcgcccgggtgcgaatgtgggtgaacctgaacctgtggcagaagctgaagctaagcagagatgatgccaagcctctgctgagactgaagggattcccttcctttcctctggtcgagagacaggccaacgaagtggactggtgggacatggtgtgtaacgtgaagaagctgatcaacgagaaaaaggaggatggcaaggtgttttggcagaatctggctggctacaagagacaggaagccctgagaccatacctgagcagcgaggaagatcggaagaagggaaagaaattcgctcggtaccagctgggcgacctgctgctgcacctggaaaagaagcacggcgaggactggggaaaggtgtacgacgaggcctgggagcggattgacaagaaagtggaaggcctgagcaagcacatcaagctggaagaggaacggagaagcgaggacgcccagagcaaggccgccctgaccgactggctgcgggctaaggccagcttcgtgatcgagggcctgaaggaggccgacaaggacgagttctgcagatgcgagctgaagctgcagaagtggtacggggacctgcggggaaagcccttcgccatcgaagccgagaacagcatcctggacatcagcggcttcagcaagcagtacaactgtgccttcatctggcagaaggacggcgtgaagaagctgaacctgtacctgatcatcaactacttcaagggcggcaagctgcggttcaagaagatcaaacctgaagccttcgaagccaacagattctacaccgtgatcaacaaaaagagcggcgagatcgtgcccatggaggtgaacttcaacttcgacgaccccaacctgatcatcctgcctctggcctttggcaagagacagggcagagaattcatctggaacgacctgctgtccctggaaaccggcagcctgaagctggccaacggaagagtgatcgagaagacactgtacaacagaagaacccggcaggatgagcctgccctgttcgtggccctgaccttcgagcggcgggaggtcctggactcctccaatatcaaaccaatgaacctgatcggcgtggcaagaggcgaaaacatccccgccgtgatcgccctgaccgaccccgagggctgcccactgagccggtttaaggatagcctgggaaacccaacccacatcctgagaatcggcgagagctataaggagaagcagcggaccatccaggccaagaaggaggtggagcagcggagagccggcggctacagccggaagtacgccagcaaagccaagaatctggcagacgatatggtgagaaacaccgctagagatctgctgtactacgccgtgacccaggatgccatgctgatcttcgccaacctgagccggggcttcggccggcagggcaagcggaccttcatggccgagagacagtacacacggatggaggactggctgaccgccaagctggcctacgagggcctgagcaagacctacctgtccaagacactggcccagtacacctccaagacatgcagcaactgtgggtttaccatcaccagcgccgactacgacagggtgctggagaagctgaagaagacagcaacaggctggatgaccacaattaacggcaaggagctgaaggtggagggccagattacctactacaacagatacaagagacagaacgtagtcaaggacctgtccgtcgagctggatagactgagcgaagaatctgtgaacaacgacatctcctcctggacaaagggcagaagcggagaagctctgagcctcctgaagaaaagattctcccatagacccgtgcaggagaagttcgtgtgcctgaactgcggcttcgagacacacgcagccgagcaagccgccctgaacatcgccagatcctggctgttcctgcggagccaggagtacaagaaataccagacaaacaagacaaccggcaacaccgataagagagccttcgtcgagacctggcagtccttttaccggaagaagcttaaggaggtgtggaaacctgccgtgcggtctggcggatctggcggaggctccacaagcagccagagcctggtgaccttcggcgacgtggccgtggagttcagccccgaggagtgggagtggctggacagcgcccagaggagcctgtacaggagcgtgatgctggagaactacaggagcctggtgagcctgggcctgtgcgtgagcaagcccaagatgatcagcagcctggagcagaggaaggagccctgggccgccaagaggaccctgaccaggggcggctgcagcgacagcagggccctgaccagccccaagaaaaagagaaaagtctaagctgccttctgcggggcttgccttctggccatgcccttcttctctcccttgcacctgtacctcttggtctttgaataaagcctgagtaggaaggctagcaaaaaaaaaaaaaaaaaaaaaaaaaaaaaaaaaaaaaaaaaaaaaaaaaaaaaaaaaaaaaaaaaaaaaaaaaaaaaaaa

SEQ ID NO: 2582 - RNA, 5419 nt, synthetic construct
  source 1..5419: mol_type = other RNA
aggaaataagagagaaaagaagagtaagaagaaatataagagccaccatggcccctaagaagaagcgtaaagtgagccgggtgaacggcagcggcagcggcggcggcatgaaccacgaccaggagttcgacccccctaaggtgtaccctcccgtccccgccgagaagagaaagcccatccgggtcctgagcctgttcgatggcatcgccaccggtctgctggtgctgaaggacctgggcatccaggtggataggtacattgcctccgaggtgtgcgaggactccatcaccgtgggaatggtgcgtcatcagggcaagatcatgtacgtgggcgacgtgcggagcgtgacacagaagcatatccaggagtggggccctttcgacctggtgatcggcggcagcccttgcaatgacctgagcatcgtgaacccagcccggaagggcctgtacgagggaaccggcagactgttcttcgagttttacagactgctgcacgacgcccggcctaaggaaggcgacgaccggcccttcttttggctgttcgagaatgtggtggccatgggagtcagcgacaagcgggatattagccggttcctggagagcaaccccgtgatgatcgatgccaaggaagtgagcgccgcccaccgggccagatacttctggggcaatctgcctggcatgaacagacccctggccagcaccgtgaacgacaagctggagctgcaggagtgcctggagcacggccggatcgccaagttcagcaaggtgagaaccatcaccacccgaagcaacagcatcaaacaaggcaaggaccagcactttcctgtgttcatgaacgagaaggaggacatcctgtggtgtaccgagatggagagagtgttcgggttcccagtccactacacagatgtcagcaacatgtctagactggccagacagagactgctgggaagaagctggtccgtccctgtgatcagacacctgttcgcccctctgaaggagtacttcgcctgcgtgagcagcggcaacagcaacgccaacagccggggccccagcttctctagcggcctggtgccactgtccctgagagggagccacatgggccccatggagatctacaaaaccgtgagcgcctggaagcggcagcctgtgcgcgtgctgagcctgtttcggaatatcgataaagtcctgaaaagcctgggattcctggagagcggctctggctccggcggtggcaccctgaagtacgtggaggatgtgacaaacgtggtcagacgggatgtggagaagtggggccccttcgatctggtgtacggcagcacccaacccctgggcagctcttgtgaccggtgccctggctggtacatgtttcagttccaccggatcctgcagtacgccctgccgagacaggagtcccagcggccattcttttggattttcatggacaacttgctgctgaccgaggatgaccaggaaactaccactcggttcctgcagaccgaagccgtgaccctgcaggacgtgagaggccgggactaccagaacgccatgcgggtgtggtccaacatccctggactgaaaagcaagcacgcacctctgacccctaaagaagaggagtacctgcaggcccaggtgcggagcagaagcaagctggacgcccctaaggtggatctgctggtgaagaattgcctcctgcccctgagagagtacttcaagtatttcagccagaatagtctgcccctgggcggcccaagcagcggcgcccctcctcccagcggcggcagcccagccggctccccaacctctaccgaggagggcacctctgagtccgccacccccgagagcggccctggcacctccaccgagcccagcgagggcagcgcacccggcagccctgccggcagccccacctccacagaggagggaaccagcaccgagcccagcgaaggcagcgccccaggcaccagcaccgagcctagtgagggcggctctggcggcggcagcgcccaggagattaaacggatcaacaagatcagaagaagacttgtgaaagacagcaacaccaagaaggccggcaagacaggccccatgaaaaccctgctggttagagtgatgacacccgatctgagagagcggctggaaaacctgagaaagaagcctgaaaatatcccccagcccatcagcaatacatctagagccaacctgaataagctgctgaccgattacaccgaaatgaagaaggcgatcctgcatgtgtactgggaagagttccagaaggaccctgtgggcctgatgagccgggtggcccagcctgccagcaagaagatcgatcagaacaagctgaaacctgagatggacgagaagggcaacctgaccaccgccggctttgcctgctctcagtgtggccagcccctgttcgtgtacaagctggagcaggtgtctgagaagggcaaggcttacaccaactacttcggacggtgcaatgtggccgagcacgaaaagctgatcctgctggcccagctgaagcccgagaaggatagcgacgaagccgtgacatatagcctgggaaagtttgggcagagggccctggatttctacagcattcatgtgaccaaggagtccacccaccccgtgaagcccctggcccagatcgccggaaacagatacgcctccggacctgtgggaaaggccctgagcgacgcatgtatgggcacaatcgcctccttcctgtctaagtaccaggacatcatcatcgaacaccagaaggtggtgaagggcaaccagaagagactggagagcctgcgggagctggccggcaaggaaaacctggaataccctagcgtgaccctgccacctcagcctcacaccaaggagggcgttgatgcctacaacgaagtgatcgcccgggtgcgaatgtgggtgaacctgaacctgtggcagaagctgaagctaagcagagatgatgccaagcctctgctgagactgaagggattcccttcctttcctctggtcgagagacaggccaacgaagtggactggtgggacatggtgtgtaacgtgaagaagctgatcaacgagaaaaaggaggatggcaaggtgttttggcagaatctggctggctacaagagacaggaagccctgagaccatacctgagcagcgaggaagatcggaagaagggaaagaaattcgctcggtaccagctgggcgacctgctgctgcacctggaaaagaagcacggcgaggactggggaaaggtgtacgacgaggcctgggagcggattgacaagaaagtggaaggcctgagcaagcacatcaagctggaagaggaacggagaagcgaggacgcccagagcaaggccgccctgaccgactggctgcgggctaaggccagcttcgtgatcgagggcctgaaggaggccgacaaggacgagttctgcagatgcgagctgaagctgcagaagtggtacggggacctgcggggaaagcccttcgccatcgaagccgagaacagcatcctggacatcagcggcttcagcaagcagtacaactgtgccttcatctggcagaaggacggcgtgaagaagctgaacctgtacctgatcatcaactacttcaagggcggcaagctgcggttcaagaagatcaaacctgaagccttcgaagccaacagattctacaccgtgatcaacaaaaagagcggcgagatcgtgcccatggaggtgaacttcaacttcgacgaccccaacctgatcatcctgcctctggcctttggcaagagacagggcagagaattcatctggaacgacctgctgtccctggaaaccggcagcctgaagctggccaacggaagagtgatcgagaagacactgtacaacagaagaacccggcaggatgagcctgccctgttcgtggccctgaccttcgagcggcgggaggtcctggactcctccaatatcaaaccaatgaacctgatcggcgtggcaagaggcgaaaacatccccgccgtgatcgccctgaccgaccccgagggctgcccactgagccggtttaaggatagcctgggaaacccaacccacatcctgagaatcggcgagagctataaggagaagcagcggaccatccaggccaagaaggaggtggagcagcggagagccggcggctacagccggaagtacgccagcaaagccaagaatctggcagacgatatggtgagaaacaccgctagagatctgctgtactacgccgtgacccaggatgccatgctgatcttcgccaacctgagccggggcttcggccggcagggcaagcggaccttcatggccgagagacagtacacacggatggaggactggctgaccgccaagctggcctacgagggcctgagcaagacctacctgtccaagacactggcccagtacacctccaagacatgcagcaactgtgggtttaccatcaccagcgccgactacgacagggtgctggagaagctgaagaagacagcaacaggctggatgaccacaattaacggcaaggagctgaaggtggagggccagattacctactacaacagatacaagagacagaacgtagtcaaggacctgtccgtcgagctggatagactgagcgaagaatctgtgaacaacgacatctcctcctggacaaagggcagaagcggagaagctctgagcctcctgaagaaaagattctcccatagacccgtgcaggagaagttcgtgtgcctgaactgcggcttcgagacacacgcagccgagcaagccgccctgaacatcgccagatcctggctgttcctgcggagccaggagtacaagaaataccagacaaacaagacaaccggcaacaccgataagagagccttcgtcgagacctggcagtccttttaccggaagaagcttaaggaggtgtggaaacctgccgtgcggtctggcggatctggcggaggctccacaagcagcaagctgcccgtgaccttcggcgacctggccatctacttcagccaggaggagtgggagtggctgagccccatccagaaggacctgtacgaggacgtgatgctggagaactaccagaacctggtgagcctgggcctgagcttcaggaggcccaacgtgatcaccctgctggagaagggcaaggccccctggatggtggagcccgtgaggaagaggaggggcctggacagcaagagcaagtgcaccagccccaagaaaaagagaaaagtctaagctgccttctgcggggcttgccttctggccatgcccttcttctctcccttgcacctgtacctcttggtctttgaataaagcctgagtaggaaggctagcaaaaaaaaaaaaaaaaaaaaaaaaaaaaaaaaaaaaaaaaaaaaaaaaaaaaaaaaaaaaaaaaaaaaaaaaaaaaaaaa

SEQ ID NO: 2583 - RNA, 5419 nt, synthetic construct
  source 1..5419: mol_type = other RNA
aggaaataagagagaaaagaagagtaagaagaaatataagagccaccatggcccctaagaagaagcgtaaagtgagccgggtgaacggcagcggcagcggcggcggcatgaaccacgaccaggagttcgacccccctaaggtgtaccctcccgtccccgccgagaagagaaagcccatccgggtcctgagcctgttcgatggcatcgccaccggtctgctggtgctgaaggacctgggcatccaggtggataggtacattgcctccgaggtgtgcgaggactccatcaccgtgggaatggtgcgtcatcagggcaagatcatgtacgtgggcgacgtgcggagcgtgacacagaagcatatccaggagtggggccctttcgacctggtgatcggcggcagcccttgcaatgacctgagcatcgtgaacccagcccggaagggcctgtacgagggaaccggcagactgttcttcgagttttacagactgctgcacgacgcccggcctaaggaaggcgacgaccggcccttcttttggctgttcgagaatgtggtggccatgggagtcagcgacaagcgggatattagccggttcctggagagcaaccccgtgatgatcgatgccaaggaagtgagcgccgcccaccgggccagatacttctggggcaatctgcctggcatgaacagacccctggccagcaccgtgaacgacaagctggagctgcaggagtgcctggagcacggccggatcgccaagttcagcaaggtgagaaccatcaccacccgaagcaacagcatcaaacaaggcaaggaccagcactttcctgtgttcatgaacgagaaggaggacatcctgtggtgtaccgagatggagagagtgttcgggttcccagtccactacacagatgtcagcaacatgtctagactggccagacagagactgctgggaagaagctggtccgtccctgtgatcagacacctgttcgcccctctgaaggagtacttcgcctgcgtgagcagcggcaacagcaacgccaacagccggggccccagcttctctagcggcctggtgccactgtccctgagagggagccacatgggccccatggagatctacaaaaccgtgagcgcctggaagcggcagcctgtgcgcgtgctgagcctgtttcggaatatcgataaagtcctgaaaagcctgggattcctggagagcggctctggctccggcggtggcaccctgaagtacgtggaggatgtgacaaacgtggtcagacgggatgtggagaagtggggccccttcgatctggtgtacggcagcacccaacccctgggcagctcttgtgaccggtgccctggctggtacatgtttcagttccaccggatcctgcagtacgccctgccgagacaggagtcccagcggccattcttttggattttcatggacaacttgctgctgaccgaggatgaccaggaaactaccactcggttcctgcagaccgaagccgtgaccctgcaggacgtgagaggccgggactaccagaacgccatgcgggtgtggtccaacatccctggactgaaaagcaagcacgcacctctgacccctaaagaagaggagtacctgcaggcccaggtgcggagcagaagcaagctggacgcccctaaggtggatctgctggtgaagaattgcctcctgcccctgagagagtacttcaagtatttcagccagaatagtctgcccctgggcggcccaagcagcggcgcccctcctcccagcggcggcagcccagccggctccccaacctctaccgaggagggcacctctgagtccgccacccccgagagcggccctggcacctccaccgagcccagcgagggcagcgcacccggcagccctgccggcagccccacctccacagaggagggaaccagcaccgagcccagcgaaggcagcgccccaggcaccagcaccgagcctagtgagggcggctctggcggcggcagcgcccaggagattaaacggatcaacaagatcagaagaagacttgtgaaagacagcaacaccaagaaggccggcaagacaggccccatgaaaaccctgctggttagagtgatgacacccgatctgagagagcggctggaaaacctgagaaagaagcctgaaaatatcccccagcccatcagcaatacatctagagccaacctgaataagctgctgaccgattacaccgaaatgaagaaggcgatcctgcatgtgtactgggaagagttccagaaggaccctgtgggcctgatgagccgggtggcccagcctgccagcaagaagatcgatcagaacaagctgaaacctgagatggacgagaagggcaacctgaccaccgccggctttgcctgctctcagtgtggccagcccctgttcgtgtacaagctggagcaggtgtctgagaagggcaaggcttacaccaactacttcggacggtgcaatgtggccgagcacgaaaagctgatcctgctggcccagctgaagcccgagaaggatagcgacgaagccgtgacatatagcctgggaaagtttgggcagagggccctggatttctacagcattcatgtgaccaaggagtccacccaccccgtgaagcccctggcccagatcgccggaaacagatacgcctccggacctgtgggaaaggccctgagcgacgcatgtatgggcacaatcgcctccttcctgtctaagtaccaggacatcatcatcgaacaccagaaggtggtgaagggcaaccagaagagactggagagcctgcgggagctggccggcaaggaaaacctggaataccctagcgtgaccctgccacctcagcctcacaccaaggagggcgttgatgcctacaacgaagtgatcgcccgggtgcgaatgtgggtgaacctgaacctgtggcagaagctgaagctaagcagagatgatgccaagcctctgctgagactgaagggattcccttcctttcctctggtcgagagacaggccaacgaagtggactggtgggacatggtgtgtaacgtgaagaagctgatcaacgagaaaaaggaggatggcaaggtgttttggcagaatctggctggctacaagagacaggaagccctgagaccatacctgagcagcgaggaagatcggaagaagggaaagaaattcgctcggtaccagctgggcgacctgctgctgcacctggaaaagaagcacggcgaggactggggaaaggtgtacgacgaggcctgggagcggattgacaagaaagtggaaggcctgagcaagcacatcaagctggaagaggaacggagaagcgaggacgcccagagcaaggccgccctgaccgactggctgcgggctaaggccagcttcgtgatcgagggcctgaaggaggccgacaaggacgagttctgcagatgcgagctgaagctgcagaagtggtacggggacctgcggggaaagcccttcgccatcgaagccgagaacagcatcctggacatcagcggcttcagcaagcagtacaactgtgccttcatctggcagaaggacggcgtgaagaagctgaacctgtacctgatcatcaactacttcaagggcggcaagctgcggttcaagaagatcaaacctgaagccttcgaagccaacagattctacaccgtgatcaacaaaaagagcggcgagatcgtgcccatggaggtgaacttcaacttcgacgaccccaacctgatcatcctgcctctggcctttggcaagagacagggcagagaattcatctggaacgacctgctgtccctggaaaccggcagcctgaagctggccaacggaagagtgatcgagaagacactgtacaacagaagaacccggcaggatgagcctgccctgttcgtggccctgaccttcgagcggcgggaggtcctggactcctccaatatcaaaccaatgaacctgatcggcgtggcaagaggcgaaaacatccccgccgtgatcgccctgaccgaccccgagggctgcccactgagccggtttaaggatagcctgggaaacccaacccacatcctgagaatcggcgagagctataaggagaagcagcggaccatccaggccaagaaggaggtggagcagcggagagccggcggctacagccggaagtacgccagcaaagccaagaatctggcagacgatatggtgagaaacaccgctagagatctgctgtactacgccgtgacccaggatgccatgctgatcttcgccaacctgagccggggcttcggccggcagggcaagcggaccttcatggccgagagacagtacacacggatggaggactggctgaccgccaagctggcctacgagggcctgagcaagacctacctgtccaagacactggcccagtacacctccaagacatgcagcaactgtgggtttaccatcaccagcgccgactacgacagggtgctggagaagctgaagaagacagcaacaggctggatgaccacaattaacggcaaggagctgaaggtggagggccagattacctactacaacagatacaagagacagaacgtagtcaaggacctgtccgtcgagctggatagactgagcgaagaatctgtgaacaacgacatctcctcctggacaaagggcagaagcggagaagctctgagcctcctgaagaaaagattctcccatagacccgtgcaggagaagttcgtgtgcctgaactgcggcttcgagacacacgcagccgagcaagccgccctgaacatcgccagatcctggctgttcctgcggagccaggagtacaagaaataccagacaaacaagacaaccggcaacaccgataagagagccttcgtcgagacctggcagtccttttaccggaagaagcttaaggaggtgtggaaacctgccgtgcggtctggcggatctggcggaggctccacaagccaggaccccagcgccgagggcctgagcgaggaggtgcccgtggtgttcgaggagctgcccgtggtgttcgaggacgtggccgtgtacttcaccagggaggagtggggcatgctggacaagaggcagaaggagctgtacagggacgtgatgaggatgaactacgagctgctggccagcctgggccccgccgccgccaagcccgacctgatcagcaagctggagaggagggccgccccctggatcaccagccccaagaaaaagagaaaagtctaagctgccttctgcggggcttgccttctggccatgcccttcttctctcccttgcacctgtacctcttggtctttgaataaagcctgagtaggaaggctagcaaaaaaaaaaaaaaaaaaaaaaaaaaaaaaaaaaaaaaaaaaaaaaaaaaaaaaaaaaaaaaaaaaaaaaaaaaaaaaaa

SEQ ID NO: 2584 - RNA, 5419 nt, synthetic construct
  source 1..5419: mol_type = other RNA
aggaaataagagagaaaagaagagtaagaagaaatataagagccaccatggcccctaagaagaagcgtaaagtgagccgggtgaacggcagcggcagcggcggcggcatgaaccacgaccaggagttcgacccccctaaggtgtaccctcccgtccccgccgagaagagaaagcccatccgggtcctgagcctgttcgatggcatcgccaccggtctgctggtgctgaaggacctgggcatccaggtggataggtacattgcctccgaggtgtgcgaggactccatcaccgtgggaatggtgcgtcatcagggcaagatcatgtacgtgggcgacgtgcggagcgtgacacagaagcatatccaggagtggggccctttcgacctggtgatcggcggcagcccttgcaatgacctgagcatcgtgaacccagcccggaagggcctgtacgagggaaccggcagactgttcttcgagttttacagactgctgcacgacgcccggcctaaggaaggcgacgaccggcccttcttttggctgttcgagaatgtggtggccatgggagtcagcgacaagcgggatattagccggttcctggagagcaaccccgtgatgatcgatgccaaggaagtgagcgccgcccaccgggccagatacttctggggcaatctgcctggcatgaacagacccctggccagcaccgtgaacgacaagctggagctgcaggagtgcctggagcacggccggatcgccaagttcagcaaggtgagaaccatcaccacccgaagcaacagcatcaaacaaggcaaggaccagcactttcctgtgttcatgaacgagaaggaggacatcctgtggtgtaccgagatggagagagtgttcgggttcccagtccactacacagatgtcagcaacatgtctagactggccagacagagactgctgggaagaagctggtccgtccctgtgatcagacacctgttcgcccctctgaaggagtacttcgcctgcgtgagcagcggcaacagcaacgccaacagccggggccccagcttctctagcggcctggtgccactgtccctgagagggagccacatgggccccatggagatctacaaaaccgtgagcgcctggaagcggcagcctgtgcgcgtgctgagcctgtttcggaatatcgataaagtcctgaaaagcctgggattcctggagagcggctctggctccggcggtggcaccctgaagtacgtggaggatgtgacaaacgtggtcagacgggatgtggagaagtggggccccttcgatctggtgtacggcagcacccaacccctgggcagctcttgtgaccggtgccctggctggtacatgtttcagttccaccggatcctgcagtacgccctgccgagacaggagtcccagcggccattcttttggattttcatggacaacttgctgctgaccgaggatgaccaggaaactaccactcggttcctgcagaccgaagccgtgaccctgcaggacgtgagaggccgggactaccagaacgccatgcgggtgtggtccaacatccctggactgaaaagcaagcacgcacctctgacccctaaagaagaggagtacctgcaggcccaggtgcggagcagaagcaagctggacgcccctaaggtggatctgctggtgaagaattgcctcctgcccctgagagagtacttcaagtatttcagccagaatagtctgcccctgggcggcccaagcagcggcgcccctcctcccagcggcggcagcccagccggctccccaacctctaccgaggagggcacctctgagtccgccacccccgagagcggccctggcacctccaccgagcccagcgagggcagcgcacccggcagccctgccggcagccccacctccacagaggagggaaccagcaccgagcccagcgaaggcagcgccccaggcaccagcaccgagcctagtgagggcggctctggcggcggcagcgcccaggagattaaacggatcaacaagatcagaagaagacttgtgaaagacagcaacaccaagaaggccggcaagacaggccccatgaaaaccctgctggttagagtgatgacacccgatctgagagagcggctggaaaacctgagaaagaagcctgaaaatatcccccagcccatcagcaatacatctagagccaacctgaataagctgctgaccgattacaccgaaatgaagaaggcgatcctgcatgtgtactgggaagagttccagaaggaccctgtgggcctgatgagccgggtggcccagcctgccagcaagaagatcgatcagaacaagctgaaacctgagatggacgagaagggcaacctgaccaccgccggctttgcctgctctcagtgtggccagcccctgttcgtgtacaagctggagcaggtgtctgagaagggcaaggcttacaccaactacttcggacggtgcaatgtggccgagcacgaaaagctgatcctgctggcccagctgaagcccgagaaggatagcgacgaagccgtgacatatagcctgggaaagtttgggcagagggccctggatttctacagcattcatgtgaccaaggagtccacccaccccgtgaagcccctggcccagatcgccggaaacagatacgcctccggacctgtgggaaaggccctgagcgacgcatgtatgggcacaatcgcctccttcctgtctaagtaccaggacatcatcatcgaacaccagaaggtggtgaagggcaaccagaagagactggagagcctgcgggagctggccggcaaggaaaacctggaataccctagcgtgaccctgccacctcagcctcacaccaaggagggcgttgatgcctacaacgaagtgatcgcccgggtgcgaatgtgggtgaacctgaacctgtggcagaagctgaagctaagcagagatgatgccaagcctctgctgagactgaagggattcccttcctttcctctggtcgagagacaggccaacgaagtggactggtgggacatggtgtgtaacgtgaagaagctgatcaacgagaaaaaggaggatggcaaggtgttttggcagaatctggctggctacaagagacaggaagccctgagaccatacctgagcagcgaggaagatcggaagaagggaaagaaattcgctcggtaccagctgggcgacctgctgctgcacctggaaaagaagcacggcgaggactggggaaaggtgtacgacgaggcctgggagcggattgacaagaaagtggaaggcctgagcaagcacatcaagctggaagaggaacggagaagcgaggacgcccagagcaaggccgccctgaccgactggctgcgggctaaggccagcttcgtgatcgagggcctgaaggaggccgacaaggacgagttctgcagatgcgagctgaagctgcagaagtggtacggggacctgcggggaaagcccttcgccatcgaagccgagaacagcatcctggacatcagcggcttcagcaagcagtacaactgtgccttcatctggcagaaggacggcgtgaagaagctgaacctgtacctgatcatcaactacttcaagggcggcaagctgcggttcaagaagatcaaacctgaagccttcgaagccaacagattctacaccgtgatcaacaaaaagagcggcgagatcgtgcccatggaggtgaacttcaacttcgacgaccccaacctgatcatcctgcctctggcctttggcaagagacagggcagagaattcatctggaacgacctgctgtccctggaaaccggcagcctgaagctggccaacggaagagtgatcgagaagacactgtacaacagaagaacccggcaggatgagcctgccctgttcgtggccctgaccttcgagcggcgggaggtcctggactcctccaatatcaaaccaatgaacctgatcggcgtggcaagaggcgaaaacatccccgccgtgatcgccctgaccgaccccgagggctgcccactgagccggtttaaggatagcctgggaaacccaacccacatcctgagaatcggcgagagctataaggagaagcagcggaccatccaggccaagaaggaggtggagcagcggagagccggcggctacagccggaagtacgccagcaaagccaagaatctggcagacgatatggtgagaaacaccgctagagatctgctgtactacgccgtgacccaggatgccatgctgatcttcgccaacctgagccggggcttcggccggcagggcaagcggaccttcatggccgagagacagtacacacggatggaggactggctgaccgccaagctggcctacgagggcctgagcaagacctacctgtccaagacactggcccagtacacctccaagacatgcagcaactgtgggtttaccatcaccagcgccgactacgacagggtgctggagaagctgaagaagacagcaacaggctggatgaccacaattaacggcaaggagctgaaggtggagggccagattacctactacaacagatacaagagacagaacgtagtcaaggacctgtccgtcgagctggatagactgagcgaagaatctgtgaacaacgacatctcctcctggacaaagggcagaagcggagaagctctgagcctcctgaagaaaagattctcccatagacccgtgcaggagaagttcgtgtgcctgaactgcggcttcgagacacacgcagccgagcaagccgccctgaacatcgccagatcctggctgttcctgcggagccaggagtacaagaaataccagacaaacaagacaaccggcaacaccgataagagagccttcgtcgagacctggcagtccttttaccggaagaagcttaaggaggtgtggaaacctgccgtgcggtctggcggatctggcggaggctccacaagcatccagaacaccgtgacctacgacgacgtgcacatcgacttcacctgggaggagtggaccctgctggaccccagccagaggaacctgtacaaggacgtgatggtggagacctacaccaacctgaccgccgtgggctacagctgggaggaccacaacatggaggagcactgccagagcagccagaggcagaggaggtacaagaggagcaacaccggcgagaagccctgcgagtacacccagtgcaccagccccaagaaaaagagaaaagtctaagctgccttctgcggggcttgccttctggccatgcccttcttctctcccttgcacctgtacctcttggtctttgaataaagcctgagtaggaaggctagcaaaaaaaaaaaaaaaaaaaaaaaaaaaaaaaaaaaaaaaaaaaaaaaaaaaaaaaaaaaaaaaaaaaaaaaaaaaaaaaa

SEQ ID NO: 2585 - RNA, 5419 nt, synthetic construct
  source 1..5419: mol_type = other RNA
aggaaataagagagaaaagaagagtaagaagaaatataagagccaccatggcccctaagaagaagcgtaaagtgagccgggtgaacggcagcggcagcggcggcggcatgaaccacgaccaggagttcgacccccctaaggtgtaccctcccgtccccgccgagaagagaaagcccatccgggtcctgagcctgttcgatggcatcgccaccggtctgctggtgctgaaggacctgggcatccaggtggataggtacattgcctccgaggtgtgcgaggactccatcaccgtgggaatggtgcgtcatcagggcaagatcatgtacgtgggcgacgtgcggagcgtgacacagaagcatatccaggagtggggccctttcgacctggtgatcggcggcagcccttgcaatgacctgagcatcgtgaacccagcccggaagggcctgtacgagggaaccggcagactgttcttcgagttttacagactgctgcacgacgcccggcctaaggaaggcgacgaccggcccttcttttggctgttcgagaatgtggtggccatgggagtcagcgacaagcgggatattagccggttcctggagagcaaccccgtgatgatcgatgccaaggaagtgagcgccgcccaccgggccagatacttctggggcaatctgcctggcatgaacagacccctggccagcaccgtgaacgacaagctggagctgcaggagtgcctggagcacggccggatcgccaagttcagcaaggtgagaaccatcaccacccgaagcaacagcatcaaacaaggcaaggaccagcactttcctgtgttcatgaacgagaaggaggacatcctgtggtgtaccgagatggagagagtgttcgggttcccagtccactacacagatgtcagcaacatgtctagactggccagacagagactgctgggaagaagctggtccgtccctgtgatcagacacctgttcgcccctctgaaggagtacttcgcctgcgtgagcagcggcaacagcaacgccaacagccggggccccagcttctctagcggcctggtgccactgtccctgagagggagccacatgggccccatggagatctacaaaaccgtgagcgcctggaagcggcagcctgtgcgcgtgctgagcctgtttcggaatatcgataaagtcctgaaaagcctgggattcctggagagcggctctggctccggcggtggcaccctgaagtacgtggaggatgtgacaaacgtggtcagacgggatgtggagaagtggggccccttcgatctggtgtacggcagcacccaacccctgggcagctcttgtgaccggtgccctggctggtacatgtttcagttccaccggatcctgcagtacgccctgccgagacaggagtcccagcggccattcttttggattttcatggacaacttgctgctgaccgaggatgaccaggaaactaccactcggttcctgcagaccgaagccgtgaccctgcaggacgtgagaggccgggactaccagaacgccatgcgggtgtggtccaacatccctggactgaaaagcaagcacgcacctctgacccctaaagaagaggagtacctgcaggcccaggtgcggagcagaagcaagctggacgcccctaaggtggatctgctggtgaagaattgcctcctgcccctgagagagtacttcaagtatttcagccagaatagtctgcccctgggcggcccaagcagcggcgcccctcctcccagcggcggcagcccagccggctccccaacctctaccgaggagggcacctctgagtccgccacccccgagagcggccctggcacctccaccgagcccagcgagggcagcgcacccggcagccctgccggcagccccacctccacagaggagggaaccagcaccgagcccagcgaaggcagcgccccaggcaccagcaccgagcctagtgagggcggctctggcggcggcagcgcccaggagattaaacggatcaacaagatcagaagaagacttgtgaaagacagcaacaccaagaaggccggcaagacaggccccatgaaaaccctgctggttagagtgatgacacccgatctgagagagcggctggaaaacctgagaaagaagcctgaaaatatcccccagcccatcagcaatacatctagagccaacctgaataagctgctgaccgattacaccgaaatgaagaaggcgatcctgcatgtgtactgggaagagttccagaaggaccctgtgggcctgatgagccgggtggcccagcctgccagcaagaagatcgatcagaacaagctgaaacctgagatggacgagaagggcaacctgaccaccgccggctttgcctgctctcagtgtggccagcccctgttcgtgtacaagctggagcaggtgtctgagaagggcaaggcttacaccaactacttcggacggtgcaatgtggccgagcacgaaaagctgatcctgctggcccagctgaagcccgagaaggatagcgacgaagccgtgacatatagcctgggaaagtttgggcagagggccctggatttctacagcattcatgtgaccaaggagtccacccaccccgtgaagcccctggcccagatcgccggaaacagatacgcctccggacctgtgggaaaggccctgagcgacgcatgtatgggcacaatcgcctccttcctgtctaagtaccaggacatcatcatcgaacaccagaaggtggtgaagggcaaccagaagagactggagagcctgcgggagctggccggcaaggaaaacctggaataccctagcgtgaccctgccacctcagcctcacaccaaggagggcgttgatgcctacaacgaagtgatcgcccgggtgcgaatgtgggtgaacctgaacctgtggcagaagctgaagctaagcagagatgatgccaagcctctgctgagactgaagggattcccttcctttcctctggtcgagagacaggccaacgaagtggactggtgggacatggtgtgtaacgtgaagaagctgatcaacgagaaaaaggaggatggcaaggtgttttggcagaatctggctggctacaagagacaggaagccctgagaccatacctgagcagcgaggaagatcggaagaagggaaagaaattcgctcggtaccagctgggcgacctgctgctgcacctggaaaagaagcacggcgaggactggggaaaggtgtacgacgaggcctgggagcggattgacaagaaagtggaaggcctgagcaagcacatcaagctggaagaggaacggagaagcgaggacgcccagagcaaggccgccctgaccgactggctgcgggctaaggccagcttcgtgatcgagggcctgaaggaggccgacaaggacgagttctgcagatgcgagctgaagctgcagaagtggtacggggacctgcggggaaagcccttcgccatcgaagccgagaacagcatcctggacatcagcggcttcagcaagcagtacaactgtgccttcatctggcagaaggacggcgtgaagaagctgaacctgtacctgatcatcaactacttcaagggcggcaagctgcggttcaagaagatcaaacctgaagccttcgaagccaacagattctacaccgtgatcaacaaaaagagcggcgagatcgtgcccatggaggtgaacttcaacttcgacgaccccaacctgatcatcctgcctctggcctttggcaagagacagggcagagaattcatctggaacgacctgctgtccctggaaaccggcagcctgaagctggccaacggaagagtgatcgagaagacactgtacaacagaagaacccggcaggatgagcctgccctgttcgtggccctgaccttcgagcggcgggaggtcctggactcctccaatatcaaaccaatgaacctgatcggcgtggcaagaggcgaaaacatccccgccgtgatcgccctgaccgaccccgagggctgcccactgagccggtttaaggatagcctgggaaacccaacccacatcctgagaatcggcgagagctataaggagaagcagcggaccatccaggccaagaaggaggtggagcagcggagagccggcggctacagccggaagtacgccagcaaagccaagaatctggcagacgatatggtgagaaacaccgctagagatctgctgtactacgccgtgacccaggatgccatgctgatcttcgccaacctgagccggggcttcggccggcagggcaagcggaccttcatggccgagagacagtacacacggatggaggactggctgaccgccaagctggcctacgagggcctgagcaagacctacctgtccaagacactggcccagtacacctccaagacatgcagcaactgtgggtttaccatcaccagcgccgactacgacagggtgctggagaagctgaagaagacagcaacaggctggatgaccacaattaacggcaaggagctgaaggtggagggccagattacctactacaacagatacaagagacagaacgtagtcaaggacctgtccgtcgagctggatagactgagcgaagaatctgtgaacaacgacatctcctcctggacaaagggcagaagcggagaagctctgagcctcctgaagaaaagattctcccatagacccgtgcaggagaagttcgtgtgcctgaactgcggcttcgagacacacgcagccgagcaagccgccctgaacatcgccagatcctggctgttcctgcggagccaggagtacaagaaataccagacaaacaagacaaccggcaacaccgataagagagccttcgtcgagacctggcagtccttttaccggaagaagcttaaggaggtgtggaaacctgccgtgcggtctggcggatctggcggaggctccacaagccaggaccccagcgccgagggcctgagcgaggaggtgcccgtggtgttcgaggagctgcccgtggtgttcgaggacgtggccgtgtacttcaccagggaggagtggggcatgctggacaagtggcagaaggagctgtacagggacgtgatgaggatgaactacgagctgctggccagcctgggccccgccgccgccaagcccgacctgatcagcaagctggagaggagggccgccccctggatcaccagccccaagaaaaagagaaaagtctaagctgccttctgcggggcttgccttctggccatgcccttcttctctcccttgcacctgtacctcttggtctttgaataaagcctgagtaggaaggctagcaaaaaaaaaaaaaaaaaaaaaaaaaaaaaaaaaaaaaaaaaaaaaaaaaaaaaaaaaaaaaaaaaaaaaaaaaaaaaaaa

SEQ ID NO: 2586 - RNA, 5419 nt, synthetic construct
  source 1..5419: mol_type = other RNA
aggaaataagagagaaaagaagagtaagaagaaatataagagccaccatggcccctaagaagaagcgtaaagtgagccgggtgaacggcagcggcagcggcggcggcatgaaccacgaccaggagttcgacccccctaaggtgtaccctcccgtccccgccgagaagagaaagcccatccgggtcctgagcctgttcgatggcatcgccaccggtctgctggtgctgaaggacctgggcatccaggtggataggtacattgcctccgaggtgtgcgaggactccatcaccgtgggaatggtgcgtcatcagggcaagatcatgtacgtgggcgacgtgcggagcgtgacacagaagcatatccaggagtggggccctttcgacctggtgatcggcggcagcccttgcaatgacctgagcatcgtgaacccagcccggaagggcctgtacgagggaaccggcagactgttcttcgagttttacagactgctgcacgacgcccggcctaaggaaggcgacgaccggcccttcttttggctgttcgagaatgtggtggccatgggagtcagcgacaagcgggatattagccggttcctggagagcaaccccgtgatgatcgatgccaaggaagtgagcgccgcccaccgggccagatacttctggggcaatctgcctggcatgaacagacccctggccagcaccgtgaacgacaagctggagctgcaggagtgcctggagcacggccggatcgccaagttcagcaaggtgagaaccatcaccacccgaagcaacagcatcaaacaaggcaaggaccagcactttcctgtgttcatgaacgagaaggaggacatcctgtggtgtaccgagatggagagagtgttcgggttcccagtccactacacagatgtcagcaacatgtctagactggccagacagagactgctgggaagaagctggtccgtccctgtgatcagacacctgttcgcccctctgaaggagtacttcgcctgcgtgagcagcggcaacagcaacgccaacagccggggccccagcttctctagcggcctggtgccactgtccctgagagggagccacatgggccccatggagatctacaaaaccgtgagcgcctggaagcggcagcctgtgcgcgtgctgagcctgtttcggaatatcgataaagtcctgaaaagcctgggattcctggagagcggctctggctccggcggtggcaccctgaagtacgtggaggatgtgacaaacgtggtcagacgggatgtggagaagtggggccccttcgatctggtgtacggcagcacccaacccctgggcagctcttgtgaccggtgccctggctggtacatgtttcagttccaccggatcctgcagtacgccctgccgagacaggagtcccagcggccattcttttggattttcatggacaacttgctgctgaccgaggatgaccaggaaactaccactcggttcctgcagaccgaagccgtgaccctgcaggacgtgagaggccgggactaccagaacgccatgcgggtgtggtccaacatccctggactgaaaagcaagcacgcacctctgacccctaaagaagaggagtacctgcaggcccaggtgcggagcagaagcaagctggacgcccctaaggtggatctgctggtgaagaattgcctcctgcccctgagagagtacttcaagtatttcagccagaatagtctgcccctgggcggcccaagcagcggcgcccctcctcccagcggcggcagcccagccggctccccaacctctaccgaggagggcacctctgagtccgccacccccgagagcggccctggcacctccaccgagcccagcgagggcagcgcacccggcagccctgccggcagccccacctccacagaggagggaaccagcaccgagcccagcgaaggcagcgccccaggcaccagcaccgagcctagtgagggcggctctggcggcggcagcgcccaggagattaaacggatcaacaagatcagaagaagacttgtgaaagacagcaacaccaagaaggccggcaagacaggccccatgaaaaccctgctggttagagtgatgacacccgatctgagagagcggctggaaaacctgagaaagaagcctgaaaatatcccccagcccatcagcaatacatctagagccaacctgaataagctgctgaccgattacaccgaaatgaagaaggcgatcctgcatgtgtactgggaagagttccagaaggaccctgtgggcctgatgagccgggtggcccagcctgccagcaagaagatcgatcagaacaagctgaaacctgagatggacgagaagggcaacctgaccaccgccggctttgcctgctctcagtgtggccagcccctgttcgtgtacaagctggagcaggtgtctgagaagggcaaggcttacaccaactacttcggacggtgcaatgtggccgagcacgaaaagctgatcctgctggcccagctgaagcccgagaaggatagcgacgaagccgtgacatatagcctgggaaagtttgggcagagggccctggatttctacagcattcatgtgaccaaggagtccacccaccccgtgaagcccctggcccagatcgccggaaacagatacgcctccggacctgtgggaaaggccctgagcgacgcatgtatgggcacaatcgcctccttcctgtctaagtaccaggacatcatcatcgaacaccagaaggtggtgaagggcaaccagaagagactggagagcctgcgggagctggccggcaaggaaaacctggaataccctagcgtgaccctgccacctcagcctcacaccaaggagggcgttgatgcctacaacgaagtgatcgcccgggtgcgaatgtgggtgaacctgaacctgtggcagaagctgaagctaagcagagatgatgccaagcctctgctgagactgaagggattcccttcctttcctctggtcgagagacaggccaacgaagtggactggtgggacatggtgtgtaacgtgaagaagctgatcaacgagaaaaaggaggatggcaaggtgttttggcagaatctggctggctacaagagacaggaagccctgagaccatacctgagcagcgaggaagatcggaagaagggaaagaaattcgctcggtaccagctgggcgacctgctgctgcacctggaaaagaagcacggcgaggactggggaaaggtgtacgacgaggcctgggagcggattgacaagaaagtggaaggcctgagcaagcacatcaagctggaagaggaacggagaagcgaggacgcccagagcaaggccgccctgaccgactggctgcgggctaaggccagcttcgtgatcgagggcctgaaggaggccgacaaggacgagttctgcagatgcgagctgaagctgcagaagtggtacggggacctgcggggaaagcccttcgccatcgaagccgagaacagcatcctggacatcagcggcttcagcaagcagtacaactgtgccttcatctggcagaaggacggcgtgaagaagctgaacctgtacctgatcatcaactacttcaagggcggcaagctgcggttcaagaagatcaaacctgaagccttcgaagccaacagattctacaccgtgatcaacaaaaagagcggcgagatcgtgcccatggaggtgaacttcaacttcgacgaccccaacctgatcatcctgcctctggcctttggcaagagacagggcagagaattcatctggaacgacctgctgtccctggaaaccggcagcctgaagctggccaacggaagagtgatcgagaagacactgtacaacagaagaacccggcaggatgagcctgccctgttcgtggccctgaccttcgagcggcgggaggtcctggactcctccaatatcaaaccaatgaacctgatcggcgtggcaagaggcgaaaacatccccgccgtgatcgccctgaccgaccccgagggctgcccactgagccggtttaaggatagcctgggaaacccaacccacatcctgagaatcggcgagagctataaggagaagcagcggaccatccaggccaagaaggaggtggagcagcggagagccggcggctacagccggaagtacgccagcaaagccaagaatctggcagacgatatggtgagaaacaccgctagagatctgctgtactacgccgtgacccaggatgccatgctgatcttcgccaacctgagccggggcttcggccggcagggcaagcggaccttcatggccgagagacagtacacacggatggaggactggctgaccgccaagctggcctacgagggcctgagcaagacctacctgtccaagacactggcccagtacacctccaagacatgcagcaactgtgggtttaccatcaccagcgccgactacgacagggtgctggagaagctgaagaagacagcaacaggctggatgaccacaattaacggcaaggagctgaaggtggagggccagattacctactacaacagatacaagagacagaacgtagtcaaggacctgtccgtcgagctggatagactgagcgaagaatctgtgaacaacgacatctcctcctggacaaagggcagaagcggagaagctctgagcctcctgaagaaaagattctcccatagacccgtgcaggagaagttcgtgtgcctgaactgcggcttcgagacacacgcagccgagcaagccgccctgaacatcgccagatcctggctgttcctgcggagccaggagtacaagaaataccagacaaacaagacaaccggcaacaccgataagagagccttcgtcgagacctggcagtccttttaccggaagaagcttaaggaggtgtggaaacctgccgtgcggtctggcggatctggcggaggctccacaagcgcccacgagctggtgatgttcagggacgtggccatcgacttcagcaaggaggagtgggagtgcctggacctggagcagagggacctgtacagggacgtgatgctggagaactacagcaacatggtgctgctgggcctgtgcatccaccagcccgacatgttcagcctgctggagaagggcaaggagccctggaaggtgctgaggtaccagaccaggggcccctgccccgacatgcagagcaggaccagccccaagaaaaagagaaaagtctaagctgccttctgcggggcttgccttctggccatgcccttcttctctcccttgcacctgtacctcttggtctttgaataaagcctgagtaggaaggctagcaaaaaaaaaaaaaaaaaaaaaaaaaaaaaaaaaaaaaaaaaaaaaaaaaaaaaaaaaaaaaaaaaaaaaaaaaaaaaaaa

SEQ ID NO: 2587 - RNA, 5419 nt, synthetic construct
  source 1..5419: mol_type = other RNA
aggaaataagagagaaaagaagagtaagaagaaatataagagccaccatggcccctaagaagaagcgtaaagtgagccgggtgaacggcagcggcagcggcggcggcatgaaccacgaccaggagttcgacccccctaaggtgtaccctcccgtccccgccgagaagagaaagcccatccgggtcctgagcctgttcgatggcatcgccaccggtctgctggtgctgaaggacctgggcatccaggtggataggtacattgcctccgaggtgtgcgaggactccatcaccgtgggaatggtgcgtcatcagggcaagatcatgtacgtgggcgacgtgcggagcgtgacacagaagcatatccaggagtggggccctttcgacctggtgatcggcggcagcccttgcaatgacctgagcatcgtgaacccagcccggaagggcctgtacgagggaaccggcagactgttcttcgagttttacagactgctgcacgacgcccggcctaaggaaggcgacgaccggcccttcttttggctgttcgagaatgtggtggccatgggagtcagcgacaagcgggatattagccggttcctggagagcaaccccgtgatgatcgatgccaaggaagtgagcgccgcccaccgggccagatacttctggggcaatctgcctggcatgaacagacccctggccagcaccgtgaacgacaagctggagctgcaggagtgcctggagcacggccggatcgccaagttcagcaaggtgagaaccatcaccacccgaagcaacagcatcaaacaaggcaaggaccagcactttcctgtgttcatgaacgagaaggaggacatcctgtggtgtaccgagatggagagagtgttcgggttcccagtccactacacagatgtcagcaacatgtctagactggccagacagagactgctgggaagaagctggtccgtccctgtgatcagacacctgttcgcccctctgaaggagtacttcgcctgcgtgagcagcggcaacagcaacgccaacagccggggccccagcttctctagcggcctggtgccactgtccctgagagggagccacatgggccccatggagatctacaaaaccgtgagcgcctggaagcggcagcctgtgcgcgtgctgagcctgtttcggaatatcgataaagtcctgaaaagcctgggattcctggagagcggctctggctccggcggtggcaccctgaagtacgtggaggatgtgacaaacgtggtcagacgggatgtggagaagtggggccccttcgatctggtgtacggcagcacccaacccctgggcagctcttgtgaccggtgccctggctggtacatgtttcagttccaccggatcctgcagtacgccctgccgagacaggagtcccagcggccattcttttggattttcatggacaacttgctgctgaccgaggatgaccaggaaactaccactcggttcctgcagaccgaagccgtgaccctgcaggacgtgagaggccgggactaccagaacgccatgcgggtgtggtccaacatccctggactgaaaagcaagcacgcacctctgacccctaaagaagaggagtacctgcaggcccaggtgcggagcagaagcaagctggacgcccctaaggtggatctgctggtgaagaattgcctcctgcccctgagagagtacttcaagtatttcagccagaatagtctgcccctgggcggcccaagcagcggcgcccctcctcccagcggcggcagcccagccggctccccaacctctaccgaggagggcacctctgagtccgccacccccgagagcggccctggcacctccaccgagcccagcgagggcagcgcacccggcagccctgccggcagccccacctccacagaggagggaaccagcaccgagcccagcgaaggcagcgccccaggcaccagcaccgagcctagtgagggcggctctggcggcggcagcgcccaggagattaaacggatcaacaagatcagaagaagacttgtgaaagacagcaacaccaagaaggccggcaagacaggccccatgaaaaccctgctggttagagtgatgacacccgatctgagagagcggctggaaaacctgagaaagaagcctgaaaatatcccccagcccatcagcaatacatctagagccaacctgaataagctgctgaccgattacaccgaaatgaagaaggcgatcctgcatgtgtactgggaagagttccagaaggaccctgtgggcctgatgagccgggtggcccagcctgccagcaagaagatcgatcagaacaagctgaaacctgagatggacgagaagggcaacctgaccaccgccggctttgcctgctctcagtgtggccagcccctgttcgtgtacaagctggagcaggtgtctgagaagggcaaggcttacaccaactacttcggacggtgcaatgtggccgagcacgaaaagctgatcctgctggcccagctgaagcccgagaaggatagcgacgaagccgtgacatatagcctgggaaagtttgggcagagggccctggatttctacagcattcatgtgaccaaggagtccacccaccccgtgaagcccctggcccagatcgccggaaacagatacgcctccggacctgtgggaaaggccctgagcgacgcatgtatgggcacaatcgcctccttcctgtctaagtaccaggacatcatcatcgaacaccagaaggtggtgaagggcaaccagaagagactggagagcctgcgggagctggccggcaaggaaaacctggaataccctagcgtgaccctgccacctcagcctcacaccaaggagggcgttgatgcctacaacgaagtgatcgcccgggtgcgaatgtgggtgaacctgaacctgtggcagaagctgaagctaagcagagatgatgccaagcctctgctgagactgaagggattcccttcctttcctctggtcgagagacaggccaacgaagtggactggtgggacatggtgtgtaacgtgaagaagctgatcaacgagaaaaaggaggatggcaaggtgttttggcagaatctggctggctacaagagacaggaagccctgagaccatacctgagcagcgaggaagatcggaagaagggaaagaaattcgctcggtaccagctgggcgacctgctgctgcacctggaaaagaagcacggcgaggactggggaaaggtgtacgacgaggcctgggagcggattgacaagaaagtggaaggcctgagcaagcacatcaagctggaagaggaacggagaagcgaggacgcccagagcaaggccgccctgaccgactggctgcgggctaaggccagcttcgtgatcgagggcctgaaggaggccgacaaggacgagttctgcagatgcgagctgaagctgcagaagtggtacggggacctgcggggaaagcccttcgccatcgaagccgagaacagcatcctggacatcagcggcttcagcaagcagtacaactgtgccttcatctggcagaaggacggcgtgaagaagctgaacctgtacctgatcatcaactacttcaagggcggcaagctgcggttcaagaagatcaaacctgaagccttcgaagccaacagattctacaccgtgatcaacaaaaagagcggcgagatcgtgcccatggaggtgaacttcaacttcgacgaccccaacctgatcatcctgcctctggcctttggcaagagacagggcagagaattcatctggaacgacctgctgtccctggaaaccggcagcctgaagctggccaacggaagagtgatcgagaagacactgtacaacagaagaacccggcaggatgagcctgccctgttcgtggccctgaccttcgagcggcgggaggtcctggactcctccaatatcaaaccaatgaacctgatcggcgtggcaagaggcgaaaacatccccgccgtgatcgccctgaccgaccccgagggctgcccactgagccggtttaaggatagcctgggaaacccaacccacatcctgagaatcggcgagagctataaggagaagcagcggaccatccaggccaagaaggaggtggagcagcggagagccggcggctacagccggaagtacgccagcaaagccaagaatctggcagacgatatggtgagaaacaccgctagagatctgctgtactacgccgtgacccaggatgccatgctgatcttcgccaacctgagccggggcttcggccggcagggcaagcggaccttcatggccgagagacagtacacacggatggaggactggctgaccgccaagctggcctacgagggcctgagcaagacctacctgtccaagacactggcccagtacacctccaagacatgcagcaactgtgggtttaccatcaccagcgccgactacgacagggtgctggagaagctgaagaagacagcaacaggctggatgaccacaattaacggcaaggagctgaaggtggagggccagattacctactacaacagatacaagagacagaacgtagtcaaggacctgtccgtcgagctggatagactgagcgaagaatctgtgaacaacgacatctcctcctggacaaagggcagaagcggagaagctctgagcctcctgaagaaaagattctcccatagacccgtgcaggagaagttcgtgtgcctgaactgcggcttcgagacacacgcagccgagcaagccgccctgaacatcgccagatcctggctgttcctgcggagccaggagtacaagaaataccagacaaacaagacaaccggcaacaccgataagagagccttcgtcgagacctggcagtccttttaccggaagaagcttaaggaggtgtggaaacctgccgtgcggtctggcggatctggcggaggctccacaagccaggaccccagcgccgagggcctgagcgaggaggtgcccgtggtgttcgaggagctgcccgtggtgttcgaggacgtggccgtgtacttcaccaggaaggagtggggcatgctggacaagaggcagaaggagctgtacagggacgtgatgaggatgaactacgagctgctggccagcctgggccccgccgccgccaagcccgacctgatcagcaagctggagaggagggccgccccctggatcaccagccccaagaaaaagagaaaagtctaagctgccttctgcggggcttgccttctggccatgcccttcttctctcccttgcacctgtacctcttggtctttgaataaagcctgagtaggaaggctagcaaaaaaaaaaaaaaaaaaaaaaaaaaaaaaaaaaaaaaaaaaaaaaaaaaaaaaaaaaaaaaaaaaaaaaaaaaaaaaaa

SEQ ID NO: 2588 - RNA, 5419 nt, synthetic construct
  source 1..5419: mol_type = other RNA
aggaaataagagagaaaagaagagtaagaagaaatataagagccaccatggcccctaagaagaagcgtaaagtgagccgggtgaacggcagcggcagcggcggcggcatgaaccacgaccaggagttcgacccccctaaggtgtaccctcccgtccccgccgagaagagaaagcccatccgggtcctgagcctgttcgatggcatcgccaccggtctgctggtgctgaaggacctgggcatccaggtggataggtacattgcctccgaggtgtgcgaggactccatcaccgtgggaatggtgcgtcatcagggcaagatcatgtacgtgggcgacgtgcggagcgtgacacagaagcatatccaggagtggggccctttcgacctggtgatcggcggcagcccttgcaatgacctgagcatcgtgaacccagcccggaagggcctgtacgagggaaccggcagactgttcttcgagttttacagactgctgcacgacgcccggcctaaggaaggcgacgaccggcccttcttttggctgttcgagaatgtggtggccatgggagtcagcgacaagcgggatattagccggttcctggagagcaaccccgtgatgatcgatgccaaggaagtgagcgccgcccaccgggccagatacttctggggcaatctgcctggcatgaacagacccctggccagcaccgtgaacgacaagctggagctgcaggagtgcctggagcacggccggatcgccaagttcagcaaggtgagaaccatcaccacccgaagcaacagcatcaaacaaggcaaggaccagcactttcctgtgttcatgaacgagaaggaggacatcctgtggtgtaccgagatggagagagtgttcgggttcccagtccactacacagatgtcagcaacatgtctagactggccagacagagactgctgggaagaagctggtccgtccctgtgatcagacacctgttcgcccctctgaaggagtacttcgcctgcgtgagcagcggcaacagcaacgccaacagccggggccccagcttctctagcggcctggtgccactgtccctgagagggagccacatgggccccatggagatctacaaaaccgtgagcgcctggaagcggcagcctgtgcgcgtgctgagcctgtttcggaatatcgataaagtcctgaaaagcctgggattcctggagagcggctctggctccggcggtggcaccctgaagtacgtggaggatgtgacaaacgtggtcagacgggatgtggagaagtggggccccttcgatctggtgtacggcagcacccaacccctgggcagctcttgtgaccggtgccctggctggtacatgtttcagttccaccggatcctgcagtacgccctgccgagacaggagtcccagcggccattcttttggattttcatggacaacttgctgctgaccgaggatgaccaggaaactaccactcggttcctgcagaccgaagccgtgaccctgcaggacgtgagaggccgggactaccagaacgccatgcgggtgtggtccaacatccctggactgaaaagcaagcacgcacctctgacccctaaagaagaggagtacctgcaggcccaggtgcggagcagaagcaagctggacgcccctaaggtggatctgctggtgaagaattgcctcctgcccctgagagagtacttcaagtatttcagccagaatagtctgcccctgggcggcccaagcagcggcgcccctcctcccagcggcggcagcccagccggctccccaacctctaccgaggagggcacctctgagtccgccacccccgagagcggccctggcacctccaccgagcccagcgagggcagcgcacccggcagccctgccggcagccccacctccacagaggagggaaccagcaccgagcccagcgaaggcagcgccccaggcaccagcaccgagcctagtgagggcggctctggcggcggcagcgcccaggagattaaacggatcaacaagatcagaagaagacttgtgaaagacagcaacaccaagaaggccggcaagacaggccccatgaaaaccctgctggttagagtgatgacacccgatctgagagagcggctggaaaacctgagaaagaagcctgaaaatatcccccagcccatcagcaatacatctagagccaacctgaataagctgctgaccgattacaccgaaatgaagaaggcgatcctgcatgtgtactgggaagagttccagaaggaccctgtgggcctgatgagccgggtggcccagcctgccagcaagaagatcgatcagaacaagctgaaacctgagatggacgagaagggcaacctgaccaccgccggctttgcctgctctcagtgtggccagcccctgttcgtgtacaagctggagcaggtgtctgagaagggcaaggcttacaccaactacttcggacggtgcaatgtggccgagcacgaaaagctgatcctgctggcccagctgaagcccgagaaggatagcgacgaagccgtgacatatagcctgggaaagtttgggcagagggccctggatttctacagcattcatgtgaccaaggagtccacccaccccgtgaagcccctggcccagatcgccggaaacagatacgcctccggacctgtgggaaaggccctgagcgacgcatgtatgggcacaatcgcctccttcctgtctaagtaccaggacatcatcatcgaacaccagaaggtggtgaagggcaaccagaagagactggagagcctgcgggagctggccggcaaggaaaacctggaataccctagcgtgaccctgccacctcagcctcacaccaaggagggcgttgatgcctacaacgaagtgatcgcccgggtgcgaatgtgggtgaacctgaacctgtggcagaagctgaagctaagcagagatgatgccaagcctctgctgagactgaagggattcccttcctttcctctggtcgagagacaggccaacgaagtggactggtgggacatggtgtgtaacgtgaagaagctgatcaacgagaaaaaggaggatggcaaggtgttttggcagaatctggctggctacaagagacaggaagccctgagaccatacctgagcagcgaggaagatcggaagaagggaaagaaattcgctcggtaccagctgggcgacctgctgctgcacctggaaaagaagcacggcgaggactggggaaaggtgtacgacgaggcctgggagcggattgacaagaaagtggaaggcctgagcaagcacatcaagctggaagaggaacggagaagcgaggacgcccagagcaaggccgccctgaccgactggctgcgggctaaggccagcttcgtgatcgagggcctgaaggaggccgacaaggacgagttctgcagatgcgagctgaagctgcagaagtggtacggggacctgcggggaaagcccttcgccatcgaagccgagaacagcatcctggacatcagcggcttcagcaagcagtacaactgtgccttcatctggcagaaggacggcgtgaagaagctgaacctgtacctgatcatcaactacttcaagggcggcaagctgcggttcaagaagatcaaacctgaagccttcgaagccaacagattctacaccgtgatcaacaaaaagagcggcgagatcgtgcccatggaggtgaacttcaacttcgacgaccccaacctgatcatcctgcctctggcctttggcaagagacagggcagagaattcatctggaacgacctgctgtccctggaaaccggcagcctgaagctggccaacggaagagtgatcgagaagacactgtacaacagaagaacccggcaggatgagcctgccctgttcgtggccctgaccttcgagcggcgggaggtcctggactcctccaatatcaaaccaatgaacctgatcggcgtggcaagaggcgaaaacatccccgccgtgatcgccctgaccgaccccgagggctgcccactgagccggtttaaggatagcctgggaaacccaacccacatcctgagaatcggcgagagctataaggagaagcagcggaccatccaggccaagaaggaggtggagcagcggagagccggcggctacagccggaagtacgccagcaaagccaagaatctggcagacgatatggtgagaaacaccgctagagatctgctgtactacgccgtgacccaggatgccatgctgatcttcgccaacctgagccggggcttcggccggcagggcaagcggaccttcatggccgagagacagtacacacggatggaggactggctgaccgccaagctggcctacgagggcctgagcaagacctacctgtccaagacactggcccagtacacctccaagacatgcagcaactgtgggtttaccatcaccagcgccgactacgacagggtgctggagaagctgaagaagacagcaacaggctggatgaccacaattaacggcaaggagctgaaggtggagggccagattacctactacaacagatacaagagacagaacgtagtcaaggacctgtccgtcgagctggatagactgagcgaagaatctgtgaacaacgacatctcctcctggacaaagggcagaagcggagaagctctgagcctcctgaagaaaagattctcccatagacccgtgcaggagaagttcgtgtgcctgaactgcggcttcgagacacacgcagccgagcaagccgccctgaacatcgccagatcctggctgttcctgcggagccaggagtacaagaaataccagacaaacaagacaaccggcaacaccgataagagagccttcgtcgagacctggcagtccttttaccggaagaagcttaaggaggtgtggaaacctgccgtgcggtctggcggatctggcggaggctccacaagcgccgtgaccatggaggacgtgaccgtgaccttcaccaacgaggagtgggccctgctgaaccccgcccagaagaggctgtacggcgacgtgatgtgggagaccttcaggaccatcagcgccatcggcaggacctgggacagccagcagatggaggaggagtacaagaactacctgaggaacctgagcaacgaggaggtggccaagtgctgcaggtacaccaccttcaaccagcacgagaacatcaccagccccaagaaaaagagaaaagtctaagctgccttctgcggggcttgccttctggccatgcccttcttctctcccttgcacctgtacctcttggtctttgaataaagcctgagtaggaaggctagcaaaaaaaaaaaaaaaaaaaaaaaaaaaaaaaaaaaaaaaaaaaaaaaaaaaaaaaaaaaaaaaaaaaaaaaaaaaaaaaa

SEQ ID NO: 2589 - RNA, 5419 nt, synthetic construct
  source 1..5419: mol_type = other RNA
aggaaataagagagaaaagaagagtaagaagaaatataagagccaccatggcccctaagaagaagcgtaaagtgagccgggtgaacggcagcggcagcggcggcggcatgaaccacgaccaggagttcgacccccctaaggtgtaccctcccgtccccgccgagaagagaaagcccatccgggtcctgagcctgttcgatggcatcgccaccggtctgctggtgctgaaggacctgggcatccaggtggataggtacattgcctccgaggtgtgcgaggactccatcaccgtgggaatggtgcgtcatcagggcaagatcatgtacgtgggcgacgtgcggagcgtgacacagaagcatatccaggagtggggccctttcgacctggtgatcggcggcagcccttgcaatgacctgagcatcgtgaacccagcccggaagggcctgtacgagggaaccggcagactgttcttcgagttttacagactgctgcacgacgcccggcctaaggaaggcgacgaccggcccttcttttggctgttcgagaatgtggtggccatgggagtcagcgacaagcgggatattagccggttcctggagagcaaccccgtgatgatcgatgccaaggaagtgagcgccgcccaccgggccagatacttctggggcaatctgcctggcatgaacagacccctggccagcaccgtgaacgacaagctggagctgcaggagtgcctggagcacggccggatcgccaagttcagcaaggtgagaaccatcaccacccgaagcaacagcatcaaacaaggcaaggaccagcactttcctgtgttcatgaacgagaaggaggacatcctgtggtgtaccgagatggagagagtgttcgggttcccagtccactacacagatgtcagcaacatgtctagactggccagacagagactgctgggaagaagctggtccgtccctgtgatcagacacctgttcgcccctctgaaggagtacttcgcctgcgtgagcagcggcaacagcaacgccaacagccggggccccagcttctctagcggcctggtgccactgtccctgagagggagccacatgggccccatggagatctacaaaaccgtgagcgcctggaagcggcagcctgtgcgcgtgctgagcctgtttcggaatatcgataaagtcctgaaaagcctgggattcctggagagcggctctggctccggcggtggcaccctgaagtacgtggaggatgtgacaaacgtggtcagacgggatgtggagaagtggggccccttcgatctggtgtacggcagcacccaacccctgggcagctcttgtgaccggtgccctggctggtacatgtttcagttccaccggatcctgcagtacgccctgccgagacaggagtcccagcggccattcttttggattttcatggacaacttgctgctgaccgaggatgaccaggaaactaccactcggttcctgcagaccgaagccgtgaccctgcaggacgtgagaggccgggactaccagaacgccatgcgggtgtggtccaacatccctggactgaaaagcaagcacgcacctctgacccctaaagaagaggagtacctgcaggcccaggtgcggagcagaagcaagctggacgcccctaaggtggatctgctggtgaagaattgcctcctgcccctgagagagtacttcaagtatttcagccagaatagtctgcccctgggcggcccaagcagcggcgcccctcctcccagcggcggcagcccagccggctccccaacctctaccgaggagggcacctctgagtccgccacccccgagagcggccctggcacctccaccgagcccagcgagggcagcgcacccggcagccctgccggcagccccacctccacagaggagggaaccagcaccgagcccagcgaaggcagcgccccaggcaccagcaccgagcctagtgagggcggctctggcggcggcagcgcccaggagattaaacggatcaacaagatcagaagaagacttgtgaaagacagcaacaccaagaaggccggcaagacaggccccatgaaaaccctgctggttagagtgatgacacccgatctgagagagcggctggaaaacctgagaaagaagcctgaaaatatcccccagcccatcagcaatacatctagagccaacctgaataagctgctgaccgattacaccgaaatgaagaaggcgatcctgcatgtgtactgggaagagttccagaaggaccctgtgggcctgatgagccgggtggcccagcctgccagcaagaagatcgatcagaacaagctgaaacctgagatggacgagaagggcaacctgaccaccgccggctttgcctgctctcagtgtggccagcccctgttcgtgtacaagctggagcaggtgtctgagaagggcaaggcttacaccaactacttcggacggtgcaatgtggccgagcacgaaaagctgatcctgctggcccagctgaagcccgagaaggatagcgacgaagccgtgacatatagcctgggaaagtttgggcagagggccctggatttctacagcattcatgtgaccaaggagtccacccaccccgtgaagcccctggcccagatcgccggaaacagatacgcctccggacctgtgggaaaggccctgagcgacgcatgtatgggcacaatcgcctccttcctgtctaagtaccaggacatcatcatcgaacaccagaaggtggtgaagggcaaccagaagagactggagagcctgcgggagctggccggcaaggaaaacctggaataccctagcgtgaccctgccacctcagcctcacaccaaggagggcgttgatgcctacaacgaagtgatcgcccgggtgcgaatgtgggtgaacctgaacctgtggcagaagctgaagctaagcagagatgatgccaagcctctgctgagactgaagggattcccttcctttcctctggtcgagagacaggccaacgaagtggactggtgggacatggtgtgtaacgtgaagaagctgatcaacgagaaaaaggaggatggcaaggtgttttggcagaatctggctggctacaagagacaggaagccctgagaccatacctgagcagcgaggaagatcggaagaagggaaagaaattcgctcggtaccagctgggcgacctgctgctgcacctggaaaagaagcacggcgaggactggggaaaggtgtacgacgaggcctgggagcggattgacaagaaagtggaaggcctgagcaagcacatcaagctggaagaggaacggagaagcgaggacgcccagagcaaggccgccctgaccgactggctgcgggctaaggccagcttcgtgatcgagggcctgaaggaggccgacaaggacgagttctgcagatgcgagctgaagctgcagaagtggtacggggacctgcggggaaagcccttcgccatcgaagccgagaacagcatcctggacatcagcggcttcagcaagcagtacaactgtgccttcatctggcagaaggacggcgtgaagaagctgaacctgtacctgatcatcaactacttcaagggcggcaagctgcggttcaagaagatcaaacctgaagccttcgaagccaacagattctacaccgtgatcaacaaaaagagcggcgagatcgtgcccatggaggtgaacttcaacttcgacgaccccaacctgatcatcctgcctctggcctttggcaagagacagggcagagaattcatctggaacgacctgctgtccctggaaaccggcagcctgaagctggccaacggaagagtgatcgagaagacactgtacaacagaagaacccggcaggatgagcctgccctgttcgtggccctgaccttcgagcggcgggaggtcctggactcctccaatatcaaaccaatgaacctgatcggcgtggcaagaggcgaaaacatccccgccgtgatcgccctgaccgaccccgagggctgcccactgagccggtttaaggatagcctgggaaacccaacccacatcctgagaatcggcgagagctataaggagaagcagcggaccatccaggccaagaaggaggtggagcagcggagagccggcggctacagccggaagtacgccagcaaagccaagaatctggcagacgatatggtgagaaacaccgctagagatctgctgtactacgccgtgacccaggatgccatgctgatcttcgccaacctgagccggggcttcggccggcagggcaagcggaccttcatggccgagagacagtacacacggatggaggactggctgaccgccaagctggcctacgagggcctgagcaagacctacctgtccaagacactggcccagtacacctccaagacatgcagcaactgtgggtttaccatcaccagcgccgactacgacagggtgctggagaagctgaagaagacagcaacaggctggatgaccacaattaacggcaaggagctgaaggtggagggccagattacctactacaacagatacaagagacagaacgtagtcaaggacctgtccgtcgagctggatagactgagcgaagaatctgtgaacaacgacatctcctcctggacaaagggcagaagcggagaagctctgagcctcctgaagaaaagattctcccatagacccgtgcaggagaagttcgtgtgcctgaactgcggcttcgagacacacgcagccgagcaagccgccctgaacatcgccagatcctggctgttcctgcggagccaggagtacaagaaataccagacaaacaagacaaccggcaacaccgataagagagccttcgtcgagacctggcagtccttttaccggaagaagcttaaggaggtgtggaaacctgccgtgcggtctggcggatctggcggaggctccacaagcatgaacaccgtgacctacgacgacgtgcacatcggcttcacctgggaggagtggaccctgctggaccccagccagaagaacctgtacaaggacgtgatgctggagacctacaggaacctggccatcatcggctacagctgggaggaccacaacatcgaggagcactaccagaacagcaggaggcacgagaggcacgagaggagccagaccggcatgaagaccagcgtgcacacccagtgcagcaccagccccaagaaaaagagaaaagtctaagctgccttctgcggggcttgccttctggccatgcccttcttctctcccttgcacctgtacctcttggtctttgaataaagcctgagtaggaaggctagcaaaaaaaaaaaaaaaaaaaaaaaaaaaaaaaaaaaaaaaaaaaaaaaaaaaaaaaaaaaaaaaaaaaaaaaaaaaaaaaa

SEQ ID NO: 2590 - RNA, 5419 nt, synthetic construct
  source 1..5419: mol_type = other RNA
aggaaataagagagaaaagaagagtaagaagaaatataagagccaccatggcccctaagaagaagcgtaaagtgagccgggtgaacggcagcggcagcggcggcggcatgaaccacgaccaggagttcgacccccctaaggtgtaccctcccgtccccgccgagaagagaaagcccatccgggtcctgagcctgttcgatggcatcgccaccggtctgctggtgctgaaggacctgggcatccaggtggataggtacattgcctccgaggtgtgcgaggactccatcaccgtgggaatggtgcgtcatcagggcaagatcatgtacgtgggcgacgtgcggagcgtgacacagaagcatatccaggagtggggccctttcgacctggtgatcggcggcagcccttgcaatgacctgagcatcgtgaacccagcccggaagggcctgtacgagggaaccggcagactgttcttcgagttttacagactgctgcacgacgcccggcctaaggaaggcgacgaccggcccttcttttggctgttcgagaatgtggtggccatgggagtcagcgacaagcgggatattagccggttcctggagagcaaccccgtgatgatcgatgccaaggaagtgagcgccgcccaccgggccagatacttctggggcaatctgcctggcatgaacagacccctggccagcaccgtgaacgacaagctggagctgcaggagtgcctggagcacggccggatcgccaagttcagcaaggtgagaaccatcaccacccgaagcaacagcatcaaacaaggcaaggaccagcactttcctgtgttcatgaacgagaaggaggacatcctgtggtgtaccgagatggagagagtgttcgggttcccagtccactacacagatgtcagcaacatgtctagactggccagacagagactgctgggaagaagctggtccgtccctgtgatcagacacctgttcgcccctctgaaggagtacttcgcctgcgtgagcagcggcaacagcaacgccaacagccggggccccagcttctctagcggcctggtgccactgtccctgagagggagccacatgggccccatggagatctacaaaaccgtgagcgcctggaagcggcagcctgtgcgcgtgctgagcctgtttcggaatatcgataaagtcctgaaaagcctgggattcctggagagcggctctggctccggcggtggcaccctgaagtacgtggaggatgtgacaaacgtggtcagacgggatgtggagaagtggggccccttcgatctggtgtacggcagcacccaacccctgggcagctcttgtgaccggtgccctggctggtacatgtttcagttccaccggatcctgcagtacgccctgccgagacaggagtcccagcggccattcttttggattttcatggacaacttgctgctgaccgaggatgaccaggaaactaccactcggttcctgcagaccgaagccgtgaccctgcaggacgtgagaggccgggactaccagaacgccatgcgggtgtggtccaacatccctggactgaaaagcaagcacgcacctctgacccctaaagaagaggagtacctgcaggcccaggtgcggagcagaagcaagctggacgcccctaaggtggatctgctggtgaagaattgcctcctgcccctgagagagtacttcaagtatttcagccagaatagtctgcccctgggcggcccaagcagcggcgcccctcctcccagcggcggcagcccagccggctccccaacctctaccgaggagggcacctctgagtccgccacccccgagagcggccctggcacctccaccgagcccagcgagggcagcgcacccggcagccctgccggcagccccacctccacagaggagggaaccagcaccgagcccagcgaaggcagcgccccaggcaccagcaccgagcctagtgagggcggctctggcggcggcagcgcccaggagattaaacggatcaacaagatcagaagaagacttgtgaaagacagcaacaccaagaaggccggcaagacaggccccatgaaaaccctgctggttagagtgatgacacccgatctgagagagcggctggaaaacctgagaaagaagcctgaaaatatcccccagcccatcagcaatacatctagagccaacctgaataagctgctgaccgattacaccgaaatgaagaaggcgatcctgcatgtgtactgggaagagttccagaaggaccctgtgggcctgatgagccgggtggcccagcctgccagcaagaagatcgatcagaacaagctgaaacctgagatggacgagaagggcaacctgaccaccgccggctttgcctgctctcagtgtggccagcccctgttcgtgtacaagctggagcaggtgtctgagaagggcaaggcttacaccaactacttcggacggtgcaatgtggccgagcacgaaaagctgatcctgctggcccagctgaagcccgagaaggatagcgacgaagccgtgacatatagcctgggaaagtttgggcagagggccctggatttctacagcattcatgtgaccaaggagtccacccaccccgtgaagcccctggcccagatcgccggaaacagatacgcctccggacctgtgggaaaggccctgagcgacgcatgtatgggcacaatcgcctccttcctgtctaagtaccaggacatcatcatcgaacaccagaaggtggtgaagggcaaccagaagagactggagagcctgcgggagctggccggcaaggaaaacctggaataccctagcgtgaccctgccacctcagcctcacaccaaggagggcgttgatgcctacaacgaagtgatcgcccgggtgcgaatgtgggtgaacctgaacctgtggcagaagctgaagctaagcagagatgatgccaagcctctgctgagactgaagggattcccttcctttcctctggtcgagagacaggccaacgaagtggactggtgggacatggtgtgtaacgtgaagaagctgatcaacgagaaaaaggaggatggcaaggtgttttggcagaatctggctggctacaagagacaggaagccctgagaccatacctgagcagcgaggaagatcggaagaagggaaagaaattcgctcggtaccagctgggcgacctgctgctgcacctggaaaagaagcacggcgaggactggggaaaggtgtacgacgaggcctgggagcggattgacaagaaagtggaaggcctgagcaagcacatcaagctggaagaggaacggagaagcgaggacgcccagagcaaggccgccctgaccgactggctgcgggctaaggccagcttcgtgatcgagggcctgaaggaggccgacaaggacgagttctgcagatgcgagctgaagctgcagaagtggtacggggacctgcggggaaagcccttcgccatcgaagccgagaacagcatcctggacatcagcggcttcagcaagcagtacaactgtgccttcatctggcagaaggacggcgtgaagaagctgaacctgtacctgatcatcaactacttcaagggcggcaagctgcggttcaagaagatcaaacctgaagccttcgaagccaacagattctacaccgtgatcaacaaaaagagcggcgagatcgtgcccatggaggtgaacttcaacttcgacgaccccaacctgatcatcctgcctctggcctttggcaagagacagggcagagaattcatctggaacgacctgctgtccctggaaaccggcagcctgaagctggccaacggaagagtgatcgagaagacactgtacaacagaagaacccggcaggatgagcctgccctgttcgtggccctgaccttcgagcggcgggaggtcctggactcctccaatatcaaaccaatgaacctgatcggcgtggcaagaggcgaaaacatccccgccgtgatcgccctgaccgaccccgagggctgcccactgagccggtttaaggatagcctgggaaacccaacccacatcctgagaatcggcgagagctataaggagaagcagcggaccatccaggccaagaaggaggtggagcagcggagagccggcggctacagccggaagtacgccagcaaagccaagaatctggcagacgatatggtgagaaacaccgctagagatctgctgtactacgccgtgacccaggatgccatgctgatcttcgccaacctgagccggggcttcggccggcagggcaagcggaccttcatggccgagagacagtacacacggatggaggactggctgaccgccaagctggcctacgagggcctgagcaagacctacctgtccaagacactggcccagtacacctccaagacatgcagcaactgtgggtttaccatcaccagcgccgactacgacagggtgctggagaagctgaagaagacagcaacaggctggatgaccacaattaacggcaaggagctgaaggtggagggccagattacctactacaacagatacaagagacagaacgtagtcaaggacctgtccgtcgagctggatagactgagcgaagaatctgtgaacaacgacatctcctcctggacaaagggcagaagcggagaagctctgagcctcctgaagaaaagattctcccatagacccgtgcaggagaagttcgtgtgcctgaactgcggcttcgagacacacgcagccgagcaagccgccctgaacatcgccagatcctggctgttcctgcggagccaggagtacaagaaataccagacaaacaagacaaccggcaacaccgataagagagccttcgtcgagacctggcagtccttttaccggaagaagcttaaggaggtgtggaaacctgccgtgcggtctggcggatctggcggaggctccacaagcttccagaacagcctgacctacgacgacgtgcacatcaacttcacctgcgaggagtgggccctgctggacgccagccagaagaggctgtacaaggacgtgatgctggagacctacagcaacctgaccgccatcggctacaagtgggaggaccacaacatcgaggagcactgccagaggttcaggaggaggggcaggcacaagaggagcaggaccgaggagaggccctacgagtgcaagcagtgcaccagccccaagaaaaagagaaaagtctaagctgccttctgcggggcttgccttctggccatgcccttcttctctcccttgcacctgtacctcttggtctttgaataaagcctgagtaggaaggctagcaaaaaaaaaaaaaaaaaaaaaaaaaaaaaaaaaaaaaaaaaaaaaaaaaaaaaaaaaaaaaaaaaaaaaaaaaaaaaaaa

SEQ ID NO: 2591 - RNA, 5419 nt, synthetic construct
  source 1..5419: mol_type = other RNA
aggaaataagagagaaaagaagagtaagaagaaatataagagccaccatggcccctaagaagaagcgtaaagtgagccgggtgaacggcagcggcagcggcggcggcatgaaccacgaccaggagttcgacccccctaaggtgtaccctcccgtccccgccgagaagagaaagcccatccgggtcctgagcctgttcgatggcatcgccaccggtctgctggtgctgaaggacctgggcatccaggtggataggtacattgcctccgaggtgtgcgaggactccatcaccgtgggaatggtgcgtcatcagggcaagatcatgtacgtgggcgacgtgcggagcgtgacacagaagcatatccaggagtggggccctttcgacctggtgatcggcggcagcccttgcaatgacctgagcatcgtgaacccagcccggaagggcctgtacgagggaaccggcagactgttcttcgagttttacagactgctgcacgacgcccggcctaaggaaggcgacgaccggcccttcttttggctgttcgagaatgtggtggccatgggagtcagcgacaagcgggatattagccggttcctggagagcaaccccgtgatgatcgatgccaaggaagtgagcgccgcccaccgggccagatacttctggggcaatctgcctggcatgaacagacccctggccagcaccgtgaacgacaagctggagctgcaggagtgcctggagcacggccggatcgccaagttcagcaaggtgagaaccatcaccacccgaagcaacagcatcaaacaaggcaaggaccagcactttcctgtgttcatgaacgagaaggaggacatcctgtggtgtaccgagatggagagagtgttcgggttcccagtccactacacagatgtcagcaacatgtctagactggccagacagagactgctgggaagaagctggtccgtccctgtgatcagacacctgttcgcccctctgaaggagtacttcgcctgcgtgagcagcggcaacagcaacgccaacagccggggccccagcttctctagcggcctggtgccactgtccctgagagggagccacatgggccccatggagatctacaaaaccgtgagcgcctggaagcggcagcctgtgcgcgtgctgagcctgtttcggaatatcgataaagtcctgaaaagcctgggattcctggagagcggctctggctccggcggtggcaccctgaagtacgtggaggatgtgacaaacgtggtcagacgggatgtggagaagtggggccccttcgatctggtgtacggcagcacccaacccctgggcagctcttgtgaccggtgccctggctggtacatgtttcagttccaccggatcctgcagtacgccctgccgagacaggagtcccagcggccattcttttggattttcatggacaacttgctgctgaccgaggatgaccaggaaactaccactcggttcctgcagaccgaagccgtgaccctgcaggacgtgagaggccgggactaccagaacgccatgcgggtgtggtccaacatccctggactgaaaagcaagcacgcacctctgacccctaaagaagaggagtacctgcaggcccaggtgcggagcagaagcaagctggacgcccctaaggtggatctgctggtgaagaattgcctcctgcccctgagagagtacttcaagtatttcagccagaatagtctgcccctgggcggcccaagcagcggcgcccctcctcccagcggcggcagcccagccggctccccaacctctaccgaggagggcacctctgagtccgccacccccgagagcggccctggcacctccaccgagcccagcgagggcagcgcacccggcagccctgccggcagccccacctccacagaggagggaaccagcaccgagcccagcgaaggcagcgccccaggcaccagcaccgagcctagtgagggcggctctggcggcggcagcgcccaggagattaaacggatcaacaagatcagaagaagacttgtgaaagacagcaacaccaagaaggccggcaagacaggccccatgaaaaccctgctggttagagtgatgacacccgatctgagagagcggctggaaaacctgagaaagaagcctgaaaatatcccccagcccatcagcaatacatctagagccaacctgaataagctgctgaccgattacaccgaaatgaagaaggcgatcctgcatgtgtactgggaagagttccagaaggaccctgtgggcctgatgagccgggtggcccagcctgccagcaagaagatcgatcagaacaagctgaaacctgagatggacgagaagggcaacctgaccaccgccggctttgcctgctctcagtgtggccagcccctgttcgtgtacaagctggagcaggtgtctgagaagggcaaggcttacaccaactacttcggacggtgcaatgtggccgagcacgaaaagctgatcctgctggcccagctgaagcccgagaaggatagcgacgaagccgtgacatatagcctgggaaagtttgggcagagggccctggatttctacagcattcatgtgaccaaggagtccacccaccccgtgaagcccctggcccagatcgccggaaacagatacgcctccggacctgtgggaaaggccctgagcgacgcatgtatgggcacaatcgcctccttcctgtctaagtaccaggacatcatcatcgaacaccagaaggtggtgaagggcaaccagaagagactggagagcctgcgggagctggccggcaaggaaaacctggaataccctagcgtgaccctgccacctcagcctcacaccaaggagggcgttgatgcctacaacgaagtgatcgcccgggtgcgaatgtgggtgaacctgaacctgtggcagaagctgaagctaagcagagatgatgccaagcctctgctgagactgaagggattcccttcctttcctctggtcgagagacaggccaacgaagtggactggtgggacatggtgtgtaacgtgaagaagctgatcaacgagaaaaaggaggatggcaaggtgttttggcagaatctggctggctacaagagacaggaagccctgagaccatacctgagcagcgaggaagatcggaagaagggaaagaaattcgctcggtaccagctgggcgacctgctgctgcacctggaaaagaagcacggcgaggactggggaaaggtgtacgacgaggcctgggagcggattgacaagaaagtggaaggcctgagcaagcacatcaagctggaagaggaacggagaagcgaggacgcccagagcaaggccgccctgaccgactggctgcgggctaaggccagcttcgtgatcgagggcctgaaggaggccgacaaggacgagttctgcagatgcgagctgaagctgcagaagtggtacggggacctgcggggaaagcccttcgccatcgaagccgagaacagcatcctggacatcagcggcttcagcaagcagtacaactgtgccttcatctggcagaaggacggcgtgaagaagctgaacctgtacctgatcatcaactacttcaagggcggcaagctgcggttcaagaagatcaaacctgaagccttcgaagccaacagattctacaccgtgatcaacaaaaagagcggcgagatcgtgcccatggaggtgaacttcaacttcgacgaccccaacctgatcatcctgcctctggcctttggcaagagacagggcagagaattcatctggaacgacctgctgtccctggaaaccggcagcctgaagctggccaacggaagagtgatcgagaagacactgtacaacagaagaacccggcaggatgagcctgccctgttcgtggccctgaccttcgagcggcgggaggtcctggactcctccaatatcaaaccaatgaacctgatcggcgtggcaagaggcgaaaacatccccgccgtgatcgccctgaccgaccccgagggctgcccactgagccggtttaaggatagcctgggaaacccaacccacatcctgagaatcggcgagagctataaggagaagcagcggaccatccaggccaagaaggaggtggagcagcggagagccggcggctacagccggaagtacgccagcaaagccaagaatctggcagacgatatggtgagaaacaccgctagagatctgctgtactacgccgtgacccaggatgccatgctgatcttcgccaacctgagccggggcttcggccggcagggcaagcggaccttcatggccgagagacagtacacacggatggaggactggctgaccgccaagctggcctacgagggcctgagcaagacctacctgtccaagacactggcccagtacacctccaagacatgcagcaactgtgggtttaccatcaccagcgccgactacgacagggtgctggagaagctgaagaagacagcaacaggctggatgaccacaattaacggcaaggagctgaaggtggagggccagattacctactacaacagatacaagagacagaacgtagtcaaggacctgtccgtcgagctggatagactgagcgaagaatctgtgaacaacgacatctcctcctggacaaagggcagaagcggagaagctctgagcctcctgaagaaaagattctcccatagacccgtgcaggagaagttcgtgtgcctgaactgcggcttcgagacacacgcagccgagcaagccgccctgaacatcgccagatcctggctgttcctgcggagccaggagtacaagaaataccagacaaacaagacaaccggcaacaccgataagagagccttcgtcgagacctggcagtccttttaccggaagaagcttaaggaggtgtggaaacctgccgtgcggtctggcggatctggcggaggctccacaagcagcaaggcccccatcaccttcggcgacctggccatctacttcagccaggaggagtgggagtggctgagccccatccagaaggacctgtacgaggacgtgatgctggagaactacaggaacctggtgagcctgggcctgagcttcaggaggcccaacgtgatcaccctgctggagaagggcaaggccccctggatggtggagcccgtgaggaggaggagggcccccgagctggtgaccgtggccaccagccccaagaaaaagagaaaagtctaagctgccttctgcggggcttgccttctggccatgcccttcttctctcccttgcacctgtacctcttggtctttgaataaagcctgagtaggaaggctagcaaaaaaaaaaaaaaaaaaaaaaaaaaaaaaaaaaaaaaaaaaaaaaaaaaaaaaaaaaaaaaaaaaaaaaaaaaaaaaaa

SEQ ID NO: 2592 - RNA, 5419 nt, synthetic construct
  source 1..5419: mol_type = other RNA
aggaaataagagagaaaagaagagtaagaagaaatataagagccaccatggcccctaagaagaagcgtaaagtgagccgggtgaacggcagcggcagcggcggcggcatgaaccacgaccaggagttcgacccccctaaggtgtaccctcccgtccccgccgagaagagaaagcccatccgggtcctgagcctgttcgatggcatcgccaccggtctgctggtgctgaaggacctgggcatccaggtggataggtacattgcctccgaggtgtgcgaggactccatcaccgtgggaatggtgcgtcatcagggcaagatcatgtacgtgggcgacgtgcggagcgtgacacagaagcatatccaggagtggggccctttcgacctggtgatcggcggcagcccttgcaatgacctgagcatcgtgaacccagcccggaagggcctgtacgagggaaccggcagactgttcttcgagttttacagactgctgcacgacgcccggcctaaggaaggcgacgaccggcccttcttttggctgttcgagaatgtggtggccatgggagtcagcgacaagcgggatattagccggttcctggagagcaaccccgtgatgatcgatgccaaggaagtgagcgccgcccaccgggccagatacttctggggcaatctgcctggcatgaacagacccctggccagcaccgtgaacgacaagctggagctgcaggagtgcctggagcacggccggatcgccaagttcagcaaggtgagaaccatcaccacccgaagcaacagcatcaaacaaggcaaggaccagcactttcctgtgttcatgaacgagaaggaggacatcctgtggtgtaccgagatggagagagtgttcgggttcccagtccactacacagatgtcagcaacatgtctagactggccagacagagactgctgggaagaagctggtccgtccctgtgatcagacacctgttcgcccctctgaaggagtacttcgcctgcgtgagcagcggcaacagcaacgccaacagccggggccccagcttctctagcggcctggtgccactgtccctgagagggagccacatgggccccatggagatctacaaaaccgtgagcgcctggaagcggcagcctgtgcgcgtgctgagcctgtttcggaatatcgataaagtcctgaaaagcctgggattcctggagagcggctctggctccggcggtggcaccctgaagtacgtggaggatgtgacaaacgtggtcagacgggatgtggagaagtggggccccttcgatctggtgtacggcagcacccaacccctgggcagctcttgtgaccggtgccctggctggtacatgtttcagttccaccggatcctgcagtacgccctgccgagacaggagtcccagcggccattcttttggattttcatggacaacttgctgctgaccgaggatgaccaggaaactaccactcggttcctgcagaccgaagccgtgaccctgcaggacgtgagaggccgggactaccagaacgccatgcgggtgtggtccaacatccctggactgaaaagcaagcacgcacctctgacccctaaagaagaggagtacctgcaggcccaggtgcggagcagaagcaagctggacgcccctaaggtggatctgctggtgaagaattgcctcctgcccctgagagagtacttcaagtatttcagccagaatagtctgcccctgggcggcccaagcagcggcgcccctcctcccagcggcggcagcccagccggctccccaacctctaccgaggagggcacctctgagtccgccacccccgagagcggccctggcacctccaccgagcccagcgagggcagcgcacccggcagccctgccggcagccccacctccacagaggagggaaccagcaccgagcccagcgaaggcagcgccccaggcaccagcaccgagcctagtgagggcggctctggcggcggcagcgcccaggagattaaacggatcaacaagatcagaagaagacttgtgaaagacagcaacaccaagaaggccggcaagacaggccccatgaaaaccctgctggttagagtgatgacacccgatctgagagagcggctggaaaacctgagaaagaagcctgaaaatatcccccagcccatcagcaatacatctagagccaacctgaataagctgctgaccgattacaccgaaatgaagaaggcgatcctgcatgtgtactgggaagagttccagaaggaccctgtgggcctgatgagccgggtggcccagcctgccagcaagaagatcgatcagaacaagctgaaacctgagatggacgagaagggcaacctgaccaccgccggctttgcctgctctcagtgtggccagcccctgttcgtgtacaagctggagcaggtgtctgagaagggcaaggcttacaccaactacttcggacggtgcaatgtggccgagcacgaaaagctgatcctgctggcccagctgaagcccgagaaggatagcgacgaagccgtgacatatagcctgggaaagtttgggcagagggccctggatttctacagcattcatgtgaccaaggagtccacccaccccgtgaagcccctggcccagatcgccggaaacagatacgcctccggacctgtgggaaaggccctgagcgacgcatgtatgggcacaatcgcctccttcctgtctaagtaccaggacatcatcatcgaacaccagaaggtggtgaagggcaaccagaagagactggagagcctgcgggagctggccggcaaggaaaacctggaataccctagcgtgaccctgccacctcagcctcacaccaaggagggcgttgatgcctacaacgaagtgatcgcccgggtgcgaatgtgggtgaacctgaacctgtggcagaagctgaagctaagcagagatgatgccaagcctctgctgagactgaagggattcccttcctttcctctggtcgagagacaggccaacgaagtggactggtgggacatggtgtgtaacgtgaagaagctgatcaacgagaaaaaggaggatggcaaggtgttttggcagaatctggctggctacaagagacaggaagccctgagaccatacctgagcagcgaggaagatcggaagaagggaaagaaattcgctcggtaccagctgggcgacctgctgctgcacctggaaaagaagcacggcgaggactggggaaaggtgtacgacgaggcctgggagcggattgacaagaaagtggaaggcctgagcaagcacatcaagctggaagaggaacggagaagcgaggacgcccagagcaaggccgccctgaccgactggctgcgggctaaggccagcttcgtgatcgagggcctgaaggaggccgacaaggacgagttctgcagatgcgagctgaagctgcagaagtggtacggggacctgcggggaaagcccttcgccatcgaagccgagaacagcatcctggacatcagcggcttcagcaagcagtacaactgtgccttcatctggcagaaggacggcgtgaagaagctgaacctgtacctgatcatcaactacttcaagggcggcaagctgcggttcaagaagatcaaacctgaagccttcgaagccaacagattctacaccgtgatcaacaaaaagagcggcgagatcgtgcccatggaggtgaacttcaacttcgacgaccccaacctgatcatcctgcctctggcctttggcaagagacagggcagagaattcatctggaacgacctgctgtccctggaaaccggcagcctgaagctggccaacggaagagtgatcgagaagacactgtacaacagaagaacccggcaggatgagcctgccctgttcgtggccctgaccttcgagcggcgggaggtcctggactcctccaatatcaaaccaatgaacctgatcggcgtggcaagaggcgaaaacatccccgccgtgatcgccctgaccgaccccgagggctgcccactgagccggtttaaggatagcctgggaaacccaacccacatcctgagaatcggcgagagctataaggagaagcagcggaccatccaggccaagaaggaggtggagcagcggagagccggcggctacagccggaagtacgccagcaaagccaagaatctggcagacgatatggtgagaaacaccgctagagatctgctgtactacgccgtgacccaggatgccatgctgatcttcgccaacctgagccggggcttcggccggcagggcaagcggaccttcatggccgagagacagtacacacggatggaggactggctgaccgccaagctggcctacgagggcctgagcaagacctacctgtccaagacactggcccagtacacctccaagacatgcagcaactgtgggtttaccatcaccagcgccgactacgacagggtgctggagaagctgaagaagacagcaacaggctggatgaccacaattaacggcaaggagctgaaggtggagggccagattacctactacaacagatacaagagacagaacgtagtcaaggacctgtccgtcgagctggatagactgagcgaagaatctgtgaacaacgacatctcctcctggacaaagggcagaagcggagaagctctgagcctcctgaagaaaagattctcccatagacccgtgcaggagaagttcgtgtgcctgaactgcggcttcgagacacacgcagccgagcaagccgccctgaacatcgccagatcctggctgttcctgcggagccaggagtacaagaaataccagacaaacaagacaaccggcaacaccgataagagagccttcgtcgagacctggcagtccttttaccggaagaagcttaaggaggtgtggaaacctgccgtgcggtctggcggatctggcggaggctccacaagcggcaaccagttcagcttccagagcctgctgaccttcaaggacgtggccatcaacttcagcaaggaggagtgggagtgcctgcacaccagccagaggaacctgtacagggacgtgatgctggagaactacagcaacctggtgagcgtgggcctgagcgagagcaagcccgagctggtgacctgcctggagcagaacaaggagccctggatggtgaacatcgacgaggccgagggcctgggccagaccagccccaagaaaaagagaaaagtctaagctgccttctgcggggcttgccttctggccatgcccttcttctctcccttgcacctgtacctcttggtctttgaataaagcctgagtaggaaggctagcaaaaaaaaaaaaaaaaaaaaaaaaaaaaaaaaaaaaaaaaaaaaaaaaaaaaaaaaaaaaaaaaaaaaaaaaaaaaaaaa

SEQ ID NO: 2593 - RNA, 5419 nt, synthetic construct
  source 1..5419: mol_type = other RNA
aggaaataagagagaaaagaagagtaagaagaaatataagagccaccatggcccctaagaagaagcgtaaagtgagccgggtgaacggcagcggcagcggcggcggcatgaaccacgaccaggagttcgacccccctaaggtgtaccctcccgtccccgccgagaagagaaagcccatccgggtcctgagcctgttcgatggcatcgccaccggtctgctggtgctgaaggacctgggcatccaggtggataggtacattgcctccgaggtgtgcgaggactccatcaccgtgggaatggtgcgtcatcagggcaagatcatgtacgtgggcgacgtgcggagcgtgacacagaagcatatccaggagtggggccctttcgacctggtgatcggcggcagcccttgcaatgacctgagcatcgtgaacccagcccggaagggcctgtacgagggaaccggcagactgttcttcgagttttacagactgctgcacgacgcccggcctaaggaaggcgacgaccggcccttcttttggctgttcgagaatgtggtggccatgggagtcagcgacaagcgggatattagccggttcctggagagcaaccccgtgatgatcgatgccaaggaagtgagcgccgcccaccgggccagatacttctggggcaatctgcctggcatgaacagacccctggccagcaccgtgaacgacaagctggagctgcaggagtgcctggagcacggccggatcgccaagttcagcaaggtgagaaccatcaccacccgaagcaacagcatcaaacaaggcaaggaccagcactttcctgtgttcatgaacgagaaggaggacatcctgtggtgtaccgagatggagagagtgttcgggttcccagtccactacacagatgtcagcaacatgtctagactggccagacagagactgctgggaagaagctggtccgtccctgtgatcagacacctgttcgcccctctgaaggagtacttcgcctgcgtgagcagcggcaacagcaacgccaacagccggggccccagcttctctagcggcctggtgccactgtccctgagagggagccacatgggccccatggagatctacaaaaccgtgagcgcctggaagcggcagcctgtgcgcgtgctgagcctgtttcggaatatcgataaagtcctgaaaagcctgggattcctggagagcggctctggctccggcggtggcaccctgaagtacgtggaggatgtgacaaacgtggtcagacgggatgtggagaagtggggccccttcgatctggtgtacggcagcacccaacccctgggcagctcttgtgaccggtgccctggctggtacatgtttcagttccaccggatcctgcagtacgccctgccgagacaggagtcccagcggccattcttttggattttcatggacaacttgctgctgaccgaggatgaccaggaaactaccactcggttcctgcagaccgaagccgtgaccctgcaggacgtgagaggccgggactaccagaacgccatgcgggtgtggtccaacatccctggactgaaaagcaagcacgcacctctgacccctaaagaagaggagtacctgcaggcccaggtgcggagcagaagcaagctggacgcccctaaggtggatctgctggtgaagaattgcctcctgcccctgagagagtacttcaagtatttcagccagaatagtctgcccctgggcggcccaagcagcggcgcccctcctcccagcggcggcagcccagccggctccccaacctctaccgaggagggcacctctgagtccgccacccccgagagcggccctggcacctccaccgagcccagcgagggcagcgcacccggcagccctgccggcagccccacctccacagaggagggaaccagcaccgagcccagcgaaggcagcgccccaggcaccagcaccgagcctagtgagggcggctctggcggcggcagcgcccaggagattaaacggatcaacaagatcagaagaagacttgtgaaagacagcaacaccaagaaggccggcaagacaggccccatgaaaaccctgctggttagagtgatgacacccgatctgagagagcggctggaaaacctgagaaagaagcctgaaaatatcccccagcccatcagcaatacatctagagccaacctgaataagctgctgaccgattacaccgaaatgaagaaggcgatcctgcatgtgtactgggaagagttccagaaggaccctgtgggcctgatgagccgggtggcccagcctgccagcaagaagatcgatcagaacaagctgaaacctgagatggacgagaagggcaacctgaccaccgccggctttgcctgctctcagtgtggccagcccctgttcgtgtacaagctggagcaggtgtctgagaagggcaaggcttacaccaactacttcggacggtgcaatgtggccgagcacgaaaagctgatcctgctggcccagctgaagcccgagaaggatagcgacgaagccgtgacatatagcctgggaaagtttgggcagagggccctggatttctacagcattcatgtgaccaaggagtccacccaccccgtgaagcccctggcccagatcgccggaaacagatacgcctccggacctgtgggaaaggccctgagcgacgcatgtatgggcacaatcgcctccttcctgtctaagtaccaggacatcatcatcgaacaccagaaggtggtgaagggcaaccagaagagactggagagcctgcgggagctggccggcaaggaaaacctggaataccctagcgtgaccctgccacctcagcctcacaccaaggagggcgttgatgcctacaacgaagtgatcgcccgggtgcgaatgtgggtgaacctgaacctgtggcagaagctgaagctaagcagagatgatgccaagcctctgctgagactgaagggattcccttcctttcctctggtcgagagacaggccaacgaagtggactggtgggacatggtgtgtaacgtgaagaagctgatcaacgagaaaaaggaggatggcaaggtgttttggcagaatctggctggctacaagagacaggaagccctgagaccatacctgagcagcgaggaagatcggaagaagggaaagaaattcgctcggtaccagctgggcgacctgctgctgcacctggaaaagaagcacggcgaggactggggaaaggtgtacgacgaggcctgggagcggattgacaagaaagtggaaggcctgagcaagcacatcaagctggaagaggaacggagaagcgaggacgcccagagcaaggccgccctgaccgactggctgcgggctaaggccagcttcgtgatcgagggcctgaaggaggccgacaaggacgagttctgcagatgcgagctgaagctgcagaagtggtacggggacctgcggggaaagcccttcgccatcgaagccgagaacagcatcctggacatcagcggcttcagcaagcagtacaactgtgccttcatctggcagaaggacggcgtgaagaagctgaacctgtacctgatcatcaactacttcaagggcggcaagctgcggttcaagaagatcaaacctgaagccttcgaagccaacagattctacaccgtgatcaacaaaaagagcggcgagatcgtgcccatggaggtgaacttcaacttcgacgaccccaacctgatcatcctgcctctggcctttggcaagagacagggcagagaattcatctggaacgacctgctgtccctggaaaccggcagcctgaagctggccaacggaagagtgatcgagaagacactgtacaacagaagaacccggcaggatgagcctgccctgttcgtggccctgaccttcgagcggcgggaggtcctggactcctccaatatcaaaccaatgaacctgatcggcgtggcaagaggcgaaaacatccccgccgtgatcgccctgaccgaccccgagggctgcccactgagccggtttaaggatagcctgggaaacccaacccacatcctgagaatcggcgagagctataaggagaagcagcggaccatccaggccaagaaggaggtggagcagcggagagccggcggctacagccggaagtacgccagcaaagccaagaatctggcagacgatatggtgagaaacaccgctagagatctgctgtactacgccgtgacccaggatgccatgctgatcttcgccaacctgagccggggcttcggccggcagggcaagcggaccttcatggccgagagacagtacacacggatggaggactggctgaccgccaagctggcctacgagggcctgagcaagacctacctgtccaagacactggcccagtacacctccaagacatgcagcaactgtgggtttaccatcaccagcgccgactacgacagggtgctggagaagctgaagaagacagcaacaggctggatgaccacaattaacggcaaggagctgaaggtggagggccagattacctactacaacagatacaagagacagaacgtagtcaaggacctgtccgtcgagctggatagactgagcgaagaatctgtgaacaacgacatctcctcctggacaaagggcagaagcggagaagctctgagcctcctgaagaaaagattctcccatagacccgtgcaggagaagttcgtgtgcctgaactgcggcttcgagacacacgcagccgagcaagccgccctgaacatcgccagatcctggctgttcctgcggagccaggagtacaagaaataccagacaaacaagacaaccggcaacaccgataagagagccttcgtcgagacctggcagtccttttaccggaagaagcttaaggaggtgtggaaacctgccgtgcggtctggcggatctggcggaggctccacaagcatggccttcgaggacgtggccgtgtacttcagccaggaggagtggggcctgctggacaccgcccagagggccctgtacaggagggtgatgctggacaacttcgccctggtggccagcctgggcctgagcaccagcaggcccagggtggtgatccagctggagaggggcgaggagccctgggtgcccagcaggaccgacaccatcctgagcaggaacacctacaggaggaggaaccccggcagcaccagccccaagaaaaagagaaaagtctaagctgccttctgcggggcttgccttctggccatgcccttcttctctcccttgcacctgtacctcttggtctttgaataaagcctgagtaggaaggctagcaaaaaaaaaaaaaaaaaaaaaaaaaaaaaaaaaaaaaaaaaaaaaaaaaaaaaaaaaaaaaaaaaaaaaaaaaaaaaaaa

SEQ ID NO: 2594 - RNA, 5419 nt, synthetic construct
  source 1..5419: mol_type = other RNA
aggaaataagagagaaaagaagagtaagaagaaatataagagccaccatggcccctaagaagaagcgtaaagtgagccgggtgaacggcagcggcagcggcggcggcatgaaccacgaccaggagttcgacccccctaaggtgtaccctcccgtccccgccgagaagagaaagcccatccgggtcctgagcctgttcgatggcatcgccaccggtctgctggtgctgaaggacctgggcatccaggtggataggtacattgcctccgaggtgtgcgaggactccatcaccgtgggaatggtgcgtcatcagggcaagatcatgtacgtgggcgacgtgcggagcgtgacacagaagcatatccaggagtggggccctttcgacctggtgatcggcggcagcccttgcaatgacctgagcatcgtgaacccagcccggaagggcctgtacgagggaaccggcagactgttcttcgagttttacagactgctgcacgacgcccggcctaaggaaggcgacgaccggcccttcttttggctgttcgagaatgtggtggccatgggagtcagcgacaagcgggatattagccggttcctggagagcaaccccgtgatgatcgatgccaaggaagtgagcgccgcccaccgggccagatacttctggggcaatctgcctggcatgaacagacccctggccagcaccgtgaacgacaagctggagctgcaggagtgcctggagcacggccggatcgccaagttcagcaaggtgagaaccatcaccacccgaagcaacagcatcaaacaaggcaaggaccagcactttcctgtgttcatgaacgagaaggaggacatcctgtggtgtaccgagatggagagagtgttcgggttcccagtccactacacagatgtcagcaacatgtctagactggccagacagagactgctgggaagaagctggtccgtccctgtgatcagacacctgttcgcccctctgaaggagtacttcgcctgcgtgagcagcggcaacagcaacgccaacagccggggccccagcttctctagcggcctggtgccactgtccctgagagggagccacatgggccccatggagatctacaaaaccgtgagcgcctggaagcggcagcctgtgcgcgtgctgagcctgtttcggaatatcgataaagtcctgaaaagcctgggattcctggagagcggctctggctccggcggtggcaccctgaagtacgtggaggatgtgacaaacgtggtcagacgggatgtggagaagtggggccccttcgatctggtgtacggcagcacccaacccctgggcagctcttgtgaccggtgccctggctggtacatgtttcagttccaccggatcctgcagtacgccctgccgagacaggagtcccagcggccattcttttggattttcatggacaacttgctgctgaccgaggatgaccaggaaactaccactcggttcctgcagaccgaagccgtgaccctgcaggacgtgagaggccgggactaccagaacgccatgcgggtgtggtccaacatccctggactgaaaagcaagcacgcacctctgacccctaaagaagaggagtacctgcaggcccaggtgcggagcagaagcaagctggacgcccctaaggtggatctgctggtgaagaattgcctcctgcccctgagagagtacttcaagtatttcagccagaatagtctgcccctgggcggcccaagcagcggcgcccctcctcccagcggcggcagcccagccggctccccaacctctaccgaggagggcacctctgagtccgccacccccgagagcggccctggcacctccaccgagcccagcgagggcagcgcacccggcagccctgccggcagccccacctccacagaggagggaaccagcaccgagcccagcgaaggcagcgccccaggcaccagcaccgagcctagtgagggcggctctggcggcggcagcgcccaggagattaaacggatcaacaagatcagaagaagacttgtgaaagacagcaacaccaagaaggccggcaagacaggccccatgaaaaccctgctggttagagtgatgacacccgatctgagagagcggctggaaaacctgagaaagaagcctgaaaatatcccccagcccatcagcaatacatctagagccaacctgaataagctgctgaccgattacaccgaaatgaagaaggcgatcctgcatgtgtactgggaagagttccagaaggaccctgtgggcctgatgagccgggtggcccagcctgccagcaagaagatcgatcagaacaagctgaaacctgagatggacgagaagggcaacctgaccaccgccggctttgcctgctctcagtgtggccagcccctgttcgtgtacaagctggagcaggtgtctgagaagggcaaggcttacaccaactacttcggacggtgcaatgtggccgagcacgaaaagctgatcctgctggcccagctgaagcccgagaaggatagcgacgaagccgtgacatatagcctgggaaagtttgggcagagggccctggatttctacagcattcatgtgaccaaggagtccacccaccccgtgaagcccctggcccagatcgccggaaacagatacgcctccggacctgtgggaaaggccctgagcgacgcatgtatgggcacaatcgcctccttcctgtctaagtaccaggacatcatcatcgaacaccagaaggtggtgaagggcaaccagaagagactggagagcctgcgggagctggccggcaaggaaaacctggaataccctagcgtgaccctgccacctcagcctcacaccaaggagggcgttgatgcctacaacgaagtgatcgcccgggtgcgaatgtgggtgaacctgaacctgtggcagaagctgaagctaagcagagatgatgccaagcctctgctgagactgaagggattcccttcctttcctctggtcgagagacaggccaacgaagtggactggtgggacatggtgtgtaacgtgaagaagctgatcaacgagaaaaaggaggatggcaaggtgttttggcagaatctggctggctacaagagacaggaagccctgagaccatacctgagcagcgaggaagatcggaagaagggaaagaaattcgctcggtaccagctgggcgacctgctgctgcacctggaaaagaagcacggcgaggactggggaaaggtgtacgacgaggcctgggagcggattgacaagaaagtggaaggcctgagcaagcacatcaagctggaagaggaacggagaagcgaggacgcccagagcaaggccgccctgaccgactggctgcgggctaaggccagcttcgtgatcgagggcctgaaggaggccgacaaggacgagttctgcagatgcgagctgaagctgcagaagtggtacggggacctgcggggaaagcccttcgccatcgaagccgagaacagcatcctggacatcagcggcttcagcaagcagtacaactgtgccttcatctggcagaaggacggcgtgaagaagctgaacctgtacctgatcatcaactacttcaagggcggcaagctgcggttcaagaagatcaaacctgaagccttcgaagccaacagattctacaccgtgatcaacaaaaagagcggcgagatcgtgcccatggaggtgaacttcaacttcgacgaccccaacctgatcatcctgcctctggcctttggcaagagacagggcagagaattcatctggaacgacctgctgtccctggaaaccggcagcctgaagctggccaacggaagagtgatcgagaagacactgtacaacagaagaacccggcaggatgagcctgccctgttcgtggccctgaccttcgagcggcgggaggtcctggactcctccaatatcaaaccaatgaacctgatcggcgtggcaagaggcgaaaacatccccgccgtgatcgccctgaccgaccccgagggctgcccactgagccggtttaaggatagcctgggaaacccaacccacatcctgagaatcggcgagagctataaggagaagcagcggaccatccaggccaagaaggaggtggagcagcggagagccggcggctacagccggaagtacgccagcaaagccaagaatctggcagacgatatggtgagaaacaccgctagagatctgctgtactacgccgtgacccaggatgccatgctgatcttcgccaacctgagccggggcttcggccggcagggcaagcggaccttcatggccgagagacagtacacacggatggaggactggctgaccgccaagctggcctacgagggcctgagcaagacctacctgtccaagacactggcccagtacacctccaagacatgcagcaactgtgggtttaccatcaccagcgccgactacgacagggtgctggagaagctgaagaagacagcaacaggctggatgaccacaattaacggcaaggagctgaaggtggagggccagattacctactacaacagatacaagagacagaacgtagtcaaggacctgtccgtcgagctggatagactgagcgaagaatctgtgaacaacgacatctcctcctggacaaagggcagaagcggagaagctctgagcctcctgaagaaaagattctcccatagacccgtgcaggagaagttcgtgtgcctgaactgcggcttcgagacacacgcagccgagcaagccgccctgaacatcgccagatcctggctgttcctgcggagccaggagtacaagaaataccagacaaacaagacaaccggcaacaccgataagagagccttcgtcgagacctggcagtccttttaccggaagaagcttaaggaggtgtggaaacctgccgtgcggtctggcggatctggcggaggctccacaagcatggccttcgaggacgtggccgtgtacttcagccaggaggagtggggcctgctggacaccgcccagagggccctgtacaggagggtgatgctggacaacttcgccctggtggccagcctgggcctgagcaccagcaggcccagggtggtgatccagctggagaggggcgaggagccctgggtgcccagcgagaccgacatgaccatgagcaggaacacccacaggaggaggaaccccggcagcaccagccccaagaaaaagagaaaagtctaagctgccttctgcggggcttgccttctggccatgcccttcttctctcccttgcacctgtacctcttggtctttgaataaagcctgagtaggaaggctagcaaaaaaaaaaaaaaaaaaaaaaaaaaaaaaaaaaaaaaaaaaaaaaaaaaaaaaaaaaaaaaaaaaaaaaaaaaaaaaaa

SEQ ID NO: 2595 - RNA, 5419 nt, synthetic construct
  source 1..5419: mol_type = other RNA
aggaaataagagagaaaagaagagtaagaagaaatataagagccaccatggcccctaagaagaagcgtaaagtgagccgggtgaacggcagcggcagcggcggcggcatgaaccacgaccaggagttcgacccccctaaggtgtaccctcccgtccccgccgagaagagaaagcccatccgggtcctgagcctgttcgatggcatcgccaccggtctgctggtgctgaaggacctgggcatccaggtggataggtacattgcctccgaggtgtgcgaggactccatcaccgtgggaatggtgcgtcatcagggcaagatcatgtacgtgggcgacgtgcggagcgtgacacagaagcatatccaggagtggggccctttcgacctggtgatcggcggcagcccttgcaatgacctgagcatcgtgaacccagcccggaagggcctgtacgagggaaccggcagactgttcttcgagttttacagactgctgcacgacgcccggcctaaggaaggcgacgaccggcccttcttttggctgttcgagaatgtggtggccatgggagtcagcgacaagcgggatattagccggttcctggagagcaaccccgtgatgatcgatgccaaggaagtgagcgccgcccaccgggccagatacttctggggcaatctgcctggcatgaacagacccctggccagcaccgtgaacgacaagctggagctgcaggagtgcctggagcacggccggatcgccaagttcagcaaggtgagaaccatcaccacccgaagcaacagcatcaaacaaggcaaggaccagcactttcctgtgttcatgaacgagaaggaggacatcctgtggtgtaccgagatggagagagtgttcgggttcccagtccactacacagatgtcagcaacatgtctagactggccagacagagactgctgggaagaagctggtccgtccctgtgatcagacacctgttcgcccctctgaaggagtacttcgcctgcgtgagcagcggcaacagcaacgccaacagccggggccccagcttctctagcggcctggtgccactgtccctgagagggagccacatgggccccatggagatctacaaaaccgtgagcgcctggaagcggcagcctgtgcgcgtgctgagcctgtttcggaatatcgataaagtcctgaaaagcctgggattcctggagagcggctctggctccggcggtggcaccctgaagtacgtggaggatgtgacaaacgtggtcagacgggatgtggagaagtggggccccttcgatctggtgtacggcagcacccaacccctgggcagctcttgtgaccggtgccctggctggtacatgtttcagttccaccggatcctgcagtacgccctgccgagacaggagtcccagcggccattcttttggattttcatggacaacttgctgctgaccgaggatgaccaggaaactaccactcggttcctgcagaccgaagccgtgaccctgcaggacgtgagaggccgggactaccagaacgccatgcgggtgtggtccaacatccctggactgaaaagcaagcacgcacctctgacccctaaagaagaggagtacctgcaggcccaggtgcggagcagaagcaagctggacgcccctaaggtggatctgctggtgaagaattgcctcctgcccctgagagagtacttcaagtatttcagccagaatagtctgcccctgggcggcccaagcagcggcgcccctcctcccagcggcggcagcccagccggctccccaacctctaccgaggagggcacctctgagtccgccacccccgagagcggccctggcacctccaccgagcccagcgagggcagcgcacccggcagccctgccggcagccccacctccacagaggagggaaccagcaccgagcccagcgaaggcagcgccccaggcaccagcaccgagcctagtgagggcggctctggcggcggcagcgcccaggagattaaacggatcaacaagatcagaagaagacttgtgaaagacagcaacaccaagaaggccggcaagacaggccccatgaaaaccctgctggttagagtgatgacacccgatctgagagagcggctggaaaacctgagaaagaagcctgaaaatatcccccagcccatcagcaatacatctagagccaacctgaataagctgctgaccgattacaccgaaatgaagaaggcgatcctgcatgtgtactgggaagagttccagaaggaccctgtgggcctgatgagccgggtggcccagcctgccagcaagaagatcgatcagaacaagctgaaacctgagatggacgagaagggcaacctgaccaccgccggctttgcctgctctcagtgtggccagcccctgttcgtgtacaagctggagcaggtgtctgagaagggcaaggcttacaccaactacttcggacggtgcaatgtggccgagcacgaaaagctgatcctgctggcccagctgaagcccgagaaggatagcgacgaagccgtgacatatagcctgggaaagtttgggcagagggccctggatttctacagcattcatgtgaccaaggagtccacccaccccgtgaagcccctggcccagatcgccggaaacagatacgcctccggacctgtgggaaaggccctgagcgacgcatgtatgggcacaatcgcctccttcctgtctaagtaccaggacatcatcatcgaacaccagaaggtggtgaagggcaaccagaagagactggagagcctgcgggagctggccggcaaggaaaacctggaataccctagcgtgaccctgccacctcagcctcacaccaaggagggcgttgatgcctacaacgaagtgatcgcccgggtgcgaatgtgggtgaacctgaacctgtggcagaagctgaagctaagcagagatgatgccaagcctctgctgagactgaagggattcccttcctttcctctggtcgagagacaggccaacgaagtggactggtgggacatggtgtgtaacgtgaagaagctgatcaacgagaaaaaggaggatggcaaggtgttttggcagaatctggctggctacaagagacaggaagccctgagaccatacctgagcagcgaggaagatcggaagaagggaaagaaattcgctcggtaccagctgggcgacctgctgctgcacctggaaaagaagcacggcgaggactggggaaaggtgtacgacgaggcctgggagcggattgacaagaaagtggaaggcctgagcaagcacatcaagctggaagaggaacggagaagcgaggacgcccagagcaaggccgccctgaccgactggctgcgggctaaggccagcttcgtgatcgagggcctgaaggaggccgacaaggacgagttctgcagatgcgagctgaagctgcagaagtggtacggggacctgcggggaaagcccttcgccatcgaagccgagaacagcatcctggacatcagcggcttcagcaagcagtacaactgtgccttcatctggcagaaggacggcgtgaagaagctgaacctgtacctgatcatcaactacttcaagggcggcaagctgcggttcaagaagatcaaacctgaagccttcgaagccaacagattctacaccgtgatcaacaaaaagagcggcgagatcgtgcccatggaggtgaacttcaacttcgacgaccccaacctgatcatcctgcctctggcctttggcaagagacagggcagagaattcatctggaacgacctgctgtccctggaaaccggcagcctgaagctggccaacggaagagtgatcgagaagacactgtacaacagaagaacccggcaggatgagcctgccctgttcgtggccctgaccttcgagcggcgggaggtcctggactcctccaatatcaaaccaatgaacctgatcggcgtggcaagaggcgaaaacatccccgccgtgatcgccctgaccgaccccgagggctgcccactgagccggtttaaggatagcctgggaaacccaacccacatcctgagaatcggcgagagctataaggagaagcagcggaccatccaggccaagaaggaggtggagcagcggagagccggcggctacagccggaagtacgccagcaaagccaagaatctggcagacgatatggtgagaaacaccgctagagatctgctgtactacgccgtgacccaggatgccatgctgatcttcgccaacctgagccggggcttcggccggcagggcaagcggaccttcatggccgagagacagtacacacggatggaggactggctgaccgccaagctggcctacgagggcctgagcaagacctacctgtccaagacactggcccagtacacctccaagacatgcagcaactgtgggtttaccatcaccagcgccgactacgacagggtgctggagaagctgaagaagacagcaacaggctggatgaccacaattaacggcaaggagctgaaggtggagggccagattacctactacaacagatacaagagacagaacgtagtcaaggacctgtccgtcgagctggatagactgagcgaagaatctgtgaacaacgacatctcctcctggacaaagggcagaagcggagaagctctgagcctcctgaagaaaagattctcccatagacccgtgcaggagaagttcgtgtgcctgaactgcggcttcgagacacacgcagccgagcaagccgccctgaacatcgccagatcctggctgttcctgcggagccaggagtacaagaaataccagacaaacaagacaaccggcaacaccgataagagagccttcgtcgagacctggcagtccttttaccggaagaagcttaaggaggtgtggaaacctgccgtgcggtctggcggatctggcggaggctccacaagccaccaggaggtggtgaccttcgaggacgtggccgtgtacttcacccagaccgagtgggccggcctgagccccgcccagagggccctgtacaggagcgtgatgctggagatctacggcaacctgaccagcctgggctaccccgtgcccaagcccgccctggtgagcctgctggagaggggcgacctgccctggggcctggagaccagggacgacaggcccgcccagggcaccaaggacatctgcaccagccccaagaaaaagagaaaagtctaagctgccttctgcggggcttgccttctggccatgcccttcttctctcccttgcacctgtacctcttggtctttgaataaagcctgagtaggaaggctagcaaaaaaaaaaaaaaaaaaaaaaaaaaaaaaaaaaaaaaaaaaaaaaaaaaaaaaaaaaaaaaaaaaaaaaaaaaaaaaaa

SEQ ID NO: 2596 - RNA, 5419 nt, synthetic construct
  source 1..5419: mol_type = other RNA
aggaaataagagagaaaagaagagtaagaagaaatataagagccaccatggcccctaagaagaagcgtaaagtgagccgggtgaacggcagcggcagcggcggcggcatgaaccacgaccaggagttcgacccccctaaggtgtaccctcccgtccccgccgagaagagaaagcccatccgggtcctgagcctgttcgatggcatcgccaccggtctgctggtgctgaaggacctgggcatccaggtggataggtacattgcctccgaggtgtgcgaggactccatcaccgtgggaatggtgcgtcatcagggcaagatcatgtacgtgggcgacgtgcggagcgtgacacagaagcatatccaggagtggggccctttcgacctggtgatcggcggcagcccttgcaatgacctgagcatcgtgaacccagcccggaagggcctgtacgagggaaccggcagactgttcttcgagttttacagactgctgcacgacgcccggcctaaggaaggcgacgaccggcccttcttttggctgttcgagaatgtggtggccatgggagtcagcgacaagcgggatattagccggttcctggagagcaaccccgtgatgatcgatgccaaggaagtgagcgccgcccaccgggccagatacttctggggcaatctgcctggcatgaacagacccctggccagcaccgtgaacgacaagctggagctgcaggagtgcctggagcacggccggatcgccaagttcagcaaggtgagaaccatcaccacccgaagcaacagcatcaaacaaggcaaggaccagcactttcctgtgttcatgaacgagaaggaggacatcctgtggtgtaccgagatggagagagtgttcgggttcccagtccactacacagatgtcagcaacatgtctagactggccagacagagactgctgggaagaagctggtccgtccctgtgatcagacacctgttcgcccctctgaaggagtacttcgcctgcgtgagcagcggcaacagcaacgccaacagccggggccccagcttctctagcggcctggtgccactgtccctgagagggagccacatgggccccatggagatctacaaaaccgtgagcgcctggaagcggcagcctgtgcgcgtgctgagcctgtttcggaatatcgataaagtcctgaaaagcctgggattcctggagagcggctctggctccggcggtggcaccctgaagtacgtggaggatgtgacaaacgtggtcagacgggatgtggagaagtggggccccttcgatctggtgtacggcagcacccaacccctgggcagctcttgtgaccggtgccctggctggtacatgtttcagttccaccggatcctgcagtacgccctgccgagacaggagtcccagcggccattcttttggattttcatggacaacttgctgctgaccgaggatgaccaggaaactaccactcggttcctgcagaccgaagccgtgaccctgcaggacgtgagaggccgggactaccagaacgccatgcgggtgtggtccaacatccctggactgaaaagcaagcacgcacctctgacccctaaagaagaggagtacctgcaggcccaggtgcggagcagaagcaagctggacgcccctaaggtggatctgctggtgaagaattgcctcctgcccctgagagagtacttcaagtatttcagccagaatagtctgcccctgggcggcccaagcagcggcgcccctcctcccagcggcggcagcccagccggctccccaacctctaccgaggagggcacctctgagtccgccacccccgagagcggccctggcacctccaccgagcccagcgagggcagcgcacccggcagccctgccggcagccccacctccacagaggagggaaccagcaccgagcccagcgaaggcagcgccccaggcaccagcaccgagcctagtgagggcggctctggcggcggcagcgcccaggagattaaacggatcaacaagatcagaagaagacttgtgaaagacagcaacaccaagaaggccggcaagacaggccccatgaaaaccctgctggttagagtgatgacacccgatctgagagagcggctggaaaacctgagaaagaagcctgaaaatatcccccagcccatcagcaatacatctagagccaacctgaataagctgctgaccgattacaccgaaatgaagaaggcgatcctgcatgtgtactgggaagagttccagaaggaccctgtgggcctgatgagccgggtggcccagcctgccagcaagaagatcgatcagaacaagctgaaacctgagatggacgagaagggcaacctgaccaccgccggctttgcctgctctcagtgtggccagcccctgttcgtgtacaagctggagcaggtgtctgagaagggcaaggcttacaccaactacttcggacggtgcaatgtggccgagcacgaaaagctgatcctgctggcccagctgaagcccgagaaggatagcgacgaagccgtgacatatagcctgggaaagtttgggcagagggccctggatttctacagcattcatgtgaccaaggagtccacccaccccgtgaagcccctggcccagatcgccggaaacagatacgcctccggacctgtgggaaaggccctgagcgacgcatgtatgggcacaatcgcctccttcctgtctaagtaccaggacatcatcatcgaacaccagaaggtggtgaagggcaaccagaagagactggagagcctgcgggagctggccggcaaggaaaacctggaataccctagcgtgaccctgccacctcagcctcacaccaaggagggcgttgatgcctacaacgaagtgatcgcccgggtgcgaatgtgggtgaacctgaacctgtggcagaagctgaagctaagcagagatgatgccaagcctctgctgagactgaagggattcccttcctttcctctggtcgagagacaggccaacgaagtggactggtgggacatggtgtgtaacgtgaagaagctgatcaacgagaaaaaggaggatggcaaggtgttttggcagaatctggctggctacaagagacaggaagccctgagaccatacctgagcagcgaggaagatcggaagaagggaaagaaattcgctcggtaccagctgggcgacctgctgctgcacctggaaaagaagcacggcgaggactggggaaaggtgtacgacgaggcctgggagcggattgacaagaaagtggaaggcctgagcaagcacatcaagctggaagaggaacggagaagcgaggacgcccagagcaaggccgccctgaccgactggctgcgggctaaggccagcttcgtgatcgagggcctgaaggaggccgacaaggacgagttctgcagatgcgagctgaagctgcagaagtggtacggggacctgcggggaaagcccttcgccatcgaagccgagaacagcatcctggacatcagcggcttcagcaagcagtacaactgtgccttcatctggcagaaggacggcgtgaagaagctgaacctgtacctgatcatcaactacttcaagggcggcaagctgcggttcaagaagatcaaacctgaagccttcgaagccaacagattctacaccgtgatcaacaaaaagagcggcgagatcgtgcccatggaggtgaacttcaacttcgacgaccccaacctgatcatcctgcctctggcctttggcaagagacagggcagagaattcatctggaacgacctgctgtccctggaaaccggcagcctgaagctggccaacggaagagtgatcgagaagacactgtacaacagaagaacccggcaggatgagcctgccctgttcgtggccctgaccttcgagcggcgggaggtcctggactcctccaatatcaaaccaatgaacctgatcggcgtggcaagaggcgaaaacatccccgccgtgatcgccctgaccgaccccgagggctgcccactgagccggtttaaggatagcctgggaaacccaacccacatcctgagaatcggcgagagctataaggagaagcagcggaccatccaggccaagaaggaggtggagcagcggagagccggcggctacagccggaagtacgccagcaaagccaagaatctggcagacgatatggtgagaaacaccgctagagatctgctgtactacgccgtgacccaggatgccatgctgatcttcgccaacctgagccggggcttcggccggcagggcaagcggaccttcatggccgagagacagtacacacggatggaggactggctgaccgccaagctggcctacgagggcctgagcaagacctacctgtccaagacactggcccagtacacctccaagacatgcagcaactgtgggtttaccatcaccagcgccgactacgacagggtgctggagaagctgaagaagacagcaacaggctggatgaccacaattaacggcaaggagctgaaggtggagggccagattacctactacaacagatacaagagacagaacgtagtcaaggacctgtccgtcgagctggatagactgagcgaagaatctgtgaacaacgacatctcctcctggacaaagggcagaagcggagaagctctgagcctcctgaagaaaagattctcccatagacccgtgcaggagaagttcgtgtgcctgaactgcggcttcgagacacacgcagccgagcaagccgccctgaacatcgccagatcctggctgttcctgcggagccaggagtacaagaaataccagacaaacaagacaaccggcaacaccgataagagagccttcgtcgagacctggcagtccttttaccggaagaagcttaaggaggtgtggaaacctgccgtgcggtctggcggatctggcggaggctccacaagcacccaggtgcccgtgaccttcgaggacgtggccgtgtacttctgcgagggcgagtgggagaccctggccgagtggcagaaggagctgtacagggagaccatgaaggagaactacgagaccctgaccagcctgggcttcagcagcaagaagcccagcctgatcagcaagatcgagagggaggaggacccctgcgtgagggacaagcaggacagcagggacaggaggaggctgaggagctgctggaccagccccaagaaaaagagaaaagtctaagctgccttctgcggggcttgccttctggccatgcccttcttctctcccttgcacctgtacctcttggtctttgaataaagcctgagtaggaaggctagcaaaaaaaaaaaaaaaaaaaaaaaaaaaaaaaaaaaaaaaaaaaaaaaaaaaaaaaaaaaaaaaaaaaaaaaaaaaaaaaa

SEQ ID NO: 2597 - RNA, 5419 nt, synthetic construct
  source 1..5419: mol_type = other RNA
aggaaataagagagaaaagaagagtaagaagaaatataagagccaccatggcccctaagaagaagcgtaaagtgagccgggtgaacggcagcggcagcggcggcggcatgaaccacgaccaggagttcgacccccctaaggtgtaccctcccgtccccgccgagaagagaaagcccatccgggtcctgagcctgttcgatggcatcgccaccggtctgctggtgctgaaggacctgggcatccaggtggataggtacattgcctccgaggtgtgcgaggactccatcaccgtgggaatggtgcgtcatcagggcaagatcatgtacgtgggcgacgtgcggagcgtgacacagaagcatatccaggagtggggccctttcgacctggtgatcggcggcagcccttgcaatgacctgagcatcgtgaacccagcccggaagggcctgtacgagggaaccggcagactgttcttcgagttttacagactgctgcacgacgcccggcctaaggaaggcgacgaccggcccttcttttggctgttcgagaatgtggtggccatgggagtcagcgacaagcgggatattagccggttcctggagagcaaccccgtgatgatcgatgccaaggaagtgagcgccgcccaccgggccagatacttctggggcaatctgcctggcatgaacagacccctggccagcaccgtgaacgacaagctggagctgcaggagtgcctggagcacggccggatcgccaagttcagcaaggtgagaaccatcaccacccgaagcaacagcatcaaacaaggcaaggaccagcactttcctgtgttcatgaacgagaaggaggacatcctgtggtgtaccgagatggagagagtgttcgggttcccagtccactacacagatgtcagcaacatgtctagactggccagacagagactgctgggaagaagctggtccgtccctgtgatcagacacctgttcgcccctctgaaggagtacttcgcctgcgtgagcagcggcaacagcaacgccaacagccggggccccagcttctctagcggcctggtgccactgtccctgagagggagccacatgggccccatggagatctacaaaaccgtgagcgcctggaagcggcagcctgtgcgcgtgctgagcctgtttcggaatatcgataaagtcctgaaaagcctgggattcctggagagcggctctggctccggcggtggcaccctgaagtacgtggaggatgtgacaaacgtggtcagacgggatgtggagaagtggggccccttcgatctggtgtacggcagcacccaacccctgggcagctcttgtgaccggtgccctggctggtacatgtttcagttccaccggatcctgcagtacgccctgccgagacaggagtcccagcggccattcttttggattttcatggacaacttgctgctgaccgaggatgaccaggaaactaccactcggttcctgcagaccgaagccgtgaccctgcaggacgtgagaggccgggactaccagaacgccatgcgggtgtggtccaacatccctggactgaaaagcaagcacgcacctctgacccctaaagaagaggagtacctgcaggcccaggtgcggagcagaagcaagctggacgcccctaaggtggatctgctggtgaagaattgcctcctgcccctgagagagtacttcaagtatttcagccagaatagtctgcccctgggcggcccaagcagcggcgcccctcctcccagcggcggcagcccagccggctccccaacctctaccgaggagggcacctctgagtccgccacccccgagagcggccctggcacctccaccgagcccagcgagggcagcgcacccggcagccctgccggcagccccacctccacagaggagggaaccagcaccgagcccagcgaaggcagcgccccaggcaccagcaccgagcctagtgagggcggctctggcggcggcagcgcccaggagattaaacggatcaacaagatcagaagaagacttgtgaaagacagcaacaccaagaaggccggcaagacaggccccatgaaaaccctgctggttagagtgatgacacccgatctgagagagcggctggaaaacctgagaaagaagcctgaaaatatcccccagcccatcagcaatacatctagagccaacctgaataagctgctgaccgattacaccgaaatgaagaaggcgatcctgcatgtgtactgggaagagttccagaaggaccctgtgggcctgatgagccgggtggcccagcctgccagcaagaagatcgatcagaacaagctgaaacctgagatggacgagaagggcaacctgaccaccgccggctttgcctgctctcagtgtggccagcccctgttcgtgtacaagctggagcaggtgtctgagaagggcaaggcttacaccaactacttcggacggtgcaatgtggccgagcacgaaaagctgatcctgctggcccagctgaagcccgagaaggatagcgacgaagccgtgacatatagcctgggaaagtttgggcagagggccctggatttctacagcattcatgtgaccaaggagtccacccaccccgtgaagcccctggcccagatcgccggaaacagatacgcctccggacctgtgggaaaggccctgagcgacgcatgtatgggcacaatcgcctccttcctgtctaagtaccaggacatcatcatcgaacaccagaaggtggtgaagggcaaccagaagagactggagagcctgcgggagctggccggcaaggaaaacctggaataccctagcgtgaccctgccacctcagcctcacaccaaggagggcgttgatgcctacaacgaagtgatcgcccgggtgcgaatgtgggtgaacctgaacctgtggcagaagctgaagctaagcagagatgatgccaagcctctgctgagactgaagggattcccttcctttcctctggtcgagagacaggccaacgaagtggactggtgggacatggtgtgtaacgtgaagaagctgatcaacgagaaaaaggaggatggcaaggtgttttggcagaatctggctggctacaagagacaggaagccctgagaccatacctgagcagcgaggaagatcggaagaagggaaagaaattcgctcggtaccagctgggcgacctgctgctgcacctggaaaagaagcacggcgaggactggggaaaggtgtacgacgaggcctgggagcggattgacaagaaagtggaaggcctgagcaagcacatcaagctggaagaggaacggagaagcgaggacgcccagagcaaggccgccctgaccgactggctgcgggctaaggccagcttcgtgatcgagggcctgaaggaggccgacaaggacgagttctgcagatgcgagctgaagctgcagaagtggtacggggacctgcggggaaagcccttcgccatcgaagccgagaacagcatcctggacatcagcggcttcagcaagcagtacaactgtgccttcatctggcagaaggacggcgtgaagaagctgaacctgtacctgatcatcaactacttcaagggcggcaagctgcggttcaagaagatcaaacctgaagccttcgaagccaacagattctacaccgtgatcaacaaaaagagcggcgagatcgtgcccatggaggtgaacttcaacttcgacgaccccaacctgatcatcctgcctctggcctttggcaagagacagggcagagaattcatctggaacgacctgctgtccctggaaaccggcagcctgaagctggccaacggaagagtgatcgagaagacactgtacaacagaagaacccggcaggatgagcctgccctgttcgtggccctgaccttcgagcggcgggaggtcctggactcctccaatatcaaaccaatgaacctgatcggcgtggcaagaggcgaaaacatccccgccgtgatcgccctgaccgaccccgagggctgcccactgagccggtttaaggatagcctgggaaacccaacccacatcctgagaatcggcgagagctataaggagaagcagcggaccatccaggccaagaaggaggtggagcagcggagagccggcggctacagccggaagtacgccagcaaagccaagaatctggcagacgatatggtgagaaacaccgctagagatctgctgtactacgccgtgacccaggatgccatgctgatcttcgccaacctgagccggggcttcggccggcagggcaagcggaccttcatggccgagagacagtacacacggatggaggactggctgaccgccaagctggcctacgagggcctgagcaagacctacctgtccaagacactggcccagtacacctccaagacatgcagcaactgtgggtttaccatcaccagcgccgactacgacagggtgctggagaagctgaagaagacagcaacaggctggatgaccacaattaacggcaaggagctgaaggtggagggccagattacctactacaacagatacaagagacagaacgtagtcaaggacctgtccgtcgagctggatagactgagcgaagaatctgtgaacaacgacatctcctcctggacaaagggcagaagcggagaagctctgagcctcctgaagaaaagattctcccatagacccgtgcaggagaagttcgtgtgcctgaactgcggcttcgagacacacgcagccgagcaagccgccctgaacatcgccagatcctggctgttcctgcggagccaggagtacaagaaataccagacaaacaagacaaccggcaacaccgataagagagccttcgtcgagacctggcagtccttttaccggaagaagcttaaggaggtgtggaaacctgccgtgcggtctggcggatctggcggaggctccacaagcgcccacggcagcctgatgttcagcgacgtgagcatcgtgttcagccaggaggagtgggagtgcctggacctggagcagagggacctgtacagggacgtgatgctggagaactacaccaacctggtgagcctgggctgcttcatcagcaagcccgacgtgatcagcctgctggagcagggcaaggagccctggaaggtggtgaggaagaggaggggccagtacgccgacctggagaccaggtacaccagccccaagaaaaagagaaaagtctaagctgccttctgcggggcttgccttctggccatgcccttcttctctcccttgcacctgtacctcttggtctttgaataaagcctgagtaggaaggctagcaaaaaaaaaaaaaaaaaaaaaaaaaaaaaaaaaaaaaaaaaaaaaaaaaaaaaaaaaaaaaaaaaaaaaaaaaaaaaaaa

SEQ ID NO: 2598 - RNA, 5419 nt, synthetic construct
  source 1..5419: mol_type = other RNA
aggaaataagagagaaaagaagagtaagaagaaatataagagccaccatggcccctaagaagaagcgtaaagtgagccgggtgaacggcagcggcagcggcggcggcatgaaccacgaccaggagttcgacccccctaaggtgtaccctcccgtccccgccgagaagagaaagcccatccgggtcctgagcctgttcgatggcatcgccaccggtctgctggtgctgaaggacctgggcatccaggtggataggtacattgcctccgaggtgtgcgaggactccatcaccgtgggaatggtgcgtcatcagggcaagatcatgtacgtgggcgacgtgcggagcgtgacacagaagcatatccaggagtggggccctttcgacctggtgatcggcggcagcccttgcaatgacctgagcatcgtgaacccagcccggaagggcctgtacgagggaaccggcagactgttcttcgagttttacagactgctgcacgacgcccggcctaaggaaggcgacgaccggcccttcttttggctgttcgagaatgtggtggccatgggagtcagcgacaagcgggatattagccggttcctggagagcaaccccgtgatgatcgatgccaaggaagtgagcgccgcccaccgggccagatacttctggggcaatctgcctggcatgaacagacccctggccagcaccgtgaacgacaagctggagctgcaggagtgcctggagcacggccggatcgccaagttcagcaaggtgagaaccatcaccacccgaagcaacagcatcaaacaaggcaaggaccagcactttcctgtgttcatgaacgagaaggaggacatcctgtggtgtaccgagatggagagagtgttcgggttcccagtccactacacagatgtcagcaacatgtctagactggccagacagagactgctgggaagaagctggtccgtccctgtgatcagacacctgttcgcccctctgaaggagtacttcgcctgcgtgagcagcggcaacagcaacgccaacagccggggccccagcttctctagcggcctggtgccactgtccctgagagggagccacatgggccccatggagatctacaaaaccgtgagcgcctggaagcggcagcctgtgcgcgtgctgagcctgtttcggaatatcgataaagtcctgaaaagcctgggattcctggagagcggctctggctccggcggtggcaccctgaagtacgtggaggatgtgacaaacgtggtcagacgggatgtggagaagtggggccccttcgatctggtgtacggcagcacccaacccctgggcagctcttgtgaccggtgccctggctggtacatgtttcagttccaccggatcctgcagtacgccctgccgagacaggagtcccagcggccattcttttggattttcatggacaacttgctgctgaccgaggatgaccaggaaactaccactcggttcctgcagaccgaagccgtgaccctgcaggacgtgagaggccgggactaccagaacgccatgcgggtgtggtccaacatccctggactgaaaagcaagcacgcacctctgacccctaaagaagaggagtacctgcaggcccaggtgcggagcagaagcaagctggacgcccctaaggtggatctgctggtgaagaattgcctcctgcccctgagagagtacttcaagtatttcagccagaatagtctgcccctgggcggcccaagcagcggcgcccctcctcccagcggcggcagcccagccggctccccaacctctaccgaggagggcacctctgagtccgccacccccgagagcggccctggcacctccaccgagcccagcgagggcagcgcacccggcagccctgccggcagccccacctccacagaggagggaaccagcaccgagcccagcgaaggcagcgccccaggcaccagcaccgagcctagtgagggcggctctggcggcggcagcgcccaggagattaaacggatcaacaagatcagaagaagacttgtgaaagacagcaacaccaagaaggccggcaagacaggccccatgaaaaccctgctggttagagtgatgacacccgatctgagagagcggctggaaaacctgagaaagaagcctgaaaatatcccccagcccatcagcaatacatctagagccaacctgaataagctgctgaccgattacaccgaaatgaagaaggcgatcctgcatgtgtactgggaagagttccagaaggaccctgtgggcctgatgagccgggtggcccagcctgccagcaagaagatcgatcagaacaagctgaaacctgagatggacgagaagggcaacctgaccaccgccggctttgcctgctctcagtgtggccagcccctgttcgtgtacaagctggagcaggtgtctgagaagggcaaggcttacaccaactacttcggacggtgcaatgtggccgagcacgaaaagctgatcctgctggcccagctgaagcccgagaaggatagcgacgaagccgtgacatatagcctgggaaagtttgggcagagggccctggatttctacagcattcatgtgaccaaggagtccacccaccccgtgaagcccctggcccagatcgccggaaacagatacgcctccggacctgtgggaaaggccctgagcgacgcatgtatgggcacaatcgcctccttcctgtctaagtaccaggacatcatcatcgaacaccagaaggtggtgaagggcaaccagaagagactggagagcctgcgggagctggccggcaaggaaaacctggaataccctagcgtgaccctgccacctcagcctcacaccaaggagggcgttgatgcctacaacgaagtgatcgcccgggtgcgaatgtgggtgaacctgaacctgtggcagaagctgaagctaagcagagatgatgccaagcctctgctgagactgaagggattcccttcctttcctctggtcgagagacaggccaacgaagtggactggtgggacatggtgtgtaacgtgaagaagctgatcaacgagaaaaaggaggatggcaaggtgttttggcagaatctggctggctacaagagacaggaagccctgagaccatacctgagcagcgaggaagatcggaagaagggaaagaaattcgctcggtaccagctgggcgacctgctgctgcacctggaaaagaagcacggcgaggactggggaaaggtgtacgacgaggcctgggagcggattgacaagaaagtggaaggcctgagcaagcacatcaagctggaagaggaacggagaagcgaggacgcccagagcaaggccgccctgaccgactggctgcgggctaaggccagcttcgtgatcgagggcctgaaggaggccgacaaggacgagttctgcagatgcgagctgaagctgcagaagtggtacggggacctgcggggaaagcccttcgccatcgaagccgagaacagcatcctggacatcagcggcttcagcaagcagtacaactgtgccttcatctggcagaaggacggcgtgaagaagctgaacctgtacctgatcatcaactacttcaagggcggcaagctgcggttcaagaagatcaaacctgaagccttcgaagccaacagattctacaccgtgatcaacaaaaagagcggcgagatcgtgcccatggaggtgaacttcaacttcgacgaccccaacctgatcatcctgcctctggcctttggcaagagacagggcagagaattcatctggaacgacctgctgtccctggaaaccggcagcctgaagctggccaacggaagagtgatcgagaagacactgtacaacagaagaacccggcaggatgagcctgccctgttcgtggccctgaccttcgagcggcgggaggtcctggactcctccaatatcaaaccaatgaacctgatcggcgtggcaagaggcgaaaacatccccgccgtgatcgccctgaccgaccccgagggctgcccactgagccggtttaaggatagcctgggaaacccaacccacatcctgagaatcggcgagagctataaggagaagcagcggaccatccaggccaagaaggaggtggagcagcggagagccggcggctacagccggaagtacgccagcaaagccaagaatctggcagacgatatggtgagaaacaccgctagagatctgctgtactacgccgtgacccaggatgccatgctgatcttcgccaacctgagccggggcttcggccggcagggcaagcggaccttcatggccgagagacagtacacacggatggaggactggctgaccgccaagctggcctacgagggcctgagcaagacctacctgtccaagacactggcccagtacacctccaagacatgcagcaactgtgggtttaccatcaccagcgccgactacgacagggtgctggagaagctgaagaagacagcaacaggctggatgaccacaattaacggcaaggagctgaaggtggagggccagattacctactacaacagatacaagagacagaacgtagtcaaggacctgtccgtcgagctggatagactgagcgaagaatctgtgaacaacgacatctcctcctggacaaagggcagaagcggagaagctctgagcctcctgaagaaaagattctcccatagacccgtgcaggagaagttcgtgtgcctgaactgcggcttcgagacacacgcagccgagcaagccgccctgaacatcgccagatcctggctgttcctgcggagccaggagtacaagaaataccagacaaacaagacaaccggcaacaccgataagagagccttcgtcgagacctggcagtccttttaccggaagaagcttaaggaggtgtggaaacctgccgtgcggtctggcggatctggcggaggctccacaagcagcaaggcccccgtgaccttcggcgacctggccatctacttcagccaggaggagtgggagtggctgagccccatccagaaggacctgtacgaggacgtgatgctggagaactacaggaacctggtgagcctgggcctgagcttcaggaggcccaacgtgatcaccctgctggagaagggcaaggccccctggatggtggagcccgtgaggaggaggagggcccccggctggaccaccatgatgaccagccccaagaaaaagagaaaagtctaagctgccttctgcggggcttgccttctggccatgcccttcttctctcccttgcacctgtacctcttggtctttgaataaagcctgagtaggaaggctagcaaaaaaaaaaaaaaaaaaaaaaaaaaaaaaaaaaaaaaaaaaaaaaaaaaaaaaaaaaaaaaaaaaaaaaaaaaaaaaaa

SEQ ID NO: 2599 - RNA, 5419 nt, synthetic construct
  source 1..5419: mol_type = other RNA
aggaaataagagagaaaagaagagtaagaagaaatataagagccaccatggcccctaagaagaagcgtaaagtgagccgggtgaacggcagcggcagcggcggcggcatgaaccacgaccaggagttcgacccccctaaggtgtaccctcccgtccccgccgagaagagaaagcccatccgggtcctgagcctgttcgatggcatcgccaccggtctgctggtgctgaaggacctgggcatccaggtggataggtacattgcctccgaggtgtgcgaggactccatcaccgtgggaatggtgcgtcatcagggcaagatcatgtacgtgggcgacgtgcggagcgtgacacagaagcatatccaggagtggggccctttcgacctggtgatcggcggcagcccttgcaatgacctgagcatcgtgaacccagcccggaagggcctgtacgagggaaccggcagactgttcttcgagttttacagactgctgcacgacgcccggcctaaggaaggcgacgaccggcccttcttttggctgttcgagaatgtggtggccatgggagtcagcgacaagcgggatattagccggttcctggagagcaaccccgtgatgatcgatgccaaggaagtgagcgccgcccaccgggccagatacttctggggcaatctgcctggcatgaacagacccctggccagcaccgtgaacgacaagctggagctgcaggagtgcctggagcacggccggatcgccaagttcagcaaggtgagaaccatcaccacccgaagcaacagcatcaaacaaggcaaggaccagcactttcctgtgttcatgaacgagaaggaggacatcctgtggtgtaccgagatggagagagtgttcgggttcccagtccactacacagatgtcagcaacatgtctagactggccagacagagactgctgggaagaagctggtccgtccctgtgatcagacacctgttcgcccctctgaaggagtacttcgcctgcgtgagcagcggcaacagcaacgccaacagccggggccccagcttctctagcggcctggtgccactgtccctgagagggagccacatgggccccatggagatctacaaaaccgtgagcgcctggaagcggcagcctgtgcgcgtgctgagcctgtttcggaatatcgataaagtcctgaaaagcctgggattcctggagagcggctctggctccggcggtggcaccctgaagtacgtggaggatgtgacaaacgtggtcagacgggatgtggagaagtggggccccttcgatctggtgtacggcagcacccaacccctgggcagctcttgtgaccggtgccctggctggtacatgtttcagttccaccggatcctgcagtacgccctgccgagacaggagtcccagcggccattcttttggattttcatggacaacttgctgctgaccgaggatgaccaggaaactaccactcggttcctgcagaccgaagccgtgaccctgcaggacgtgagaggccgggactaccagaacgccatgcgggtgtggtccaacatccctggactgaaaagcaagcacgcacctctgacccctaaagaagaggagtacctgcaggcccaggtgcggagcagaagcaagctggacgcccctaaggtggatctgctggtgaagaattgcctcctgcccctgagagagtacttcaagtatttcagccagaatagtctgcccctgggcggcccaagcagcggcgcccctcctcccagcggcggcagcccagccggctccccaacctctaccgaggagggcacctctgagtccgccacccccgagagcggccctggcacctccaccgagcccagcgagggcagcgcacccggcagccctgccggcagccccacctccacagaggagggaaccagcaccgagcccagcgaaggcagcgccccaggcaccagcaccgagcctagtgagggcggctctggcggcggcagcgcccaggagattaaacggatcaacaagatcagaagaagacttgtgaaagacagcaacaccaagaaggccggcaagacaggccccatgaaaaccctgctggttagagtgatgacacccgatctgagagagcggctggaaaacctgagaaagaagcctgaaaatatcccccagcccatcagcaatacatctagagccaacctgaataagctgctgaccgattacaccgaaatgaagaaggcgatcctgcatgtgtactgggaagagttccagaaggaccctgtgggcctgatgagccgggtggcccagcctgccagcaagaagatcgatcagaacaagctgaaacctgagatggacgagaagggcaacctgaccaccgccggctttgcctgctctcagtgtggccagcccctgttcgtgtacaagctggagcaggtgtctgagaagggcaaggcttacaccaactacttcggacggtgcaatgtggccgagcacgaaaagctgatcctgctggcccagctgaagcccgagaaggatagcgacgaagccgtgacatatagcctgggaaagtttgggcagagggccctggatttctacagcattcatgtgaccaaggagtccacccaccccgtgaagcccctggcccagatcgccggaaacagatacgcctccggacctgtgggaaaggccctgagcgacgcatgtatgggcacaatcgcctccttcctgtctaagtaccaggacatcatcatcgaacaccagaaggtggtgaagggcaaccagaagagactggagagcctgcgggagctggccggcaaggaaaacctggaataccctagcgtgaccctgccacctcagcctcacaccaaggagggcgttgatgcctacaacgaagtgatcgcccgggtgcgaatgtgggtgaacctgaacctgtggcagaagctgaagctaagcagagatgatgccaagcctctgctgagactgaagggattcccttcctttcctctggtcgagagacaggccaacgaagtggactggtgggacatggtgtgtaacgtgaagaagctgatcaacgagaaaaaggaggatggcaaggtgttttggcagaatctggctggctacaagagacaggaagccctgagaccatacctgagcagcgaggaagatcggaagaagggaaagaaattcgctcggtaccagctgggcgacctgctgctgcacctggaaaagaagcacggcgaggactggggaaaggtgtacgacgaggcctgggagcggattgacaagaaagtggaaggcctgagcaagcacatcaagctggaagaggaacggagaagcgaggacgcccagagcaaggccgccctgaccgactggctgcgggctaaggccagcttcgtgatcgagggcctgaaggaggccgacaaggacgagttctgcagatgcgagctgaagctgcagaagtggtacggggacctgcggggaaagcccttcgccatcgaagccgagaacagcatcctggacatcagcggcttcagcaagcagtacaactgtgccttcatctggcagaaggacggcgtgaagaagctgaacctgtacctgatcatcaactacttcaagggcggcaagctgcggttcaagaagatcaaacctgaagccttcgaagccaacagattctacaccgtgatcaacaaaaagagcggcgagatcgtgcccatggaggtgaacttcaacttcgacgaccccaacctgatcatcctgcctctggcctttggcaagagacagggcagagaattcatctggaacgacctgctgtccctggaaaccggcagcctgaagctggccaacggaagagtgatcgagaagacactgtacaacagaagaacccggcaggatgagcctgccctgttcgtggccctgaccttcgagcggcgggaggtcctggactcctccaatatcaaaccaatgaacctgatcggcgtggcaagaggcgaaaacatccccgccgtgatcgccctgaccgaccccgagggctgcccactgagccggtttaaggatagcctgggaaacccaacccacatcctgagaatcggcgagagctataaggagaagcagcggaccatccaggccaagaaggaggtggagcagcggagagccggcggctacagccggaagtacgccagcaaagccaagaatctggcagacgatatggtgagaaacaccgctagagatctgctgtactacgccgtgacccaggatgccatgctgatcttcgccaacctgagccggggcttcggccggcagggcaagcggaccttcatggccgagagacagtacacacggatggaggactggctgaccgccaagctggcctacgagggcctgagcaagacctacctgtccaagacactggcccagtacacctccaagacatgcagcaactgtgggtttaccatcaccagcgccgactacgacagggtgctggagaagctgaagaagacagcaacaggctggatgaccacaattaacggcaaggagctgaaggtggagggccagattacctactacaacagatacaagagacagaacgtagtcaaggacctgtccgtcgagctggatagactgagcgaagaatctgtgaacaacgacatctcctcctggacaaagggcagaagcggagaagctctgagcctcctgaagaaaagattctcccatagacccgtgcaggagaagttcgtgtgcctgaactgcggcttcgagacacacgcagccgagcaagccgccctgaacatcgccagatcctggctgttcctgcggagccaggagtacaagaaataccagacaaacaagacaaccggcaacaccgataagagagccttcgtcgagacctggcagtccttttaccggaagaagcttaaggaggtgtggaaacctgccgtgcggtctggcggatctggcggaggctccacaagcttccaggaggccgtgaccttcaaggacgtggccgtggtgttcaccgaggaggagctgggcctgctggaccccccccagaggaagctgtacagggaggtgatgctggagaacttcaggaacctggtgagcgtgggccacagcagcagcaagcccgacgtgatcagccagctggagagggaggagaagctgtgcgtgaaggagatccacacccagaggggcaggcacagcggcggcaggaaccagaccagccccaagaaaaagagaaaagtctaagctgccttctgcggggcttgccttctggccatgcccttcttctctcccttgcacctgtacctcttggtctttgaataaagcctgagtaggaaggctagcaaaaaaaaaaaaaaaaaaaaaaaaaaaaaaaaaaaaaaaaaaaaaaaaaaaaaaaaaaaaaaaaaaaaaaaaaaaaaaaa

SEQ ID NO: 2600 - RNA, 5419 nt, synthetic construct
  source 1..5419: mol_type = other RNA
aggaaataagagagaaaagaagagtaagaagaaatataagagccaccatggcccctaagaagaagcgtaaagtgagccgggtgaacggcagcggcagcggcggcggcatgaaccacgaccaggagttcgacccccctaaggtgtaccctcccgtccccgccgagaagagaaagcccatccgggtcctgagcctgttcgatggcatcgccaccggtctgctggtgctgaaggacctgggcatccaggtggataggtacattgcctccgaggtgtgcgaggactccatcaccgtgggaatggtgcgtcatcagggcaagatcatgtacgtgggcgacgtgcggagcgtgacacagaagcatatccaggagtggggccctttcgacctggtgatcggcggcagcccttgcaatgacctgagcatcgtgaacccagcccggaagggcctgtacgagggaaccggcagactgttcttcgagttttacagactgctgcacgacgcccggcctaaggaaggcgacgaccggcccttcttttggctgttcgagaatgtggtggccatgggagtcagcgacaagcgggatattagccggttcctggagagcaaccccgtgatgatcgatgccaaggaagtgagcgccgcccaccgggccagatacttctggggcaatctgcctggcatgaacagacccctggccagcaccgtgaacgacaagctggagctgcaggagtgcctggagcacggccggatcgccaagttcagcaaggtgagaaccatcaccacccgaagcaacagcatcaaacaaggcaaggaccagcactttcctgtgttcatgaacgagaaggaggacatcctgtggtgtaccgagatggagagagtgttcgggttcccagtccactacacagatgtcagcaacatgtctagactggccagacagagactgctgggaagaagctggtccgtccctgtgatcagacacctgttcgcccctctgaaggagtacttcgcctgcgtgagcagcggcaacagcaacgccaacagccggggccccagcttctctagcggcctggtgccactgtccctgagagggagccacatgggccccatggagatctacaaaaccgtgagcgcctggaagcggcagcctgtgcgcgtgctgagcctgtttcggaatatcgataaagtcctgaaaagcctgggattcctggagagcggctctggctccggcggtggcaccctgaagtacgtggaggatgtgacaaacgtggtcagacgggatgtggagaagtggggccccttcgatctggtgtacggcagcacccaacccctgggcagctcttgtgaccggtgccctggctggtacatgtttcagttccaccggatcctgcagtacgccctgccgagacaggagtcccagcggccattcttttggattttcatggacaacttgctgctgaccgaggatgaccaggaaactaccactcggttcctgcagaccgaagccgtgaccctgcaggacgtgagaggccgggactaccagaacgccatgcgggtgtggtccaacatccctggactgaaaagcaagcacgcacctctgacccctaaagaagaggagtacctgcaggcccaggtgcggagcagaagcaagctggacgcccctaaggtggatctgctggtgaagaattgcctcctgcccctgagagagtacttcaagtatttcagccagaatagtctgcccctgggcggcccaagcagcggcgcccctcctcccagcggcggcagcccagccggctccccaacctctaccgaggagggcacctctgagtccgccacccccgagagcggccctggcacctccaccgagcccagcgagggcagcgcacccggcagccctgccggcagccccacctccacagaggagggaaccagcaccgagcccagcgaaggcagcgccccaggcaccagcaccgagcctagtgagggcggctctggcggcggcagcgcccaggagattaaacggatcaacaagatcagaagaagacttgtgaaagacagcaacaccaagaaggccggcaagacaggccccatgaaaaccctgctggttagagtgatgacacccgatctgagagagcggctggaaaacctgagaaagaagcctgaaaatatcccccagcccatcagcaatacatctagagccaacctgaataagctgctgaccgattacaccgaaatgaagaaggcgatcctgcatgtgtactgggaagagttccagaaggaccctgtgggcctgatgagccgggtggcccagcctgccagcaagaagatcgatcagaacaagctgaaacctgagatggacgagaagggcaacctgaccaccgccggctttgcctgctctcagtgtggccagcccctgttcgtgtacaagctggagcaggtgtctgagaagggcaaggcttacaccaactacttcggacggtgcaatgtggccgagcacgaaaagctgatcctgctggcccagctgaagcccgagaaggatagcgacgaagccgtgacatatagcctgggaaagtttgggcagagggccctggatttctacagcattcatgtgaccaaggagtccacccaccccgtgaagcccctggcccagatcgccggaaacagatacgcctccggacctgtgggaaaggccctgagcgacgcatgtatgggcacaatcgcctccttcctgtctaagtaccaggacatcatcatcgaacaccagaaggtggtgaagggcaaccagaagagactggagagcctgcgggagctggccggcaaggaaaacctggaataccctagcgtgaccctgccacctcagcctcacaccaaggagggcgttgatgcctacaacgaagtgatcgcccgggtgcgaatgtgggtgaacctgaacctgtggcagaagctgaagctaagcagagatgatgccaagcctctgctgagactgaagggattcccttcctttcctctggtcgagagacaggccaacgaagtggactggtgggacatggtgtgtaacgtgaagaagctgatcaacgagaaaaaggaggatggcaaggtgttttggcagaatctggctggctacaagagacaggaagccctgagaccatacctgagcagcgaggaagatcggaagaagggaaagaaattcgctcggtaccagctgggcgacctgctgctgcacctggaaaagaagcacggcgaggactggggaaaggtgtacgacgaggcctgggagcggattgacaagaaagtggaaggcctgagcaagcacatcaagctggaagaggaacggagaagcgaggacgcccagagcaaggccgccctgaccgactggctgcgggctaaggccagcttcgtgatcgagggcctgaaggaggccgacaaggacgagttctgcagatgcgagctgaagctgcagaagtggtacggggacctgcggggaaagcccttcgccatcgaagccgagaacagcatcctggacatcagcggcttcagcaagcagtacaactgtgccttcatctggcagaaggacggcgtgaagaagctgaacctgtacctgatcatcaactacttcaagggcggcaagctgcggttcaagaagatcaaacctgaagccttcgaagccaacagattctacaccgtgatcaacaaaaagagcggcgagatcgtgcccatggaggtgaacttcaacttcgacgaccccaacctgatcatcctgcctctggcctttggcaagagacagggcagagaattcatctggaacgacctgctgtccctggaaaccggcagcctgaagctggccaacggaagagtgatcgagaagacactgtacaacagaagaacccggcaggatgagcctgccctgttcgtggccctgaccttcgagcggcgggaggtcctggactcctccaatatcaaaccaatgaacctgatcggcgtggcaagaggcgaaaacatccccgccgtgatcgccctgaccgaccccgagggctgcccactgagccggtttaaggatagcctgggaaacccaacccacatcctgagaatcggcgagagctataaggagaagcagcggaccatccaggccaagaaggaggtggagcagcggagagccggcggctacagccggaagtacgccagcaaagccaagaatctggcagacgatatggtgagaaacaccgctagagatctgctgtactacgccgtgacccaggatgccatgctgatcttcgccaacctgagccggggcttcggccggcagggcaagcggaccttcatggccgagagacagtacacacggatggaggactggctgaccgccaagctggcctacgagggcctgagcaagacctacctgtccaagacactggcccagtacacctccaagacatgcagcaactgtgggtttaccatcaccagcgccgactacgacagggtgctggagaagctgaagaagacagcaacaggctggatgaccacaattaacggcaaggagctgaaggtggagggccagattacctactacaacagatacaagagacagaacgtagtcaaggacctgtccgtcgagctggatagactgagcgaagaatctgtgaacaacgacatctcctcctggacaaagggcagaagcggagaagctctgagcctcctgaagaaaagattctcccatagacccgtgcaggagaagttcgtgtgcctgaactgcggcttcgagacacacgcagccgagcaagccgccctgaacatcgccagatcctggctgttcctgcggagccaggagtacaagaaataccagacaaacaagacaaccggcaacaccgataagagagccttcgtcgagacctggcagtccttttaccggaagaagcttaaggaggtgtggaaacctgccgtgcggtctggcggatctggcggaggctccacaagcaggcaggccttcctggccttcggcgacgtgaccgtggacttcacccagaaggagtggaggctgctgagccccgcccagagggccctgtacagggaggtgaccctggagaactacagccacctggtgagcctgggcatcctgcacagcaagcccgagctgatcaggaggctggagcagggcgaggtgccctggggcgaggagaggaggaggaggcccggcccctgcgccggcatctacgccgagaccagccccaagaaaaagagaaaagtctaagctgccttctgcggggcttgccttctggccatgcccttcttctctcccttgcacctgtacctcttggtctttgaataaagcctgagtaggaaggctagcaaaaaaaaaaaaaaaaaaaaaaaaaaaaaaaaaaaaaaaaaaaaaaaaaaaaaaaaaaaaaaaaaaaaaaaaaaaaaaaa

SEQ ID NO: 2601 - RNA, 5419 nt, synthetic construct
  source 1..5419: mol_type = other RNA
aggaaataagagagaaaagaagagtaagaagaaatataagagccaccatggcccctaagaagaagcgtaaagtgagccgggtgaacggcagcggcagcggcggcggcatgaaccacgaccaggagttcgacccccctaaggtgtaccctcccgtccccgccgagaagagaaagcccatccgggtcctgagcctgttcgatggcatcgccaccggtctgctggtgctgaaggacctgggcatccaggtggataggtacattgcctccgaggtgtgcgaggactccatcaccgtgggaatggtgcgtcatcagggcaagatcatgtacgtgggcgacgtgcggagcgtgacacagaagcatatccaggagtggggccctttcgacctggtgatcggcggcagcccttgcaatgacctgagcatcgtgaacccagcccggaagggcctgtacgagggaaccggcagactgttcttcgagttttacagactgctgcacgacgcccggcctaaggaaggcgacgaccggcccttcttttggctgttcgagaatgtggtggccatgggagtcagcgacaagcgggatattagccggttcctggagagcaaccccgtgatgatcgatgccaaggaagtgagcgccgcccaccgggccagatacttctggggcaatctgcctggcatgaacagacccctggccagcaccgtgaacgacaagctggagctgcaggagtgcctggagcacggccggatcgccaagttcagcaaggtgagaaccatcaccacccgaagcaacagcatcaaacaaggcaaggaccagcactttcctgtgttcatgaacgagaaggaggacatcctgtggtgtaccgagatggagagagtgttcgggttcccagtccactacacagatgtcagcaacatgtctagactggccagacagagactgctgggaagaagctggtccgtccctgtgatcagacacctgttcgcccctctgaaggagtacttcgcctgcgtgagcagcggcaacagcaacgccaacagccggggccccagcttctctagcggcctggtgccactgtccctgagagggagccacatgggccccatggagatctacaaaaccgtgagcgcctggaagcggcagcctgtgcgcgtgctgagcctgtttcggaatatcgataaagtcctgaaaagcctgggattcctggagagcggctctggctccggcggtggcaccctgaagtacgtggaggatgtgacaaacgtggtcagacgggatgtggagaagtggggccccttcgatctggtgtacggcagcacccaacccctgggcagctcttgtgaccggtgccctggctggtacatgtttcagttccaccggatcctgcagtacgccctgccgagacaggagtcccagcggccattcttttggattttcatggacaacttgctgctgaccgaggatgaccaggaaactaccactcggttcctgcagaccgaagccgtgaccctgcaggacgtgagaggccgggactaccagaacgccatgcgggtgtggtccaacatccctggactgaaaagcaagcacgcacctctgacccctaaagaagaggagtacctgcaggcccaggtgcggagcagaagcaagctggacgcccctaaggtggatctgctggtgaagaattgcctcctgcccctgagagagtacttcaagtatttcagccagaatagtctgcccctgggcggcccaagcagcggcgcccctcctcccagcggcggcagcccagccggctccccaacctctaccgaggagggcacctctgagtccgccacccccgagagcggccctggcacctccaccgagcccagcgagggcagcgcacccggcagccctgccggcagccccacctccacagaggagggaaccagcaccgagcccagcgaaggcagcgccccaggcaccagcaccgagcctagtgagggcggctctggcggcggcagcgcccaggagattaaacggatcaacaagatcagaagaagacttgtgaaagacagcaacaccaagaaggccggcaagacaggccccatgaaaaccctgctggttagagtgatgacacccgatctgagagagcggctggaaaacctgagaaagaagcctgaaaatatcccccagcccatcagcaatacatctagagccaacctgaataagctgctgaccgattacaccgaaatgaagaaggcgatcctgcatgtgtactgggaagagttccagaaggaccctgtgggcctgatgagccgggtggcccagcctgccagcaagaagatcgatcagaacaagctgaaacctgagatggacgagaagggcaacctgaccaccgccggctttgcctgctctcagtgtggccagcccctgttcgtgtacaagctggagcaggtgtctgagaagggcaaggcttacaccaactacttcggacggtgcaatgtggccgagcacgaaaagctgatcctgctggcccagctgaagcccgagaaggatagcgacgaagccgtgacatatagcctgggaaagtttgggcagagggccctggatttctacagcattcatgtgaccaaggagtccacccaccccgtgaagcccctggcccagatcgccggaaacagatacgcctccggacctgtgggaaaggccctgagcgacgcatgtatgggcacaatcgcctccttcctgtctaagtaccaggacatcatcatcgaacaccagaaggtggtgaagggcaaccagaagagactggagagcctgcgggagctggccggcaaggaaaacctggaataccctagcgtgaccctgccacctcagcctcacaccaaggagggcgttgatgcctacaacgaagtgatcgcccgggtgcgaatgtgggtgaacctgaacctgtggcagaagctgaagctaagcagagatgatgccaagcctctgctgagactgaagggattcccttcctttcctctggtcgagagacaggccaacgaagtggactggtgggacatggtgtgtaacgtgaagaagctgatcaacgagaaaaaggaggatggcaaggtgttttggcagaatctggctggctacaagagacaggaagccctgagaccatacctgagcagcgaggaagatcggaagaagggaaagaaattcgctcggtaccagctgggcgacctgctgctgcacctggaaaagaagcacggcgaggactggggaaaggtgtacgacgaggcctgggagcggattgacaagaaagtggaaggcctgagcaagcacatcaagctggaagaggaacggagaagcgaggacgcccagagcaaggccgccctgaccgactggctgcgggctaaggccagcttcgtgatcgagggcctgaaggaggccgacaaggacgagttctgcagatgcgagctgaagctgcagaagtggtacggggacctgcggggaaagcccttcgccatcgaagccgagaacagcatcctggacatcagcggcttcagcaagcagtacaactgtgccttcatctggcagaaggacggcgtgaagaagctgaacctgtacctgatcatcaactacttcaagggcggcaagctgcggttcaagaagatcaaacctgaagccttcgaagccaacagattctacaccgtgatcaacaaaaagagcggcgagatcgtgcccatggaggtgaacttcaacttcgacgaccccaacctgatcatcctgcctctggcctttggcaagagacagggcagagaattcatctggaacgacctgctgtccctggaaaccggcagcctgaagctggccaacggaagagtgatcgagaagacactgtacaacagaagaacccggcaggatgagcctgccctgttcgtggccctgaccttcgagcggcgggaggtcctggactcctccaatatcaaaccaatgaacctgatcggcgtggcaagaggcgaaaacatccccgccgtgatcgccctgaccgaccccgagggctgcccactgagccggtttaaggatagcctgggaaacccaacccacatcctgagaatcggcgagagctataaggagaagcagcggaccatccaggccaagaaggaggtggagcagcggagagccggcggctacagccggaagtacgccagcaaagccaagaatctggcagacgatatggtgagaaacaccgctagagatctgctgtactacgccgtgacccaggatgccatgctgatcttcgccaacctgagccggggcttcggccggcagggcaagcggaccttcatggccgagagacagtacacacggatggaggactggctgaccgccaagctggcctacgagggcctgagcaagacctacctgtccaagacactggcccagtacacctccaagacatgcagcaactgtgggtttaccatcaccagcgccgactacgacagggtgctggagaagctgaagaagacagcaacaggctggatgaccacaattaacggcaaggagctgaaggtggagggccagattacctactacaacagatacaagagacagaacgtagtcaaggacctgtccgtcgagctggatagactgagcgaagaatctgtgaacaacgacatctcctcctggacaaagggcagaagcggagaagctctgagcctcctgaagaaaagattctcccatagacccgtgcaggagaagttcgtgtgcctgaactgcggcttcgagacacacgcagccgagcaagccgccctgaacatcgccagatcctggctgttcctgcggagccaggagtacaagaaataccagacaaacaagacaaccggcaacaccgataagagagccttcgtcgagacctggcagtccttttaccggaagaagcttaaggaggtgtggaaacctgccgtgcggtctggcggatctggcggaggctccacaagcccccaggagagcgtgaccttcaaggacgtggccgtggacttcacctgggaggagtggggctacctggacaccagccagaaggagctgtaccaggaggtgatgctggagaactacaggaacctggtgagcctgggcttcgtggtggccaagcccgacgtgatcagccagctggagcagggcgaggccccctggaggcccgagggcaggttccccaggagcaggcaccccgacagcgacaccaggaccagccccaagaaaaagagaaaagtctaagctgccttctgcggggcttgccttctggccatgcccttcttctctcccttgcacctgtacctcttggtctttgaataaagcctgagtaggaaggctagcaaaaaaaaaaaaaaaaaaaaaaaaaaaaaaaaaaaaaaaaaaaaaaaaaaaaaaaaaaaaaaaaaaaaaaaaaaaaaaaa

SEQ ID NO: 2602 - RNA, 5419 nt, synthetic construct
  source 1..5419: mol_type = other RNA
aggaaataagagagaaaagaagagtaagaagaaatataagagccaccatggcccctaagaagaagcgtaaagtgagccgggtgaacggcagcggcagcggcggcggcatgaaccacgaccaggagttcgacccccctaaggtgtaccctcccgtccccgccgagaagagaaagcccatccgggtcctgagcctgttcgatggcatcgccaccggtctgctggtgctgaaggacctgggcatccaggtggataggtacattgcctccgaggtgtgcgaggactccatcaccgtgggaatggtgcgtcatcagggcaagatcatgtacgtgggcgacgtgcggagcgtgacacagaagcatatccaggagtggggccctttcgacctggtgatcggcggcagcccttgcaatgacctgagcatcgtgaacccagcccggaagggcctgtacgagggaaccggcagactgttcttcgagttttacagactgctgcacgacgcccggcctaaggaaggcgacgaccggcccttcttttggctgttcgagaatgtggtggccatgggagtcagcgacaagcgggatattagccggttcctggagagcaaccccgtgatgatcgatgccaaggaagtgagcgccgcccaccgggccagatacttctggggcaatctgcctggcatgaacagacccctggccagcaccgtgaacgacaagctggagctgcaggagtgcctggagcacggccggatcgccaagttcagcaaggtgagaaccatcaccacccgaagcaacagcatcaaacaaggcaaggaccagcactttcctgtgttcatgaacgagaaggaggacatcctgtggtgtaccgagatggagagagtgttcgggttcccagtccactacacagatgtcagcaacatgtctagactggccagacagagactgctgggaagaagctggtccgtccctgtgatcagacacctgttcgcccctctgaaggagtacttcgcctgcgtgagcagcggcaacagcaacgccaacagccggggccccagcttctctagcggcctggtgccactgtccctgagagggagccacatgggccccatggagatctacaaaaccgtgagcgcctggaagcggcagcctgtgcgcgtgctgagcctgtttcggaatatcgataaagtcctgaaaagcctgggattcctggagagcggctctggctccggcggtggcaccctgaagtacgtggaggatgtgacaaacgtggtcagacgggatgtggagaagtggggccccttcgatctggtgtacggcagcacccaacccctgggcagctcttgtgaccggtgccctggctggtacatgtttcagttccaccggatcctgcagtacgccctgccgagacaggagtcccagcggccattcttttggattttcatggacaacttgctgctgaccgaggatgaccaggaaactaccactcggttcctgcagaccgaagccgtgaccctgcaggacgtgagaggccgggactaccagaacgccatgcgggtgtggtccaacatccctggactgaaaagcaagcacgcacctctgacccctaaagaagaggagtacctgcaggcccaggtgcggagcagaagcaagctggacgcccctaaggtggatctgctggtgaagaattgcctcctgcccctgagagagtacttcaagtatttcagccagaatagtctgcccctgggcggcccaagcagcggcgcccctcctcccagcggcggcagcccagccggctccccaacctctaccgaggagggcacctctgagtccgccacccccgagagcggccctggcacctccaccgagcccagcgagggcagcgcacccggcagccctgccggcagccccacctccacagaggagggaaccagcaccgagcccagcgaaggcagcgccccaggcaccagcaccgagcctagtgagggcggctctggcggcggcagcgcccaggagattaaacggatcaacaagatcagaagaagacttgtgaaagacagcaacaccaagaaggccggcaagacaggccccatgaaaaccctgctggttagagtgatgacacccgatctgagagagcggctggaaaacctgagaaagaagcctgaaaatatcccccagcccatcagcaatacatctagagccaacctgaataagctgctgaccgattacaccgaaatgaagaaggcgatcctgcatgtgtactgggaagagttccagaaggaccctgtgggcctgatgagccgggtggcccagcctgccagcaagaagatcgatcagaacaagctgaaacctgagatggacgagaagggcaacctgaccaccgccggctttgcctgctctcagtgtggccagcccctgttcgtgtacaagctggagcaggtgtctgagaagggcaaggcttacaccaactacttcggacggtgcaatgtggccgagcacgaaaagctgatcctgctggcccagctgaagcccgagaaggatagcgacgaagccgtgacatatagcctgggaaagtttgggcagagggccctggatttctacagcattcatgtgaccaaggagtccacccaccccgtgaagcccctggcccagatcgccggaaacagatacgcctccggacctgtgggaaaggccctgagcgacgcatgtatgggcacaatcgcctccttcctgtctaagtaccaggacatcatcatcgaacaccagaaggtggtgaagggcaaccagaagagactggagagcctgcgggagctggccggcaaggaaaacctggaataccctagcgtgaccctgccacctcagcctcacaccaaggagggcgttgatgcctacaacgaagtgatcgcccgggtgcgaatgtgggtgaacctgaacctgtggcagaagctgaagctaagcagagatgatgccaagcctctgctgagactgaagggattcccttcctttcctctggtcgagagacaggccaacgaagtggactggtgggacatggtgtgtaacgtgaagaagctgatcaacgagaaaaaggaggatggcaaggtgttttggcagaatctggctggctacaagagacaggaagccctgagaccatacctgagcagcgaggaagatcggaagaagggaaagaaattcgctcggtaccagctgggcgacctgctgctgcacctggaaaagaagcacggcgaggactggggaaaggtgtacgacgaggcctgggagcggattgacaagaaagtggaaggcctgagcaagcacatcaagctggaagaggaacggagaagcgaggacgcccagagcaaggccgccctgaccgactggctgcgggctaaggccagcttcgtgatcgagggcctgaaggaggccgacaaggacgagttctgcagatgcgagctgaagctgcagaagtggtacggggacctgcggggaaagcccttcgccatcgaagccgagaacagcatcctggacatcagcggcttcagcaagcagtacaactgtgccttcatctggcagaaggacggcgtgaagaagctgaacctgtacctgatcatcaactacttcaagggcggcaagctgcggttcaagaagatcaaacctgaagccttcgaagccaacagattctacaccgtgatcaacaaaaagagcggcgagatcgtgcccatggaggtgaacttcaacttcgacgaccccaacctgatcatcctgcctctggcctttggcaagagacagggcagagaattcatctggaacgacctgctgtccctggaaaccggcagcctgaagctggccaacggaagagtgatcgagaagacactgtacaacagaagaacccggcaggatgagcctgccctgttcgtggccctgaccttcgagcggcgggaggtcctggactcctccaatatcaaaccaatgaacctgatcggcgtggcaagaggcgaaaacatccccgccgtgatcgccctgaccgaccccgagggctgcccactgagccggtttaaggatagcctgggaaacccaacccacatcctgagaatcggcgagagctataaggagaagcagcggaccatccaggccaagaaggaggtggagcagcggagagccggcggctacagccggaagtacgccagcaaagccaagaatctggcagacgatatggtgagaaacaccgctagagatctgctgtactacgccgtgacccaggatgccatgctgatcttcgccaacctgagccggggcttcggccggcagggcaagcggaccttcatggccgagagacagtacacacggatggaggactggctgaccgccaagctggcctacgagggcctgagcaagacctacctgtccaagacactggcccagtacacctccaagacatgcagcaactgtgggtttaccatcaccagcgccgactacgacagggtgctggagaagctgaagaagacagcaacaggctggatgaccacaattaacggcaaggagctgaaggtggagggccagattacctactacaacagatacaagagacagaacgtagtcaaggacctgtccgtcgagctggatagactgagcgaagaatctgtgaacaacgacatctcctcctggacaaagggcagaagcggagaagctctgagcctcctgaagaaaagattctcccatagacccgtgcaggagaagttcgtgtgcctgaactgcggcttcgagacacacgcagccgagcaagccgccctgaacatcgccagatcctggctgttcctgcggagccaggagtacaagaaataccagacaaacaagacaaccggcaacaccgataagagagccttcgtcgagacctggcagtccttttaccggaagaagcttaaggaggtgtggaaacctgccgtgcggtctggcggatctggcggaggctccacaagcccccagaagctggtgaccttcgaggacgtggccgtgtacttcacccccaccgagtgggacggcctgagccccgcccagagggccctgtacagggacgtgatgctggagaactacggcaacgtggccagcctgggcttccccatcctgaagcccgccgtgatcagccagctggagggcggcggcgagctgggcatccccagcctgctggccgccggcgtgggcagcgacccccccggcctgtggaccagccccaagaaaaagagaaaagtctaagctgccttctgcggggcttgccttctggccatgcccttcttctctcccttgcacctgtacctcttggtctttgaataaagcctgagtaggaaggctagcaaaaaaaaaaaaaaaaaaaaaaaaaaaaaaaaaaaaaaaaaaaaaaaaaaaaaaaaaaaaaaaaaaaaaaaaaaaaaaaa

SEQ ID NO: 2603 - RNA, 5419 nt, synthetic construct
  source 1..5419: mol_type = other RNA
aggaaataagagagaaaagaagagtaagaagaaatataagagccaccatggcccctaagaagaagcgtaaagtgagccgggtgaacggcagcggcagcggcggcggcatgaaccacgaccaggagttcgacccccctaaggtgtaccctcccgtccccgccgagaagagaaagcccatccgggtcctgagcctgttcgatggcatcgccaccggtctgctggtgctgaaggacctgggcatccaggtggataggtacattgcctccgaggtgtgcgaggactccatcaccgtgggaatggtgcgtcatcagggcaagatcatgtacgtgggcgacgtgcggagcgtgacacagaagcatatccaggagtggggccctttcgacctggtgatcggcggcagcccttgcaatgacctgagcatcgtgaacccagcccggaagggcctgtacgagggaaccggcagactgttcttcgagttttacagactgctgcacgacgcccggcctaaggaaggcgacgaccggcccttcttttggctgttcgagaatgtggtggccatgggagtcagcgacaagcgggatattagccggttcctggagagcaaccccgtgatgatcgatgccaaggaagtgagcgccgcccaccgggccagatacttctggggcaatctgcctggcatgaacagacccctggccagcaccgtgaacgacaagctggagctgcaggagtgcctggagcacggccggatcgccaagttcagcaaggtgagaaccatcaccacccgaagcaacagcatcaaacaaggcaaggaccagcactttcctgtgttcatgaacgagaaggaggacatcctgtggtgtaccgagatggagagagtgttcgggttcccagtccactacacagatgtcagcaacatgtctagactggccagacagagactgctgggaagaagctggtccgtccctgtgatcagacacctgttcgcccctctgaaggagtacttcgcctgcgtgagcagcggcaacagcaacgccaacagccggggccccagcttctctagcggcctggtgccactgtccctgagagggagccacatgggccccatggagatctacaaaaccgtgagcgcctggaagcggcagcctgtgcgcgtgctgagcctgtttcggaatatcgataaagtcctgaaaagcctgggattcctggagagcggctctggctccggcggtggcaccctgaagtacgtggaggatgtgacaaacgtggtcagacgggatgtggagaagtggggccccttcgatctggtgtacggcagcacccaacccctgggcagctcttgtgaccggtgccctggctggtacatgtttcagttccaccggatcctgcagtacgccctgccgagacaggagtcccagcggccattcttttggattttcatggacaacttgctgctgaccgaggatgaccaggaaactaccactcggttcctgcagaccgaagccgtgaccctgcaggacgtgagaggccgggactaccagaacgccatgcgggtgtggtccaacatccctggactgaaaagcaagcacgcacctctgacccctaaagaagaggagtacctgcaggcccaggtgcggagcagaagcaagctggacgcccctaaggtggatctgctggtgaagaattgcctcctgcccctgagagagtacttcaagtatttcagccagaatagtctgcccctgggcggcccaagcagcggcgcccctcctcccagcggcggcagcccagccggctccccaacctctaccgaggagggcacctctgagtccgccacccccgagagcggccctggcacctccaccgagcccagcgagggcagcgcacccggcagccctgccggcagccccacctccacagaggagggaaccagcaccgagcccagcgaaggcagcgccccaggcaccagcaccgagcctagtgagggcggctctggcggcggcagcgcccaggagattaaacggatcaacaagatcagaagaagacttgtgaaagacagcaacaccaagaaggccggcaagacaggccccatgaaaaccctgctggttagagtgatgacacccgatctgagagagcggctggaaaacctgagaaagaagcctgaaaatatcccccagcccatcagcaatacatctagagccaacctgaataagctgctgaccgattacaccgaaatgaagaaggcgatcctgcatgtgtactgggaagagttccagaaggaccctgtgggcctgatgagccgggtggcccagcctgccagcaagaagatcgatcagaacaagctgaaacctgagatggacgagaagggcaacctgaccaccgccggctttgcctgctctcagtgtggccagcccctgttcgtgtacaagctggagcaggtgtctgagaagggcaaggcttacaccaactacttcggacggtgcaatgtggccgagcacgaaaagctgatcctgctggcccagctgaagcccgagaaggatagcgacgaagccgtgacatatagcctgggaaagtttgggcagagggccctggatttctacagcattcatgtgaccaaggagtccacccaccccgtgaagcccctggcccagatcgccggaaacagatacgcctccggacctgtgggaaaggccctgagcgacgcatgtatgggcacaatcgcctccttcctgtctaagtaccaggacatcatcatcgaacaccagaaggtggtgaagggcaaccagaagagactggagagcctgcgggagctggccggcaaggaaaacctggaataccctagcgtgaccctgccacctcagcctcacaccaaggagggcgttgatgcctacaacgaagtgatcgcccgggtgcgaatgtgggtgaacctgaacctgtggcagaagctgaagctaagcagagatgatgccaagcctctgctgagactgaagggattcccttcctttcctctggtcgagagacaggccaacgaagtggactggtgggacatggtgtgtaacgtgaagaagctgatcaacgagaaaaaggaggatggcaaggtgttttggcagaatctggctggctacaagagacaggaagccctgagaccatacctgagcagcgaggaagatcggaagaagggaaagaaattcgctcggtaccagctgggcgacctgctgctgcacctggaaaagaagcacggcgaggactggggaaaggtgtacgacgaggcctgggagcggattgacaagaaagtggaaggcctgagcaagcacatcaagctggaagaggaacggagaagcgaggacgcccagagcaaggccgccctgaccgactggctgcgggctaaggccagcttcgtgatcgagggcctgaaggaggccgacaaggacgagttctgcagatgcgagctgaagctgcagaagtggtacggggacctgcggggaaagcccttcgccatcgaagccgagaacagcatcctggacatcagcggcttcagcaagcagtacaactgtgccttcatctggcagaaggacggcgtgaagaagctgaacctgtacctgatcatcaactacttcaagggcggcaagctgcggttcaagaagatcaaacctgaagccttcgaagccaacagattctacaccgtgatcaacaaaaagagcggcgagatcgtgcccatggaggtgaacttcaacttcgacgaccccaacctgatcatcctgcctctggcctttggcaagagacagggcagagaattcatctggaacgacctgctgtccctggaaaccggcagcctgaagctggccaacggaagagtgatcgagaagacactgtacaacagaagaacccggcaggatgagcctgccctgttcgtggccctgaccttcgagcggcgggaggtcctggactcctccaatatcaaaccaatgaacctgatcggcgtggcaagaggcgaaaacatccccgccgtgatcgccctgaccgaccccgagggctgcccactgagccggtttaaggatagcctgggaaacccaacccacatcctgagaatcggcgagagctataaggagaagcagcggaccatccaggccaagaaggaggtggagcagcggagagccggcggctacagccggaagtacgccagcaaagccaagaatctggcagacgatatggtgagaaacaccgctagagatctgctgtactacgccgtgacccaggatgccatgctgatcttcgccaacctgagccggggcttcggccggcagggcaagcggaccttcatggccgagagacagtacacacggatggaggactggctgaccgccaagctggcctacgagggcctgagcaagacctacctgtccaagacactggcccagtacacctccaagacatgcagcaactgtgggtttaccatcaccagcgccgactacgacagggtgctggagaagctgaagaagacagcaacaggctggatgaccacaattaacggcaaggagctgaaggtggagggccagattacctactacaacagatacaagagacagaacgtagtcaaggacctgtccgtcgagctggatagactgagcgaagaatctgtgaacaacgacatctcctcctggacaaagggcagaagcggagaagctctgagcctcctgaagaaaagattctcccatagacccgtgcaggagaagttcgtgtgcctgaactgcggcttcgagacacacgcagccgagcaagccgccctgaacatcgccagatcctggctgttcctgcggagccaggagtacaagaaataccagacaaacaagacaaccggcaacaccgataagagagccttcgtcgagacctggcagtccttttaccggaagaagcttaaggaggtgtggaaacctgccgtgcggtctggcggatctggcggaggctccacaagcatggacagcgtggccttcgaggacgtggccgtgaacttcacccaggaggagtgggccctgctggaccccagccagaagaacctgtacagggaggtgatgcaggagaccgtgaggaacctggccagcatcggcaagaagtggaacaaccagtacatcgaggacgagcaccagaaccccaggaagaacctgaggaggctgatcggcgagaggctgagcgagagcaaggagagccaccagcacggcaccagccccaagaaaaagagaaaagtctaagctgccttctgcggggcttgccttctggccatgcccttcttctctcccttgcacctgtacctcttggtctttgaataaagcctgagtaggaaggctagcaaaaaaaaaaaaaaaaaaaaaaaaaaaaaaaaaaaaaaaaaaaaaaaaaaaaaaaaaaaaaaaaaaaaaaaaaaaaaaaa

SEQ ID NO: 2604 - RNA, 5419 nt, synthetic construct
  source 1..5419: mol_type = other RNA
aggaaataagagagaaaagaagagtaagaagaaatataagagccaccatggcccctaagaagaagcgtaaagtgagccgggtgaacggcagcggcagcggcggcggcatgaaccacgaccaggagttcgacccccctaaggtgtaccctcccgtccccgccgagaagagaaagcccatccgggtcctgagcctgttcgatggcatcgccaccggtctgctggtgctgaaggacctgggcatccaggtggataggtacattgcctccgaggtgtgcgaggactccatcaccgtgggaatggtgcgtcatcagggcaagatcatgtacgtgggcgacgtgcggagcgtgacacagaagcatatccaggagtggggccctttcgacctggtgatcggcggcagcccttgcaatgacctgagcatcgtgaacccagcccggaagggcctgtacgagggaaccggcagactgttcttcgagttttacagactgctgcacgacgcccggcctaaggaaggcgacgaccggcccttcttttggctgttcgagaatgtggtggccatgggagtcagcgacaagcgggatattagccggttcctggagagcaaccccgtgatgatcgatgccaaggaagtgagcgccgcccaccgggccagatacttctggggcaatctgcctggcatgaacagacccctggccagcaccgtgaacgacaagctggagctgcaggagtgcctggagcacggccggatcgccaagttcagcaaggtgagaaccatcaccacccgaagcaacagcatcaaacaaggcaaggaccagcactttcctgtgttcatgaacgagaaggaggacatcctgtggtgtaccgagatggagagagtgttcgggttcccagtccactacacagatgtcagcaacatgtctagactggccagacagagactgctgggaagaagctggtccgtccctgtgatcagacacctgttcgcccctctgaaggagtacttcgcctgcgtgagcagcggcaacagcaacgccaacagccggggccccagcttctctagcggcctggtgccactgtccctgagagggagccacatgggccccatggagatctacaaaaccgtgagcgcctggaagcggcagcctgtgcgcgtgctgagcctgtttcggaatatcgataaagtcctgaaaagcctgggattcctggagagcggctctggctccggcggtggcaccctgaagtacgtggaggatgtgacaaacgtggtcagacgggatgtggagaagtggggccccttcgatctggtgtacggcagcacccaacccctgggcagctcttgtgaccggtgccctggctggtacatgtttcagttccaccggatcctgcagtacgccctgccgagacaggagtcccagcggccattcttttggattttcatggacaacttgctgctgaccgaggatgaccaggaaactaccactcggttcctgcagaccgaagccgtgaccctgcaggacgtgagaggccgggactaccagaacgccatgcgggtgtggtccaacatccctggactgaaaagcaagcacgcacctctgacccctaaagaagaggagtacctgcaggcccaggtgcggagcagaagcaagctggacgcccctaaggtggatctgctggtgaagaattgcctcctgcccctgagagagtacttcaagtatttcagccagaatagtctgcccctgggcggcccaagcagcggcgcccctcctcccagcggcggcagcccagccggctccccaacctctaccgaggagggcacctctgagtccgccacccccgagagcggccctggcacctccaccgagcccagcgagggcagcgcacccggcagccctgccggcagccccacctccacagaggagggaaccagcaccgagcccagcgaaggcagcgccccaggcaccagcaccgagcctagtgagggcggctctggcggcggcagcgcccaggagattaaacggatcaacaagatcagaagaagacttgtgaaagacagcaacaccaagaaggccggcaagacaggccccatgaaaaccctgctggttagagtgatgacacccgatctgagagagcggctggaaaacctgagaaagaagcctgaaaatatcccccagcccatcagcaatacatctagagccaacctgaataagctgctgaccgattacaccgaaatgaagaaggcgatcctgcatgtgtactgggaagagttccagaaggaccctgtgggcctgatgagccgggtggcccagcctgccagcaagaagatcgatcagaacaagctgaaacctgagatggacgagaagggcaacctgaccaccgccggctttgcctgctctcagtgtggccagcccctgttcgtgtacaagctggagcaggtgtctgagaagggcaaggcttacaccaactacttcggacggtgcaatgtggccgagcacgaaaagctgatcctgctggcccagctgaagcccgagaaggatagcgacgaagccgtgacatatagcctgggaaagtttgggcagagggccctggatttctacagcattcatgtgaccaaggagtccacccaccccgtgaagcccctggcccagatcgccggaaacagatacgcctccggacctgtgggaaaggccctgagcgacgcatgtatgggcacaatcgcctccttcctgtctaagtaccaggacatcatcatcgaacaccagaaggtggtgaagggcaaccagaagagactggagagcctgcgggagctggccggcaaggaaaacctggaataccctagcgtgaccctgccacctcagcctcacaccaaggagggcgttgatgcctacaacgaagtgatcgcccgggtgcgaatgtgggtgaacctgaacctgtggcagaagctgaagctaagcagagatgatgccaagcctctgctgagactgaagggattcccttcctttcctctggtcgagagacaggccaacgaagtggactggtgggacatggtgtgtaacgtgaagaagctgatcaacgagaaaaaggaggatggcaaggtgttttggcagaatctggctggctacaagagacaggaagccctgagaccatacctgagcagcgaggaagatcggaagaagggaaagaaattcgctcggtaccagctgggcgacctgctgctgcacctggaaaagaagcacggcgaggactggggaaaggtgtacgacgaggcctgggagcggattgacaagaaagtggaaggcctgagcaagcacatcaagctggaagaggaacggagaagcgaggacgcccagagcaaggccgccctgaccgactggctgcgggctaaggccagcttcgtgatcgagggcctgaaggaggccgacaaggacgagttctgcagatgcgagctgaagctgcagaagtggtacggggacctgcggggaaagcccttcgccatcgaagccgagaacagcatcctggacatcagcggcttcagcaagcagtacaactgtgccttcatctggcagaaggacggcgtgaagaagctgaacctgtacctgatcatcaactacttcaagggcggcaagctgcggttcaagaagatcaaacctgaagccttcgaagccaacagattctacaccgtgatcaacaaaaagagcggcgagatcgtgcccatggaggtgaacttcaacttcgacgaccccaacctgatcatcctgcctctggcctttggcaagagacagggcagagaattcatctggaacgacctgctgtccctggaaaccggcagcctgaagctggccaacggaagagtgatcgagaagacactgtacaacagaagaacccggcaggatgagcctgccctgttcgtggccctgaccttcgagcggcgggaggtcctggactcctccaatatcaaaccaatgaacctgatcggcgtggcaagaggcgaaaacatccccgccgtgatcgccctgaccgaccccgagggctgcccactgagccggtttaaggatagcctgggaaacccaacccacatcctgagaatcggcgagagctataaggagaagcagcggaccatccaggccaagaaggaggtggagcagcggagagccggcggctacagccggaagtacgccagcaaagccaagaatctggcagacgatatggtgagaaacaccgctagagatctgctgtactacgccgtgacccaggatgccatgctgatcttcgccaacctgagccggggcttcggccggcagggcaagcggaccttcatggccgagagacagtacacacggatggaggactggctgaccgccaagctggcctacgagggcctgagcaagacctacctgtccaagacactggcccagtacacctccaagacatgcagcaactgtgggtttaccatcaccagcgccgactacgacagggtgctggagaagctgaagaagacagcaacaggctggatgaccacaattaacggcaaggagctgaaggtggagggccagattacctactacaacagatacaagagacagaacgtagtcaaggacctgtccgtcgagctggatagactgagcgaagaatctgtgaacaacgacatctcctcctggacaaagggcagaagcggagaagctctgagcctcctgaagaaaagattctcccatagacccgtgcaggagaagttcgtgtgcctgaactgcggcttcgagacacacgcagccgagcaagccgccctgaacatcgccagatcctggctgttcctgcggagccaggagtacaagaaataccagacaaacaagacaaccggcaacaccgataagagagccttcgtcgagacctggcagtccttttaccggaagaagcttaaggaggtgtggaaacctgccgtgcggtctggcggatctggcggaggctccacaagcatgcacctgaccgcctggccccagaagagcgtgaccttcgaggacgtggccgtgtacttcacccaggccgagtgggacggcctgagccccgcccagaggaccctgtacagggacgtgatgctggagaactacggcaacgtggccagcctgggcttccccctgctgaagcccgccgtgatcagccagctggagggcggcggcgagctgggcggccccagccccctggccgccggcaggggcctgaccagccccaagaaaaagagaaaagtctaagctgccttctgcggggcttgccttctggccatgcccttcttctctcccttgcacctgtacctcttggtctttgaataaagcctgagtaggaaggctagcaaaaaaaaaaaaaaaaaaaaaaaaaaaaaaaaaaaaaaaaaaaaaaaaaaaaaaaaaaaaaaaaaaaaaaaaaaaaaaaa

SEQ ID NO: 2605 - RNA, 5419 nt, synthetic construct
  source 1..5419: mol_type = other RNA
aggaaataagagagaaaagaagagtaagaagaaatataagagccaccatggcccctaagaagaagcgtaaagtgagccgggtgaacggcagcggcagcggcggcggcatgaaccacgaccaggagttcgacccccctaaggtgtaccctcccgtccccgccgagaagagaaagcccatccgggtcctgagcctgttcgatggcatcgccaccggtctgctggtgctgaaggacctgggcatccaggtggataggtacattgcctccgaggtgtgcgaggactccatcaccgtgggaatggtgcgtcatcagggcaagatcatgtacgtgggcgacgtgcggagcgtgacacagaagcatatccaggagtggggccctttcgacctggtgatcggcggcagcccttgcaatgacctgagcatcgtgaacccagcccggaagggcctgtacgagggaaccggcagactgttcttcgagttttacagactgctgcacgacgcccggcctaaggaaggcgacgaccggcccttcttttggctgttcgagaatgtggtggccatgggagtcagcgacaagcgggatattagccggttcctggagagcaaccccgtgatgatcgatgccaaggaagtgagcgccgcccaccgggccagatacttctggggcaatctgcctggcatgaacagacccctggccagcaccgtgaacgacaagctggagctgcaggagtgcctggagcacggccggatcgccaagttcagcaaggtgagaaccatcaccacccgaagcaacagcatcaaacaaggcaaggaccagcactttcctgtgttcatgaacgagaaggaggacatcctgtggtgtaccgagatggagagagtgttcgggttcccagtccactacacagatgtcagcaacatgtctagactggccagacagagactgctgggaagaagctggtccgtccctgtgatcagacacctgttcgcccctctgaaggagtacttcgcctgcgtgagcagcggcaacagcaacgccaacagccggggccccagcttctctagcggcctggtgccactgtccctgagagggagccacatgggccccatggagatctacaaaaccgtgagcgcctggaagcggcagcctgtgcgcgtgctgagcctgtttcggaatatcgataaagtcctgaaaagcctgggattcctggagagcggctctggctccggcggtggcaccctgaagtacgtggaggatgtgacaaacgtggtcagacgggatgtggagaagtggggccccttcgatctggtgtacggcagcacccaacccctgggcagctcttgtgaccggtgccctggctggtacatgtttcagttccaccggatcctgcagtacgccctgccgagacaggagtcccagcggccattcttttggattttcatggacaacttgctgctgaccgaggatgaccaggaaactaccactcggttcctgcagaccgaagccgtgaccctgcaggacgtgagaggccgggactaccagaacgccatgcgggtgtggtccaacatccctggactgaaaagcaagcacgcacctctgacccctaaagaagaggagtacctgcaggcccaggtgcggagcagaagcaagctggacgcccctaaggtggatctgctggtgaagaattgcctcctgcccctgagagagtacttcaagtatttcagccagaatagtctgcccctgggcggcccaagcagcggcgcccctcctcccagcggcggcagcccagccggctccccaacctctaccgaggagggcacctctgagtccgccacccccgagagcggccctggcacctccaccgagcccagcgagggcagcgcacccggcagccctgccggcagccccacctccacagaggagggaaccagcaccgagcccagcgaaggcagcgccccaggcaccagcaccgagcctagtgagggcggctctggcggcggcagcgcccaggagattaaacggatcaacaagatcagaagaagacttgtgaaagacagcaacaccaagaaggccggcaagacaggccccatgaaaaccctgctggttagagtgatgacacccgatctgagagagcggctggaaaacctgagaaagaagcctgaaaatatcccccagcccatcagcaatacatctagagccaacctgaataagctgctgaccgattacaccgaaatgaagaaggcgatcctgcatgtgtactgggaagagttccagaaggaccctgtgggcctgatgagccgggtggcccagcctgccagcaagaagatcgatcagaacaagctgaaacctgagatggacgagaagggcaacctgaccaccgccggctttgcctgctctcagtgtggccagcccctgttcgtgtacaagctggagcaggtgtctgagaagggcaaggcttacaccaactacttcggacggtgcaatgtggccgagcacgaaaagctgatcctgctggcccagctgaagcccgagaaggatagcgacgaagccgtgacatatagcctgggaaagtttgggcagagggccctggatttctacagcattcatgtgaccaaggagtccacccaccccgtgaagcccctggcccagatcgccggaaacagatacgcctccggacctgtgggaaaggccctgagcgacgcatgtatgggcacaatcgcctccttcctgtctaagtaccaggacatcatcatcgaacaccagaaggtggtgaagggcaaccagaagagactggagagcctgcgggagctggccggcaaggaaaacctggaataccctagcgtgaccctgccacctcagcctcacaccaaggagggcgttgatgcctacaacgaagtgatcgcccgggtgcgaatgtgggtgaacctgaacctgtggcagaagctgaagctaagcagagatgatgccaagcctctgctgagactgaagggattcccttcctttcctctggtcgagagacaggccaacgaagtggactggtgggacatggtgtgtaacgtgaagaagctgatcaacgagaaaaaggaggatggcaaggtgttttggcagaatctggctggctacaagagacaggaagccctgagaccatacctgagcagcgaggaagatcggaagaagggaaagaaattcgctcggtaccagctgggcgacctgctgctgcacctggaaaagaagcacggcgaggactggggaaaggtgtacgacgaggcctgggagcggattgacaagaaagtggaaggcctgagcaagcacatcaagctggaagaggaacggagaagcgaggacgcccagagcaaggccgccctgaccgactggctgcgggctaaggccagcttcgtgatcgagggcctgaaggaggccgacaaggacgagttctgcagatgcgagctgaagctgcagaagtggtacggggacctgcggggaaagcccttcgccatcgaagccgagaacagcatcctggacatcagcggcttcagcaagcagtacaactgtgccttcatctggcagaaggacggcgtgaagaagctgaacctgtacctgatcatcaactacttcaagggcggcaagctgcggttcaagaagatcaaacctgaagccttcgaagccaacagattctacaccgtgatcaacaaaaagagcggcgagatcgtgcccatggaggtgaacttcaacttcgacgaccccaacctgatcatcctgcctctggcctttggcaagagacagggcagagaattcatctggaacgacctgctgtccctggaaaccggcagcctgaagctggccaacggaagagtgatcgagaagacactgtacaacagaagaacccggcaggatgagcctgccctgttcgtggccctgaccttcgagcggcgggaggtcctggactcctccaatatcaaaccaatgaacctgatcggcgtggcaagaggcgaaaacatccccgccgtgatcgccctgaccgaccccgagggctgcccactgagccggtttaaggatagcctgggaaacccaacccacatcctgagaatcggcgagagctataaggagaagcagcggaccatccaggccaagaaggaggtggagcagcggagagccggcggctacagccggaagtacgccagcaaagccaagaatctggcagacgatatggtgagaaacaccgctagagatctgctgtactacgccgtgacccaggatgccatgctgatcttcgccaacctgagccggggcttcggccggcagggcaagcggaccttcatggccgagagacagtacacacggatggaggactggctgaccgccaagctggcctacgagggcctgagcaagacctacctgtccaagacactggcccagtacacctccaagacatgcagcaactgtgggtttaccatcaccagcgccgactacgacagggtgctggagaagctgaagaagacagcaacaggctggatgaccacaattaacggcaaggagctgaaggtggagggccagattacctactacaacagatacaagagacagaacgtagtcaaggacctgtccgtcgagctggatagactgagcgaagaatctgtgaacaacgacatctcctcctggacaaagggcagaagcggagaagctctgagcctcctgaagaaaagattctcccatagacccgtgcaggagaagttcgtgtgcctgaactgcggcttcgagacacacgcagccgagcaagccgccctgaacatcgccagatcctggctgttcctgcggagccaggagtacaagaaataccagacaaacaagacaaccggcaacaccgataagagagccttcgtcgagacctggcagtccttttaccggaagaagcttaaggaggtgtggaaacctgccgtgcggtctggcggatctggcggaggctccacaagcaccgagaacgccgtgacctacgacgacgtgcacgtgggcttcacctgggaggagtgggccctgctggaccccagccagaagaacctgtacaaggacgtgatgctggacacctacaggaacctgaccaccatcggctacagctgggagggccacaacatcgaggagcacttccagagcagcaggaggcacgagaggcacaagaggagcgacaccggcgagaacagcagcgtgtacacccagtgcaccagccccaagaaaaagagaaaagtctaagctgccttctgcggggcttgccttctggccatgcccttcttctctcccttgcacctgtacctcttggtctttgaataaagcctgagtaggaaggctagcaaaaaaaaaaaaaaaaaaaaaaaaaaaaaaaaaaaaaaaaaaaaaaaaaaaaaaaaaaaaaaaaaaaaaaaaaaaaaaaa

SEQ ID NO: 2606 - RNA, 5419 nt, synthetic construct
  source 1..5419: mol_type = other RNA
aggaaataagagagaaaagaagagtaagaagaaatataagagccaccatggcccctaagaagaagcgtaaagtgagccgggtgaacggcagcggcagcggcggcggcatgaaccacgaccaggagttcgacccccctaaggtgtaccctcccgtccccgccgagaagagaaagcccatccgggtcctgagcctgttcgatggcatcgccaccggtctgctggtgctgaaggacctgggcatccaggtggataggtacattgcctccgaggtgtgcgaggactccatcaccgtgggaatggtgcgtcatcagggcaagatcatgtacgtgggcgacgtgcggagcgtgacacagaagcatatccaggagtggggccctttcgacctggtgatcggcggcagcccttgcaatgacctgagcatcgtgaacccagcccggaagggcctgtacgagggaaccggcagactgttcttcgagttttacagactgctgcacgacgcccggcctaaggaaggcgacgaccggcccttcttttggctgttcgagaatgtggtggccatgggagtcagcgacaagcgggatattagccggttcctggagagcaaccccgtgatgatcgatgccaaggaagtgagcgccgcccaccgggccagatacttctggggcaatctgcctggcatgaacagacccctggccagcaccgtgaacgacaagctggagctgcaggagtgcctggagcacggccggatcgccaagttcagcaaggtgagaaccatcaccacccgaagcaacagcatcaaacaaggcaaggaccagcactttcctgtgttcatgaacgagaaggaggacatcctgtggtgtaccgagatggagagagtgttcgggttcccagtccactacacagatgtcagcaacatgtctagactggccagacagagactgctgggaagaagctggtccgtccctgtgatcagacacctgttcgcccctctgaaggagtacttcgcctgcgtgagcagcggcaacagcaacgccaacagccggggccccagcttctctagcggcctggtgccactgtccctgagagggagccacatgggccccatggagatctacaaaaccgtgagcgcctggaagcggcagcctgtgcgcgtgctgagcctgtttcggaatatcgataaagtcctgaaaagcctgggattcctggagagcggctctggctccggcggtggcaccctgaagtacgtggaggatgtgacaaacgtggtcagacgggatgtggagaagtggggccccttcgatctggtgtacggcagcacccaacccctgggcagctcttgtgaccggtgccctggctggtacatgtttcagttccaccggatcctgcagtacgccctgccgagacaggagtcccagcggccattcttttggattttcatggacaacttgctgctgaccgaggatgaccaggaaactaccactcggttcctgcagaccgaagccgtgaccctgcaggacgtgagaggccgggactaccagaacgccatgcgggtgtggtccaacatccctggactgaaaagcaagcacgcacctctgacccctaaagaagaggagtacctgcaggcccaggtgcggagcagaagcaagctggacgcccctaaggtggatctgctggtgaagaattgcctcctgcccctgagagagtacttcaagtatttcagccagaatagtctgcccctgggcggcccaagcagcggcgcccctcctcccagcggcggcagcccagccggctccccaacctctaccgaggagggcacctctgagtccgccacccccgagagcggccctggcacctccaccgagcccagcgagggcagcgcacccggcagccctgccggcagccccacctccacagaggagggaaccagcaccgagcccagcgaaggcagcgccccaggcaccagcaccgagcctagtgagggcggctctggcggcggcagcgcccaggagattaaacggatcaacaagatcagaagaagacttgtgaaagacagcaacaccaagaaggccggcaagacaggccccatgaaaaccctgctggttagagtgatgacacccgatctgagagagcggctggaaaacctgagaaagaagcctgaaaatatcccccagcccatcagcaatacatctagagccaacctgaataagctgctgaccgattacaccgaaatgaagaaggcgatcctgcatgtgtactgggaagagttccagaaggaccctgtgggcctgatgagccgggtggcccagcctgccagcaagaagatcgatcagaacaagctgaaacctgagatggacgagaagggcaacctgaccaccgccggctttgcctgctctcagtgtggccagcccctgttcgtgtacaagctggagcaggtgtctgagaagggcaaggcttacaccaactacttcggacggtgcaatgtggccgagcacgaaaagctgatcctgctggcccagctgaagcccgagaaggatagcgacgaagccgtgacatatagcctgggaaagtttgggcagagggccctggatttctacagcattcatgtgaccaaggagtccacccaccccgtgaagcccctggcccagatcgccggaaacagatacgcctccggacctgtgggaaaggccctgagcgacgcatgtatgggcacaatcgcctccttcctgtctaagtaccaggacatcatcatcgaacaccagaaggtggtgaagggcaaccagaagagactggagagcctgcgggagctggccggcaaggaaaacctggaataccctagcgtgaccctgccacctcagcctcacaccaaggagggcgttgatgcctacaacgaagtgatcgcccgggtgcgaatgtgggtgaacctgaacctgtggcagaagctgaagctaagcagagatgatgccaagcctctgctgagactgaagggattcccttcctttcctctggtcgagagacaggccaacgaagtggactggtgggacatggtgtgtaacgtgaagaagctgatcaacgagaaaaaggaggatggcaaggtgttttggcagaatctggctggctacaagagacaggaagccctgagaccatacctgagcagcgaggaagatcggaagaagggaaagaaattcgctcggtaccagctgggcgacctgctgctgcacctggaaaagaagcacggcgaggactggggaaaggtgtacgacgaggcctgggagcggattgacaagaaagtggaaggcctgagcaagcacatcaagctggaagaggaacggagaagcgaggacgcccagagcaaggccgccctgaccgactggctgcgggctaaggccagcttcgtgatcgagggcctgaaggaggccgacaaggacgagttctgcagatgcgagctgaagctgcagaagtggtacggggacctgcggggaaagcccttcgccatcgaagccgagaacagcatcctggacatcagcggcttcagcaagcagtacaactgtgccttcatctggcagaaggacggcgtgaagaagctgaacctgtacctgatcatcaactacttcaagggcggcaagctgcggttcaagaagatcaaacctgaagccttcgaagccaacagattctacaccgtgatcaacaaaaagagcggcgagatcgtgcccatggaggtgaacttcaacttcgacgaccccaacctgatcatcctgcctctggcctttggcaagagacagggcagagaattcatctggaacgacctgctgtccctggaaaccggcagcctgaagctggccaacggaagagtgatcgagaagacactgtacaacagaagaacccggcaggatgagcctgccctgttcgtggccctgaccttcgagcggcgggaggtcctggactcctccaatatcaaaccaatgaacctgatcggcgtggcaagaggcgaaaacatccccgccgtgatcgccctgaccgaccccgagggctgcccactgagccggtttaaggatagcctgggaaacccaacccacatcctgagaatcggcgagagctataaggagaagcagcggaccatccaggccaagaaggaggtggagcagcggagagccggcggctacagccggaagtacgccagcaaagccaagaatctggcagacgatatggtgagaaacaccgctagagatctgctgtactacgccgtgacccaggatgccatgctgatcttcgccaacctgagccggggcttcggccggcagggcaagcggaccttcatggccgagagacagtacacacggatggaggactggctgaccgccaagctggcctacgagggcctgagcaagacctacctgtccaagacactggcccagtacacctccaagacatgcagcaactgtgggtttaccatcaccagcgccgactacgacagggtgctggagaagctgaagaagacagcaacaggctggatgaccacaattaacggcaaggagctgaaggtggagggccagattacctactacaacagatacaagagacagaacgtagtcaaggacctgtccgtcgagctggatagactgagcgaagaatctgtgaacaacgacatctcctcctggacaaagggcagaagcggagaagctctgagcctcctgaagaaaagattctcccatagacccgtgcaggagaagttcgtgtgcctgaactgcggcttcgagacacacgcagccgagcaagccgccctgaacatcgccagatcctggctgttcctgcggagccaggagtacaagaaataccagacaaacaagacaaccggcaacaccgataagagagccttcgtcgagacctggcagtccttttaccggaagaagcttaaggaggtgtggaaacctgccgtgcggtctggcggatctggcggaggctccacaagcagccagggcctggtgaccttcggcgacgtggccgtggacttcagccaggaggagtgggagtggctgaaccccatccagaggaacctgtacaggaaggtgatgctggagaactacaggaacctggcctggctgggcctgtgcgtgagcaagcccgacgtgatcagcagcctggagcagggcaaggagccctggaccgtgaagaggaagatgaccagggcctggtgccccgacctgaaggccgtgaccagccccaagaaaaagagaaaagtctaagctgccttctgcggggcttgccttctggccatgcccttcttctctcccttgcacctgtacctcttggtctttgaataaagcctgagtaggaaggctagcaaaaaaaaaaaaaaaaaaaaaaaaaaaaaaaaaaaaaaaaaaaaaaaaaaaaaaaaaaaaaaaaaaaaaaaaaaaaaaaa

SEQ ID NO: 2607 - RNA, 5419 nt, synthetic construct
  source 1..5419: mol_type = other RNA
aggaaataagagagaaaagaagagtaagaagaaatataagagccaccatggcccctaagaagaagcgtaaagtgagccgggtgaacggcagcggcagcggcggcggcatgaaccacgaccaggagttcgacccccctaaggtgtaccctcccgtccccgccgagaagagaaagcccatccgggtcctgagcctgttcgatggcatcgccaccggtctgctggtgctgaaggacctgggcatccaggtggataggtacattgcctccgaggtgtgcgaggactccatcaccgtgggaatggtgcgtcatcagggcaagatcatgtacgtgggcgacgtgcggagcgtgacacagaagcatatccaggagtggggccctttcgacctggtgatcggcggcagcccttgcaatgacctgagcatcgtgaacccagcccggaagggcctgtacgagggaaccggcagactgttcttcgagttttacagactgctgcacgacgcccggcctaaggaaggcgacgaccggcccttcttttggctgttcgagaatgtggtggccatgggagtcagcgacaagcgggatattagccggttcctggagagcaaccccgtgatgatcgatgccaaggaagtgagcgccgcccaccgggccagatacttctggggcaatctgcctggcatgaacagacccctggccagcaccgtgaacgacaagctggagctgcaggagtgcctggagcacggccggatcgccaagttcagcaaggtgagaaccatcaccacccgaagcaacagcatcaaacaaggcaaggaccagcactttcctgtgttcatgaacgagaaggaggacatcctgtggtgtaccgagatggagagagtgttcgggttcccagtccactacacagatgtcagcaacatgtctagactggccagacagagactgctgggaagaagctggtccgtccctgtgatcagacacctgttcgcccctctgaaggagtacttcgcctgcgtgagcagcggcaacagcaacgccaacagccggggccccagcttctctagcggcctggtgccactgtccctgagagggagccacatgggccccatggagatctacaaaaccgtgagcgcctggaagcggcagcctgtgcgcgtgctgagcctgtttcggaatatcgataaagtcctgaaaagcctgggattcctggagagcggctctggctccggcggtggcaccctgaagtacgtggaggatgtgacaaacgtggtcagacgggatgtggagaagtggggccccttcgatctggtgtacggcagcacccaacccctgggcagctcttgtgaccggtgccctggctggtacatgtttcagttccaccggatcctgcagtacgccctgccgagacaggagtcccagcggccattcttttggattttcatggacaacttgctgctgaccgaggatgaccaggaaactaccactcggttcctgcagaccgaagccgtgaccctgcaggacgtgagaggccgggactaccagaacgccatgcgggtgtggtccaacatccctggactgaaaagcaagcacgcacctctgacccctaaagaagaggagtacctgcaggcccaggtgcggagcagaagcaagctggacgcccctaaggtggatctgctggtgaagaattgcctcctgcccctgagagagtacttcaagtatttcagccagaatagtctgcccctgggcggcccaagcagcggcgcccctcctcccagcggcggcagcccagccggctccccaacctctaccgaggagggcacctctgagtccgccacccccgagagcggccctggcacctccaccgagcccagcgagggcagcgcacccggcagccctgccggcagccccacctccacagaggagggaaccagcaccgagcccagcgaaggcagcgccccaggcaccagcaccgagcctagtgagggcggctctggcggcggcagcgcccaggagattaaacggatcaacaagatcagaagaagacttgtgaaagacagcaacaccaagaaggccggcaagacaggccccatgaaaaccctgctggttagagtgatgacacccgatctgagagagcggctggaaaacctgagaaagaagcctgaaaatatcccccagcccatcagcaatacatctagagccaacctgaataagctgctgaccgattacaccgaaatgaagaaggcgatcctgcatgtgtactgggaagagttccagaaggaccctgtgggcctgatgagccgggtggcccagcctgccagcaagaagatcgatcagaacaagctgaaacctgagatggacgagaagggcaacctgaccaccgccggctttgcctgctctcagtgtggccagcccctgttcgtgtacaagctggagcaggtgtctgagaagggcaaggcttacaccaactacttcggacggtgcaatgtggccgagcacgaaaagctgatcctgctggcccagctgaagcccgagaaggatagcgacgaagccgtgacatatagcctgggaaagtttgggcagagggccctggatttctacagcattcatgtgaccaaggagtccacccaccccgtgaagcccctggcccagatcgccggaaacagatacgcctccggacctgtgggaaaggccctgagcgacgcatgtatgggcacaatcgcctccttcctgtctaagtaccaggacatcatcatcgaacaccagaaggtggtgaagggcaaccagaagagactggagagcctgcgggagctggccggcaaggaaaacctggaataccctagcgtgaccctgccacctcagcctcacaccaaggagggcgttgatgcctacaacgaagtgatcgcccgggtgcgaatgtgggtgaacctgaacctgtggcagaagctgaagctaagcagagatgatgccaagcctctgctgagactgaagggattcccttcctttcctctggtcgagagacaggccaacgaagtggactggtgggacatggtgtgtaacgtgaagaagctgatcaacgagaaaaaggaggatggcaaggtgttttggcagaatctggctggctacaagagacaggaagccctgagaccatacctgagcagcgaggaagatcggaagaagggaaagaaattcgctcggtaccagctgggcgacctgctgctgcacctggaaaagaagcacggcgaggactggggaaaggtgtacgacgaggcctgggagcggattgacaagaaagtggaaggcctgagcaagcacatcaagctggaagaggaacggagaagcgaggacgcccagagcaaggccgccctgaccgactggctgcgggctaaggccagcttcgtgatcgagggcctgaaggaggccgacaaggacgagttctgcagatgcgagctgaagctgcagaagtggtacggggacctgcggggaaagcccttcgccatcgaagccgagaacagcatcctggacatcagcggcttcagcaagcagtacaactgtgccttcatctggcagaaggacggcgtgaagaagctgaacctgtacctgatcatcaactacttcaagggcggcaagctgcggttcaagaagatcaaacctgaagccttcgaagccaacagattctacaccgtgatcaacaaaaagagcggcgagatcgtgcccatggaggtgaacttcaacttcgacgaccccaacctgatcatcctgcctctggcctttggcaagagacagggcagagaattcatctggaacgacctgctgtccctggaaaccggcagcctgaagctggccaacggaagagtgatcgagaagacactgtacaacagaagaacccggcaggatgagcctgccctgttcgtggccctgaccttcgagcggcgggaggtcctggactcctccaatatcaaaccaatgaacctgatcggcgtggcaagaggcgaaaacatccccgccgtgatcgccctgaccgaccccgagggctgcccactgagccggtttaaggatagcctgggaaacccaacccacatcctgagaatcggcgagagctataaggagaagcagcggaccatccaggccaagaaggaggtggagcagcggagagccggcggctacagccggaagtacgccagcaaagccaagaatctggcagacgatatggtgagaaacaccgctagagatctgctgtactacgccgtgacccaggatgccatgctgatcttcgccaacctgagccggggcttcggccggcagggcaagcggaccttcatggccgagagacagtacacacggatggaggactggctgaccgccaagctggcctacgagggcctgagcaagacctacctgtccaagacactggcccagtacacctccaagacatgcagcaactgtgggtttaccatcaccagcgccgactacgacagggtgctggagaagctgaagaagacagcaacaggctggatgaccacaattaacggcaaggagctgaaggtggagggccagattacctactacaacagatacaagagacagaacgtagtcaaggacctgtccgtcgagctggatagactgagcgaagaatctgtgaacaacgacatctcctcctggacaaagggcagaagcggagaagctctgagcctcctgaagaaaagattctcccatagacccgtgcaggagaagttcgtgtgcctgaactgcggcttcgagacacacgcagccgagcaagccgccctgaacatcgccagatcctggctgttcctgcggagccaggagtacaagaaataccagacaaacaagacaaccggcaacaccgataagagagccttcgtcgagacctggcagtccttttaccggaagaagcttaaggaggtgtggaaacctgccgtgcggtctggcggatctggcggaggctccacaagcagccaggagagcgtggccttcgaggacgtggccgtgtacttcaccaccaaggagtgggccatcatggtgcccgccgagagggccctgtacagggacgtgatgctggagaactacgaggccgtggccttcgtggtgccccccaccagcaagcccgccctggtgagccacctggagcagggcaaggagagctgcttcatcaggccccaggtggtgctgagcaggagcgactggagggccggcctgaccagccccaagaaaaagagaaaagtctaagctgccttctgcggggcttgccttctggccatgcccttcttctctcccttgcacctgtacctcttggtctttgaataaagcctgagtaggaaggctagcaaaaaaaaaaaaaaaaaaaaaaaaaaaaaaaaaaaaaaaaaaaaaaaaaaaaaaaaaaaaaaaaaaaaaaaaaaaaaaaa

SEQ ID NO: 2608 - RNA, 5419 nt, synthetic construct
  source 1..5419: mol_type = other RNA
aggaaataagagagaaaagaagagtaagaagaaatataagagccaccatggcccctaagaagaagcgtaaagtgagccgggtgaacggcagcggcagcggcggcggcatgaaccacgaccaggagttcgacccccctaaggtgtaccctcccgtccccgccgagaagagaaagcccatccgggtcctgagcctgttcgatggcatcgccaccggtctgctggtgctgaaggacctgggcatccaggtggataggtacattgcctccgaggtgtgcgaggactccatcaccgtgggaatggtgcgtcatcagggcaagatcatgtacgtgggcgacgtgcggagcgtgacacagaagcatatccaggagtggggccctttcgacctggtgatcggcggcagcccttgcaatgacctgagcatcgtgaacccagcccggaagggcctgtacgagggaaccggcagactgttcttcgagttttacagactgctgcacgacgcccggcctaaggaaggcgacgaccggcccttcttttggctgttcgagaatgtggtggccatgggagtcagcgacaagcgggatattagccggttcctggagagcaaccccgtgatgatcgatgccaaggaagtgagcgccgcccaccgggccagatacttctggggcaatctgcctggcatgaacagacccctggccagcaccgtgaacgacaagctggagctgcaggagtgcctggagcacggccggatcgccaagttcagcaaggtgagaaccatcaccacccgaagcaacagcatcaaacaaggcaaggaccagcactttcctgtgttcatgaacgagaaggaggacatcctgtggtgtaccgagatggagagagtgttcgggttcccagtccactacacagatgtcagcaacatgtctagactggccagacagagactgctgggaagaagctggtccgtccctgtgatcagacacctgttcgcccctctgaaggagtacttcgcctgcgtgagcagcggcaacagcaacgccaacagccggggccccagcttctctagcggcctggtgccactgtccctgagagggagccacatgggccccatggagatctacaaaaccgtgagcgcctggaagcggcagcctgtgcgcgtgctgagcctgtttcggaatatcgataaagtcctgaaaagcctgggattcctggagagcggctctggctccggcggtggcaccctgaagtacgtggaggatgtgacaaacgtggtcagacgggatgtggagaagtggggccccttcgatctggtgtacggcagcacccaacccctgggcagctcttgtgaccggtgccctggctggtacatgtttcagttccaccggatcctgcagtacgccctgccgagacaggagtcccagcggccattcttttggattttcatggacaacttgctgctgaccgaggatgaccaggaaactaccactcggttcctgcagaccgaagccgtgaccctgcaggacgtgagaggccgggactaccagaacgccatgcgggtgtggtccaacatccctggactgaaaagcaagcacgcacctctgacccctaaagaagaggagtacctgcaggcccaggtgcggagcagaagcaagctggacgcccctaaggtggatctgctggtgaagaattgcctcctgcccctgagagagtacttcaagtatttcagccagaatagtctgcccctgggcggcccaagcagcggcgcccctcctcccagcggcggcagcccagccggctccccaacctctaccgaggagggcacctctgagtccgccacccccgagagcggccctggcacctccaccgagcccagcgagggcagcgcacccggcagccctgccggcagccccacctccacagaggagggaaccagcaccgagcccagcgaaggcagcgccccaggcaccagcaccgagcctagtgagggcggctctggcggcggcagcgcccaggagattaaacggatcaacaagatcagaagaagacttgtgaaagacagcaacaccaagaaggccggcaagacaggccccatgaaaaccctgctggttagagtgatgacacccgatctgagagagcggctggaaaacctgagaaagaagcctgaaaatatcccccagcccatcagcaatacatctagagccaacctgaataagctgctgaccgattacaccgaaatgaagaaggcgatcctgcatgtgtactgggaagagttccagaaggaccctgtgggcctgatgagccgggtggcccagcctgccagcaagaagatcgatcagaacaagctgaaacctgagatggacgagaagggcaacctgaccaccgccggctttgcctgctctcagtgtggccagcccctgttcgtgtacaagctggagcaggtgtctgagaagggcaaggcttacaccaactacttcggacggtgcaatgtggccgagcacgaaaagctgatcctgctggcccagctgaagcccgagaaggatagcgacgaagccgtgacatatagcctgggaaagtttgggcagagggccctggatttctacagcattcatgtgaccaaggagtccacccaccccgtgaagcccctggcccagatcgccggaaacagatacgcctccggacctgtgggaaaggccctgagcgacgcatgtatgggcacaatcgcctccttcctgtctaagtaccaggacatcatcatcgaacaccagaaggtggtgaagggcaaccagaagagactggagagcctgcgggagctggccggcaaggaaaacctggaataccctagcgtgaccctgccacctcagcctcacaccaaggagggcgttgatgcctacaacgaagtgatcgcccgggtgcgaatgtgggtgaacctgaacctgtggcagaagctgaagctaagcagagatgatgccaagcctctgctgagactgaagggattcccttcctttcctctggtcgagagacaggccaacgaagtggactggtgggacatggtgtgtaacgtgaagaagctgatcaacgagaaaaaggaggatggcaaggtgttttggcagaatctggctggctacaagagacaggaagccctgagaccatacctgagcagcgaggaagatcggaagaagggaaagaaattcgctcggtaccagctgggcgacctgctgctgcacctggaaaagaagcacggcgaggactggggaaaggtgtacgacgaggcctgggagcggattgacaagaaagtggaaggcctgagcaagcacatcaagctggaagaggaacggagaagcgaggacgcccagagcaaggccgccctgaccgactggctgcgggctaaggccagcttcgtgatcgagggcctgaaggaggccgacaaggacgagttctgcagatgcgagctgaagctgcagaagtggtacggggacctgcggggaaagcccttcgccatcgaagccgagaacagcatcctggacatcagcggcttcagcaagcagtacaactgtgccttcatctggcagaaggacggcgtgaagaagctgaacctgtacctgatcatcaactacttcaagggcggcaagctgcggttcaagaagatcaaacctgaagccttcgaagccaacagattctacaccgtgatcaacaaaaagagcggcgagatcgtgcccatggaggtgaacttcaacttcgacgaccccaacctgatcatcctgcctctggcctttggcaagagacagggcagagaattcatctggaacgacctgctgtccctggaaaccggcagcctgaagctggccaacggaagagtgatcgagaagacactgtacaacagaagaacccggcaggatgagcctgccctgttcgtggccctgaccttcgagcggcgggaggtcctggactcctccaatatcaaaccaatgaacctgatcggcgtggcaagaggcgaaaacatccccgccgtgatcgccctgaccgaccccgagggctgcccactgagccggtttaaggatagcctgggaaacccaacccacatcctgagaatcggcgagagctataaggagaagcagcggaccatccaggccaagaaggaggtggagcagcggagagccggcggctacagccggaagtacgccagcaaagccaagaatctggcagacgatatggtgagaaacaccgctagagatctgctgtactacgccgtgacccaggatgccatgctgatcttcgccaacctgagccggggcttcggccggcagggcaagcggaccttcatggccgagagacagtacacacggatggaggactggctgaccgccaagctggcctacgagggcctgagcaagacctacctgtccaagacactggcccagtacacctccaagacatgcagcaactgtgggtttaccatcaccagcgccgactacgacagggtgctggagaagctgaagaagacagcaacaggctggatgaccacaattaacggcaaggagctgaaggtggagggccagattacctactacaacagatacaagagacagaacgtagtcaaggacctgtccgtcgagctggatagactgagcgaagaatctgtgaacaacgacatctcctcctggacaaagggcagaagcggagaagctctgagcctcctgaagaaaagattctcccatagacccgtgcaggagaagttcgtgtgcctgaactgcggcttcgagacacacgcagccgagcaagccgccctgaacatcgccagatcctggctgttcctgcggagccaggagtacaagaaataccagacaaacaagacaaccggcaacaccgataagagagccttcgtcgagacctggcagtccttttaccggaagaagcttaaggaggtgtggaaacctgccgtgcggtctggcggatctggcggaggctccacaagcatggtgagcttcgaggacgtggccgtgctgctgagccaggaggagtgggactgcctgatccccgcccagaggggcctgtacagggacgtgatgctggagacctacggcaacctggtgagcctgggcctgcaggccagcaagcccgacgtgatcagcaggctggagcagggcgacaagccctggaccccccacatcctgaggacccagaggagctggagctggaggcacaagagggagtgctacaccagccccaagaaaaagagaaaagtctaagctgccttctgcggggcttgccttctggccatgcccttcttctctcccttgcacctgtacctcttggtctttgaataaagcctgagtaggaaggctagcaaaaaaaaaaaaaaaaaaaaaaaaaaaaaaaaaaaaaaaaaaaaaaaaaaaaaaaaaaaaaaaaaaaaaaaaaaaaaaaa

SEQ ID NO: 2609 - RNA, 5419 nt, synthetic construct
  source 1..5419: mol_type = other RNA
aggaaataagagagaaaagaagagtaagaagaaatataagagccaccatggcccctaagaagaagcgtaaagtgagccgggtgaacggcagcggcagcggcggcggcatgaaccacgaccaggagttcgacccccctaaggtgtaccctcccgtccccgccgagaagagaaagcccatccgggtcctgagcctgttcgatggcatcgccaccggtctgctggtgctgaaggacctgggcatccaggtggataggtacattgcctccgaggtgtgcgaggactccatcaccgtgggaatggtgcgtcatcagggcaagatcatgtacgtgggcgacgtgcggagcgtgacacagaagcatatccaggagtggggccctttcgacctggtgatcggcggcagcccttgcaatgacctgagcatcgtgaacccagcccggaagggcctgtacgagggaaccggcagactgttcttcgagttttacagactgctgcacgacgcccggcctaaggaaggcgacgaccggcccttcttttggctgttcgagaatgtggtggccatgggagtcagcgacaagcgggatattagccggttcctggagagcaaccccgtgatgatcgatgccaaggaagtgagcgccgcccaccgggccagatacttctggggcaatctgcctggcatgaacagacccctggccagcaccgtgaacgacaagctggagctgcaggagtgcctggagcacggccggatcgccaagttcagcaaggtgagaaccatcaccacccgaagcaacagcatcaaacaaggcaaggaccagcactttcctgtgttcatgaacgagaaggaggacatcctgtggtgtaccgagatggagagagtgttcgggttcccagtccactacacagatgtcagcaacatgtctagactggccagacagagactgctgggaagaagctggtccgtccctgtgatcagacacctgttcgcccctctgaaggagtacttcgcctgcgtgagcagcggcaacagcaacgccaacagccggggccccagcttctctagcggcctggtgccactgtccctgagagggagccacatgggccccatggagatctacaaaaccgtgagcgcctggaagcggcagcctgtgcgcgtgctgagcctgtttcggaatatcgataaagtcctgaaaagcctgggattcctggagagcggctctggctccggcggtggcaccctgaagtacgtggaggatgtgacaaacgtggtcagacgggatgtggagaagtggggccccttcgatctggtgtacggcagcacccaacccctgggcagctcttgtgaccggtgccctggctggtacatgtttcagttccaccggatcctgcagtacgccctgccgagacaggagtcccagcggccattcttttggattttcatggacaacttgctgctgaccgaggatgaccaggaaactaccactcggttcctgcagaccgaagccgtgaccctgcaggacgtgagaggccgggactaccagaacgccatgcgggtgtggtccaacatccctggactgaaaagcaagcacgcacctctgacccctaaagaagaggagtacctgcaggcccaggtgcggagcagaagcaagctggacgcccctaaggtggatctgctggtgaagaattgcctcctgcccctgagagagtacttcaagtatttcagccagaatagtctgcccctgggcggcccaagcagcggcgcccctcctcccagcggcggcagcccagccggctccccaacctctaccgaggagggcacctctgagtccgccacccccgagagcggccctggcacctccaccgagcccagcgagggcagcgcacccggcagccctgccggcagccccacctccacagaggagggaaccagcaccgagcccagcgaaggcagcgccccaggcaccagcaccgagcctagtgagggcggctctggcggcggcagcgcccaggagattaaacggatcaacaagatcagaagaagacttgtgaaagacagcaacaccaagaaggccggcaagacaggccccatgaaaaccctgctggttagagtgatgacacccgatctgagagagcggctggaaaacctgagaaagaagcctgaaaatatcccccagcccatcagcaatacatctagagccaacctgaataagctgctgaccgattacaccgaaatgaagaaggcgatcctgcatgtgtactgggaagagttccagaaggaccctgtgggcctgatgagccgggtggcccagcctgccagcaagaagatcgatcagaacaagctgaaacctgagatggacgagaagggcaacctgaccaccgccggctttgcctgctctcagtgtggccagcccctgttcgtgtacaagctggagcaggtgtctgagaagggcaaggcttacaccaactacttcggacggtgcaatgtggccgagcacgaaaagctgatcctgctggcccagctgaagcccgagaaggatagcgacgaagccgtgacatatagcctgggaaagtttgggcagagggccctggatttctacagcattcatgtgaccaaggagtccacccaccccgtgaagcccctggcccagatcgccggaaacagatacgcctccggacctgtgggaaaggccctgagcgacgcatgtatgggcacaatcgcctccttcctgtctaagtaccaggacatcatcatcgaacaccagaaggtggtgaagggcaaccagaagagactggagagcctgcgggagctggccggcaaggaaaacctggaataccctagcgtgaccctgccacctcagcctcacaccaaggagggcgttgatgcctacaacgaagtgatcgcccgggtgcgaatgtgggtgaacctgaacctgtggcagaagctgaagctaagcagagatgatgccaagcctctgctgagactgaagggattcccttcctttcctctggtcgagagacaggccaacgaagtggactggtgggacatggtgtgtaacgtgaagaagctgatcaacgagaaaaaggaggatggcaaggtgttttggcagaatctggctggctacaagagacaggaagccctgagaccatacctgagcagcgaggaagatcggaagaagggaaagaaattcgctcggtaccagctgggcgacctgctgctgcacctggaaaagaagcacggcgaggactggggaaaggtgtacgacgaggcctgggagcggattgacaagaaagtggaaggcctgagcaagcacatcaagctggaagaggaacggagaagcgaggacgcccagagcaaggccgccctgaccgactggctgcgggctaaggccagcttcgtgatcgagggcctgaaggaggccgacaaggacgagttctgcagatgcgagctgaagctgcagaagtggtacggggacctgcggggaaagcccttcgccatcgaagccgagaacagcatcctggacatcagcggcttcagcaagcagtacaactgtgccttcatctggcagaaggacggcgtgaagaagctgaacctgtacctgatcatcaactacttcaagggcggcaagctgcggttcaagaagatcaaacctgaagccttcgaagccaacagattctacaccgtgatcaacaaaaagagcggcgagatcgtgcccatggaggtgaacttcaacttcgacgaccccaacctgatcatcctgcctctggcctttggcaagagacagggcagagaattcatctggaacgacctgctgtccctggaaaccggcagcctgaagctggccaacggaagagtgatcgagaagacactgtacaacagaagaacccggcaggatgagcctgccctgttcgtggccctgaccttcgagcggcgggaggtcctggactcctccaatatcaaaccaatgaacctgatcggcgtggcaagaggcgaaaacatccccgccgtgatcgccctgaccgaccccgagggctgcccactgagccggtttaaggatagcctgggaaacccaacccacatcctgagaatcggcgagagctataaggagaagcagcggaccatccaggccaagaaggaggtggagcagcggagagccggcggctacagccggaagtacgccagcaaagccaagaatctggcagacgatatggtgagaaacaccgctagagatctgctgtactacgccgtgacccaggatgccatgctgatcttcgccaacctgagccggggcttcggccggcagggcaagcggaccttcatggccgagagacagtacacacggatggaggactggctgaccgccaagctggcctacgagggcctgagcaagacctacctgtccaagacactggcccagtacacctccaagacatgcagcaactgtgggtttaccatcaccagcgccgactacgacagggtgctggagaagctgaagaagacagcaacaggctggatgaccacaattaacggcaaggagctgaaggtggagggccagattacctactacaacagatacaagagacagaacgtagtcaaggacctgtccgtcgagctggatagactgagcgaagaatctgtgaacaacgacatctcctcctggacaaagggcagaagcggagaagctctgagcctcctgaagaaaagattctcccatagacccgtgcaggagaagttcgtgtgcctgaactgcggcttcgagacacacgcagccgagcaagccgccctgaacatcgccagatcctggctgttcctgcggagccaggagtacaagaaataccagacaaacaagacaaccggcaacaccgataagagagccttcgtcgagacctggcagtccttttaccggaagaagcttaaggaggtgtggaaacctgccgtgcggtctggcggatctggcggaggctccacaagccaggccgaggtgaccttcgaggacgtggccgtgctgttcagcagggaggagtggggcaggctgggccccgcccagaggggcctgtacagggacgtgatgctggagacctacaggaacctggtgagcctgggcgccggccccgccgcccccaagcccggcgtgatcacccagctggagaggggcgacgagccctgggtgctggacgcccagggcgccaagggcaaggagaggctgagggtgagcaccagccccaagaaaaagagaaaagtctaagctgccttctgcggggcttgccttctggccatgcccttcttctctcccttgcacctgtacctcttggtctttgaataaagcctgagtaggaaggctagcaaaaaaaaaaaaaaaaaaaaaaaaaaaaaaaaaaaaaaaaaaaaaaaaaaaaaaaaaaaaaaaaaaaaaaaaaaaaaaaa

SEQ ID NO: 2610 - RNA, 5419 nt, synthetic construct
  source 1..5419: mol_type = other RNA
aggaaataagagagaaaagaagagtaagaagaaatataagagccaccatggcccctaagaagaagcgtaaagtgagccgggtgaacggcagcggcagcggcggcggcatgaaccacgaccaggagttcgacccccctaaggtgtaccctcccgtccccgccgagaagagaaagcccatccgggtcctgagcctgttcgatggcatcgccaccggtctgctggtgctgaaggacctgggcatccaggtggataggtacattgcctccgaggtgtgcgaggactccatcaccgtgggaatggtgcgtcatcagggcaagatcatgtacgtgggcgacgtgcggagcgtgacacagaagcatatccaggagtggggccctttcgacctggtgatcggcggcagcccttgcaatgacctgagcatcgtgaacccagcccggaagggcctgtacgagggaaccggcagactgttcttcgagttttacagactgctgcacgacgcccggcctaaggaaggcgacgaccggcccttcttttggctgttcgagaatgtggtggccatgggagtcagcgacaagcgggatattagccggttcctggagagcaaccccgtgatgatcgatgccaaggaagtgagcgccgcccaccgggccagatacttctggggcaatctgcctggcatgaacagacccctggccagcaccgtgaacgacaagctggagctgcaggagtgcctggagcacggccggatcgccaagttcagcaaggtgagaaccatcaccacccgaagcaacagcatcaaacaaggcaaggaccagcactttcctgtgttcatgaacgagaaggaggacatcctgtggtgtaccgagatggagagagtgttcgggttcccagtccactacacagatgtcagcaacatgtctagactggccagacagagactgctgggaagaagctggtccgtccctgtgatcagacacctgttcgcccctctgaaggagtacttcgcctgcgtgagcagcggcaacagcaacgccaacagccggggccccagcttctctagcggcctggtgccactgtccctgagagggagccacatgggccccatggagatctacaaaaccgtgagcgcctggaagcggcagcctgtgcgcgtgctgagcctgtttcggaatatcgataaagtcctgaaaagcctgggattcctggagagcggctctggctccggcggtggcaccctgaagtacgtggaggatgtgacaaacgtggtcagacgggatgtggagaagtggggccccttcgatctggtgtacggcagcacccaacccctgggcagctcttgtgaccggtgccctggctggtacatgtttcagttccaccggatcctgcagtacgccctgccgagacaggagtcccagcggccattcttttggattttcatggacaacttgctgctgaccgaggatgaccaggaaactaccactcggttcctgcagaccgaagccgtgaccctgcaggacgtgagaggccgggactaccagaacgccatgcgggtgtggtccaacatccctggactgaaaagcaagcacgcacctctgacccctaaagaagaggagtacctgcaggcccaggtgcggagcagaagcaagctggacgcccctaaggtggatctgctggtgaagaattgcctcctgcccctgagagagtacttcaagtatttcagccagaatagtctgcccctgggcggcccaagcagcggcgcccctcctcccagcggcggcagcccagccggctccccaacctctaccgaggagggcacctctgagtccgccacccccgagagcggccctggcacctccaccgagcccagcgagggcagcgcacccggcagccctgccggcagccccacctccacagaggagggaaccagcaccgagcccagcgaaggcagcgccccaggcaccagcaccgagcctagtgagggcggctctggcggcggcagcgcccaggagattaaacggatcaacaagatcagaagaagacttgtgaaagacagcaacaccaagaaggccggcaagacaggccccatgaaaaccctgctggttagagtgatgacacccgatctgagagagcggctggaaaacctgagaaagaagcctgaaaatatcccccagcccatcagcaatacatctagagccaacctgaataagctgctgaccgattacaccgaaatgaagaaggcgatcctgcatgtgtactgggaagagttccagaaggaccctgtgggcctgatgagccgggtggcccagcctgccagcaagaagatcgatcagaacaagctgaaacctgagatggacgagaagggcaacctgaccaccgccggctttgcctgctctcagtgtggccagcccctgttcgtgtacaagctggagcaggtgtctgagaagggcaaggcttacaccaactacttcggacggtgcaatgtggccgagcacgaaaagctgatcctgctggcccagctgaagcccgagaaggatagcgacgaagccgtgacatatagcctgggaaagtttgggcagagggccctggatttctacagcattcatgtgaccaaggagtccacccaccccgtgaagcccctggcccagatcgccggaaacagatacgcctccggacctgtgggaaaggccctgagcgacgcatgtatgggcacaatcgcctccttcctgtctaagtaccaggacatcatcatcgaacaccagaaggtggtgaagggcaaccagaagagactggagagcctgcgggagctggccggcaaggaaaacctggaataccctagcgtgaccctgccacctcagcctcacaccaaggagggcgttgatgcctacaacgaagtgatcgcccgggtgcgaatgtgggtgaacctgaacctgtggcagaagctgaagctaagcagagatgatgccaagcctctgctgagactgaagggattcccttcctttcctctggtcgagagacaggccaacgaagtggactggtgggacatggtgtgtaacgtgaagaagctgatcaacgagaaaaaggaggatggcaaggtgttttggcagaatctggctggctacaagagacaggaagccctgagaccatacctgagcagcgaggaagatcggaagaagggaaagaaattcgctcggtaccagctgggcgacctgctgctgcacctggaaaagaagcacggcgaggactggggaaaggtgtacgacgaggcctgggagcggattgacaagaaagtggaaggcctgagcaagcacatcaagctggaagaggaacggagaagcgaggacgcccagagcaaggccgccctgaccgactggctgcgggctaaggccagcttcgtgatcgagggcctgaaggaggccgacaaggacgagttctgcagatgcgagctgaagctgcagaagtggtacggggacctgcggggaaagcccttcgccatcgaagccgagaacagcatcctggacatcagcggcttcagcaagcagtacaactgtgccttcatctggcagaaggacggcgtgaagaagctgaacctgtacctgatcatcaactacttcaagggcggcaagctgcggttcaagaagatcaaacctgaagccttcgaagccaacagattctacaccgtgatcaacaaaaagagcggcgagatcgtgcccatggaggtgaacttcaacttcgacgaccccaacctgatcatcctgcctctggcctttggcaagagacagggcagagaattcatctggaacgacctgctgtccctggaaaccggcagcctgaagctggccaacggaagagtgatcgagaagacactgtacaacagaagaacccggcaggatgagcctgccctgttcgtggccctgaccttcgagcggcgggaggtcctggactcctccaatatcaaaccaatgaacctgatcggcgtggcaagaggcgaaaacatccccgccgtgatcgccctgaccgaccccgagggctgcccactgagccggtttaaggatagcctgggaaacccaacccacatcctgagaatcggcgagagctataaggagaagcagcggaccatccaggccaagaaggaggtggagcagcggagagccggcggctacagccggaagtacgccagcaaagccaagaatctggcagacgatatggtgagaaacaccgctagagatctgctgtactacgccgtgacccaggatgccatgctgatcttcgccaacctgagccggggcttcggccggcagggcaagcggaccttcatggccgagagacagtacacacggatggaggactggctgaccgccaagctggcctacgagggcctgagcaagacctacctgtccaagacactggcccagtacacctccaagacatgcagcaactgtgggtttaccatcaccagcgccgactacgacagggtgctggagaagctgaagaagacagcaacaggctggatgaccacaattaacggcaaggagctgaaggtggagggccagattacctactacaacagatacaagagacagaacgtagtcaaggacctgtccgtcgagctggatagactgagcgaagaatctgtgaacaacgacatctcctcctggacaaagggcagaagcggagaagctctgagcctcctgaagaaaagattctcccatagacccgtgcaggagaagttcgtgtgcctgaactgcggcttcgagacacacgcagccgagcaagccgccctgaacatcgccagatcctggctgttcctgcggagccaggagtacaagaaataccagacaaacaagacaaccggcaacaccgataagagagccttcgtcgagacctggcagtccttttaccggaagaagcttaaggaggtgtggaaacctgccgtgcggtctggcggatctggcggaggctccacaagcccccagaagagcgtgaccttcgaggacgtggccgtgtacttcacccagaccgagtgggacggcctgagccccgcccagagggccctgtacagggacgtgatgctggagaactacggcaacgtggccagcctgggcttcagcctgctgaagcccgccgtgatcctgcagctggagggcgccggcgagctgggcgaccccagcctgctggtggccggcaccgaggtgggcagccagggcgtgtggaccagccccaagaaaaagagaaaagtctaagctgccttctgcggggcttgccttctggccatgcccttcttctctcccttgcacctgtacctcttggtctttgaataaagcctgagtaggaaggctagcaaaaaaaaaaaaaaaaaaaaaaaaaaaaaaaaaaaaaaaaaaaaaaaaaaaaaaaaaaaaaaaaaaaaaaaaaaaaaaaa

SEQ ID NO: 2611 - RNA, 5419 nt, synthetic construct
  source 1..5419: mol_type = other RNA
aggaaataagagagaaaagaagagtaagaagaaatataagagccaccatggcccctaagaagaagcgtaaagtgagccgggtgaacggcagcggcagcggcggcggcatgaaccacgaccaggagttcgacccccctaaggtgtaccctcccgtccccgccgagaagagaaagcccatccgggtcctgagcctgttcgatggcatcgccaccggtctgctggtgctgaaggacctgggcatccaggtggataggtacattgcctccgaggtgtgcgaggactccatcaccgtgggaatggtgcgtcatcagggcaagatcatgtacgtgggcgacgtgcggagcgtgacacagaagcatatccaggagtggggccctttcgacctggtgatcggcggcagcccttgcaatgacctgagcatcgtgaacccagcccggaagggcctgtacgagggaaccggcagactgttcttcgagttttacagactgctgcacgacgcccggcctaaggaaggcgacgaccggcccttcttttggctgttcgagaatgtggtggccatgggagtcagcgacaagcgggatattagccggttcctggagagcaaccccgtgatgatcgatgccaaggaagtgagcgccgcccaccgggccagatacttctggggcaatctgcctggcatgaacagacccctggccagcaccgtgaacgacaagctggagctgcaggagtgcctggagcacggccggatcgccaagttcagcaaggtgagaaccatcaccacccgaagcaacagcatcaaacaaggcaaggaccagcactttcctgtgttcatgaacgagaaggaggacatcctgtggtgtaccgagatggagagagtgttcgggttcccagtccactacacagatgtcagcaacatgtctagactggccagacagagactgctgggaagaagctggtccgtccctgtgatcagacacctgttcgcccctctgaaggagtacttcgcctgcgtgagcagcggcaacagcaacgccaacagccggggccccagcttctctagcggcctggtgccactgtccctgagagggagccacatgggccccatggagatctacaaaaccgtgagcgcctggaagcggcagcctgtgcgcgtgctgagcctgtttcggaatatcgataaagtcctgaaaagcctgggattcctggagagcggctctggctccggcggtggcaccctgaagtacgtggaggatgtgacaaacgtggtcagacgggatgtggagaagtggggccccttcgatctggtgtacggcagcacccaacccctgggcagctcttgtgaccggtgccctggctggtacatgtttcagttccaccggatcctgcagtacgccctgccgagacaggagtcccagcggccattcttttggattttcatggacaacttgctgctgaccgaggatgaccaggaaactaccactcggttcctgcagaccgaagccgtgaccctgcaggacgtgagaggccgggactaccagaacgccatgcgggtgtggtccaacatccctggactgaaaagcaagcacgcacctctgacccctaaagaagaggagtacctgcaggcccaggtgcggagcagaagcaagctggacgcccctaaggtggatctgctggtgaagaattgcctcctgcccctgagagagtacttcaagtatttcagccagaatagtctgcccctgggcggcccaagcagcggcgcccctcctcccagcggcggcagcccagccggctccccaacctctaccgaggagggcacctctgagtccgccacccccgagagcggccctggcacctccaccgagcccagcgagggcagcgcacccggcagccctgccggcagccccacctccacagaggagggaaccagcaccgagcccagcgaaggcagcgccccaggcaccagcaccgagcctagtgagggcggctctggcggcggcagcgcccaggagattaaacggatcaacaagatcagaagaagacttgtgaaagacagcaacaccaagaaggccggcaagacaggccccatgaaaaccctgctggttagagtgatgacacccgatctgagagagcggctggaaaacctgagaaagaagcctgaaaatatcccccagcccatcagcaatacatctagagccaacctgaataagctgctgaccgattacaccgaaatgaagaaggcgatcctgcatgtgtactgggaagagttccagaaggaccctgtgggcctgatgagccgggtggcccagcctgccagcaagaagatcgatcagaacaagctgaaacctgagatggacgagaagggcaacctgaccaccgccggctttgcctgctctcagtgtggccagcccctgttcgtgtacaagctggagcaggtgtctgagaagggcaaggcttacaccaactacttcggacggtgcaatgtggccgagcacgaaaagctgatcctgctggcccagctgaagcccgagaaggatagcgacgaagccgtgacatatagcctgggaaagtttgggcagagggccctggatttctacagcattcatgtgaccaaggagtccacccaccccgtgaagcccctggcccagatcgccggaaacagatacgcctccggacctgtgggaaaggccctgagcgacgcatgtatgggcacaatcgcctccttcctgtctaagtaccaggacatcatcatcgaacaccagaaggtggtgaagggcaaccagaagagactggagagcctgcgggagctggccggcaaggaaaacctggaataccctagcgtgaccctgccacctcagcctcacaccaaggagggcgttgatgcctacaacgaagtgatcgcccgggtgcgaatgtgggtgaacctgaacctgtggcagaagctgaagctaagcagagatgatgccaagcctctgctgagactgaagggattcccttcctttcctctggtcgagagacaggccaacgaagtggactggtgggacatggtgtgtaacgtgaagaagctgatcaacgagaaaaaggaggatggcaaggtgttttggcagaatctggctggctacaagagacaggaagccctgagaccatacctgagcagcgaggaagatcggaagaagggaaagaaattcgctcggtaccagctgggcgacctgctgctgcacctggaaaagaagcacggcgaggactggggaaaggtgtacgacgaggcctgggagcggattgacaagaaagtggaaggcctgagcaagcacatcaagctggaagaggaacggagaagcgaggacgcccagagcaaggccgccctgaccgactggctgcgggctaaggccagcttcgtgatcgagggcctgaaggaggccgacaaggacgagttctgcagatgcgagctgaagctgcagaagtggtacggggacctgcggggaaagcccttcgccatcgaagccgagaacagcatcctggacatcagcggcttcagcaagcagtacaactgtgccttcatctggcagaaggacggcgtgaagaagctgaacctgtacctgatcatcaactacttcaagggcggcaagctgcggttcaagaagatcaaacctgaagccttcgaagccaacagattctacaccgtgatcaacaaaaagagcggcgagatcgtgcccatggaggtgaacttcaacttcgacgaccccaacctgatcatcctgcctctggcctttggcaagagacagggcagagaattcatctggaacgacctgctgtccctggaaaccggcagcctgaagctggccaacggaagagtgatcgagaagacactgtacaacagaagaacccggcaggatgagcctgccctgttcgtggccctgaccttcgagcggcgggaggtcctggactcctccaatatcaaaccaatgaacctgatcggcgtggcaagaggcgaaaacatccccgccgtgatcgccctgaccgaccccgagggctgcccactgagccggtttaaggatagcctgggaaacccaacccacatcctgagaatcggcgagagctataaggagaagcagcggaccatccaggccaagaaggaggtggagcagcggagagccggcggctacagccggaagtacgccagcaaagccaagaatctggcagacgatatggtgagaaacaccgctagagatctgctgtactacgccgtgacccaggatgccatgctgatcttcgccaacctgagccggggcttcggccggcagggcaagcggaccttcatggccgagagacagtacacacggatggaggactggctgaccgccaagctggcctacgagggcctgagcaagacctacctgtccaagacactggcccagtacacctccaagacatgcagcaactgtgggtttaccatcaccagcgccgactacgacagggtgctggagaagctgaagaagacagcaacaggctggatgaccacaattaacggcaaggagctgaaggtggagggccagattacctactacaacagatacaagagacagaacgtagtcaaggacctgtccgtcgagctggatagactgagcgaagaatctgtgaacaacgacatctcctcctggacaaagggcagaagcggagaagctctgagcctcctgaagaaaagattctcccatagacccgtgcaggagaagttcgtgtgcctgaactgcggcttcgagacacacgcagccgagcaagccgccctgaacatcgccagatcctggctgttcctgcggagccaggagtacaagaaataccagacaaacaagacaaccggcaacaccgataagagagccttcgtcgagacctggcagtccttttaccggaagaagcttaaggaggtgtggaaacctgccgtgcggtctggcggatctggcggaggctccacaagcccccaggagctggtgaccttccaggacgtggccgtgtacttcacccccgaggaggtgaggtacctggacagctaccagaaggccctgtacaaggacgtgatgctggagaactacggcaacatggccagcctgggcttccccctgagcaagcccgtgctgatcagccagctggagaggggcgaggagccctgggccatggaccccctggtggccaaggagaggaagaccaggaggggcaccagcaccagccccaagaaaaagagaaaagtctaagctgccttctgcggggcttgccttctggccatgcccttcttctctcccttgcacctgtacctcttggtctttgaataaagcctgagtaggaaggctagcaaaaaaaaaaaaaaaaaaaaaaaaaaaaaaaaaaaaaaaaaaaaaaaaaaaaaaaaaaaaaaaaaaaaaaaaaaaaaaaa

SEQ ID NO: 2612 - RNA, 5419 nt, synthetic construct
  source 1..5419: mol_type = other RNA
aggaaataagagagaaaagaagagtaagaagaaatataagagccaccatggcccctaagaagaagcgtaaagtgagccgggtgaacggcagcggcagcggcggcggcatgaaccacgaccaggagttcgacccccctaaggtgtaccctcccgtccccgccgagaagagaaagcccatccgggtcctgagcctgttcgatggcatcgccaccggtctgctggtgctgaaggacctgggcatccaggtggataggtacattgcctccgaggtgtgcgaggactccatcaccgtgggaatggtgcgtcatcagggcaagatcatgtacgtgggcgacgtgcggagcgtgacacagaagcatatccaggagtggggccctttcgacctggtgatcggcggcagcccttgcaatgacctgagcatcgtgaacccagcccggaagggcctgtacgagggaaccggcagactgttcttcgagttttacagactgctgcacgacgcccggcctaaggaaggcgacgaccggcccttcttttggctgttcgagaatgtggtggccatgggagtcagcgacaagcgggatattagccggttcctggagagcaaccccgtgatgatcgatgccaaggaagtgagcgccgcccaccgggccagatacttctggggcaatctgcctggcatgaacagacccctggccagcaccgtgaacgacaagctggagctgcaggagtgcctggagcacggccggatcgccaagttcagcaaggtgagaaccatcaccacccgaagcaacagcatcaaacaaggcaaggaccagcactttcctgtgttcatgaacgagaaggaggacatcctgtggtgtaccgagatggagagagtgttcgggttcccagtccactacacagatgtcagcaacatgtctagactggccagacagagactgctgggaagaagctggtccgtccctgtgatcagacacctgttcgcccctctgaaggagtacttcgcctgcgtgagcagcggcaacagcaacgccaacagccggggccccagcttctctagcggcctggtgccactgtccctgagagggagccacatgggccccatggagatctacaaaaccgtgagcgcctggaagcggcagcctgtgcgcgtgctgagcctgtttcggaatatcgataaagtcctgaaaagcctgggattcctggagagcggctctggctccggcggtggcaccctgaagtacgtggaggatgtgacaaacgtggtcagacgggatgtggagaagtggggccccttcgatctggtgtacggcagcacccaacccctgggcagctcttgtgaccggtgccctggctggtacatgtttcagttccaccggatcctgcagtacgccctgccgagacaggagtcccagcggccattcttttggattttcatggacaacttgctgctgaccgaggatgaccaggaaactaccactcggttcctgcagaccgaagccgtgaccctgcaggacgtgagaggccgggactaccagaacgccatgcgggtgtggtccaacatccctggactgaaaagcaagcacgcacctctgacccctaaagaagaggagtacctgcaggcccaggtgcggagcagaagcaagctggacgcccctaaggtggatctgctggtgaagaattgcctcctgcccctgagagagtacttcaagtatttcagccagaatagtctgcccctgggcggcccaagcagcggcgcccctcctcccagcggcggcagcccagccggctccccaacctctaccgaggagggcacctctgagtccgccacccccgagagcggccctggcacctccaccgagcccagcgagggcagcgcacccggcagccctgccggcagccccacctccacagaggagggaaccagcaccgagcccagcgaaggcagcgccccaggcaccagcaccgagcctagtgagggcggctctggcggcggcagcgcccaggagattaaacggatcaacaagatcagaagaagacttgtgaaagacagcaacaccaagaaggccggcaagacaggccccatgaaaaccctgctggttagagtgatgacacccgatctgagagagcggctggaaaacctgagaaagaagcctgaaaatatcccccagcccatcagcaatacatctagagccaacctgaataagctgctgaccgattacaccgaaatgaagaaggcgatcctgcatgtgtactgggaagagttccagaaggaccctgtgggcctgatgagccgggtggcccagcctgccagcaagaagatcgatcagaacaagctgaaacctgagatggacgagaagggcaacctgaccaccgccggctttgcctgctctcagtgtggccagcccctgttcgtgtacaagctggagcaggtgtctgagaagggcaaggcttacaccaactacttcggacggtgcaatgtggccgagcacgaaaagctgatcctgctggcccagctgaagcccgagaaggatagcgacgaagccgtgacatatagcctgggaaagtttgggcagagggccctggatttctacagcattcatgtgaccaaggagtccacccaccccgtgaagcccctggcccagatcgccggaaacagatacgcctccggacctgtgggaaaggccctgagcgacgcatgtatgggcacaatcgcctccttcctgtctaagtaccaggacatcatcatcgaacaccagaaggtggtgaagggcaaccagaagagactggagagcctgcgggagctggccggcaaggaaaacctggaataccctagcgtgaccctgccacctcagcctcacaccaaggagggcgttgatgcctacaacgaagtgatcgcccgggtgcgaatgtgggtgaacctgaacctgtggcagaagctgaagctaagcagagatgatgccaagcctctgctgagactgaagggattcccttcctttcctctggtcgagagacaggccaacgaagtggactggtgggacatggtgtgtaacgtgaagaagctgatcaacgagaaaaaggaggatggcaaggtgttttggcagaatctggctggctacaagagacaggaagccctgagaccatacctgagcagcgaggaagatcggaagaagggaaagaaattcgctcggtaccagctgggcgacctgctgctgcacctggaaaagaagcacggcgaggactggggaaaggtgtacgacgaggcctgggagcggattgacaagaaagtggaaggcctgagcaagcacatcaagctggaagaggaacggagaagcgaggacgcccagagcaaggccgccctgaccgactggctgcgggctaaggccagcttcgtgatcgagggcctgaaggaggccgacaaggacgagttctgcagatgcgagctgaagctgcagaagtggtacggggacctgcggggaaagcccttcgccatcgaagccgagaacagcatcctggacatcagcggcttcagcaagcagtacaactgtgccttcatctggcagaaggacggcgtgaagaagctgaacctgtacctgatcatcaactacttcaagggcggcaagctgcggttcaagaagatcaaacctgaagccttcgaagccaacagattctacaccgtgatcaacaaaaagagcggcgagatcgtgcccatggaggtgaacttcaacttcgacgaccccaacctgatcatcctgcctctggcctttggcaagagacagggcagagaattcatctggaacgacctgctgtccctggaaaccggcagcctgaagctggccaacggaagagtgatcgagaagacactgtacaacagaagaacccggcaggatgagcctgccctgttcgtggccctgaccttcgagcggcgggaggtcctggactcctccaatatcaaaccaatgaacctgatcggcgtggcaagaggcgaaaacatccccgccgtgatcgccctgaccgaccccgagggctgcccactgagccggtttaaggatagcctgggaaacccaacccacatcctgagaatcggcgagagctataaggagaagcagcggaccatccaggccaagaaggaggtggagcagcggagagccggcggctacagccggaagtacgccagcaaagccaagaatctggcagacgatatggtgagaaacaccgctagagatctgctgtactacgccgtgacccaggatgccatgctgatcttcgccaacctgagccggggcttcggccggcagggcaagcggaccttcatggccgagagacagtacacacggatggaggactggctgaccgccaagctggcctacgagggcctgagcaagacctacctgtccaagacactggcccagtacacctccaagacatgcagcaactgtgggtttaccatcaccagcgccgactacgacagggtgctggagaagctgaagaagacagcaacaggctggatgaccacaattaacggcaaggagctgaaggtggagggccagattacctactacaacagatacaagagacagaacgtagtcaaggacctgtccgtcgagctggatagactgagcgaagaatctgtgaacaacgacatctcctcctggacaaagggcagaagcggagaagctctgagcctcctgaagaaaagattctcccatagacccgtgcaggagaagttcgtgtgcctgaactgcggcttcgagacacacgcagccgagcaagccgccctgaacatcgccagatcctggctgttcctgcggagccaggagtacaagaaataccagacaaacaagacaaccggcaacaccgataagagagccttcgtcgagacctggcagtccttttaccggaagaagcttaaggaggtgtggaaacctgccgtgcggtctggcggatctggcggaggctccacaagcaccgtgggcagcgtgatgttcagcgacgtgagcgtggacttcagccaggaggagtgggagtgcctggaccccggccagagggacctgtacagggacgtgatgctggagaactacagcaacctgctgagcatgggcctgtacatccccaagccccaggtgatcagcctgctggagcagggcaaggagccctggatggtgggcagggagctgaccaggggcctgtgcagcgacctggagagcatgaccagccccaagaaaaagagaaaagtctaagctgccttctgcggggcttgccttctggccatgcccttcttctctcccttgcacctgtacctcttggtctttgaataaagcctgagtaggaaggctagcaaaaaaaaaaaaaaaaaaaaaaaaaaaaaaaaaaaaaaaaaaaaaaaaaaaaaaaaaaaaaaaaaaaaaaaaaaaaaaaa

SEQ ID NO: 2613 - RNA, 5419 nt, synthetic construct
  source 1..5419: mol_type = other RNA
aggaaataagagagaaaagaagagtaagaagaaatataagagccaccatggcccctaagaagaagcgtaaagtgagccgggtgaacggcagcggcagcggcggcggcatgaaccacgaccaggagttcgacccccctaaggtgtaccctcccgtccccgccgagaagagaaagcccatccgggtcctgagcctgttcgatggcatcgccaccggtctgctggtgctgaaggacctgggcatccaggtggataggtacattgcctccgaggtgtgcgaggactccatcaccgtgggaatggtgcgtcatcagggcaagatcatgtacgtgggcgacgtgcggagcgtgacacagaagcatatccaggagtggggccctttcgacctggtgatcggcggcagcccttgcaatgacctgagcatcgtgaacccagcccggaagggcctgtacgagggaaccggcagactgttcttcgagttttacagactgctgcacgacgcccggcctaaggaaggcgacgaccggcccttcttttggctgttcgagaatgtggtggccatgggagtcagcgacaagcgggatattagccggttcctggagagcaaccccgtgatgatcgatgccaaggaagtgagcgccgcccaccgggccagatacttctggggcaatctgcctggcatgaacagacccctggccagcaccgtgaacgacaagctggagctgcaggagtgcctggagcacggccggatcgccaagttcagcaaggtgagaaccatcaccacccgaagcaacagcatcaaacaaggcaaggaccagcactttcctgtgttcatgaacgagaaggaggacatcctgtggtgtaccgagatggagagagtgttcgggttcccagtccactacacagatgtcagcaacatgtctagactggccagacagagactgctgggaagaagctggtccgtccctgtgatcagacacctgttcgcccctctgaaggagtacttcgcctgcgtgagcagcggcaacagcaacgccaacagccggggccccagcttctctagcggcctggtgccactgtccctgagagggagccacatgggccccatggagatctacaaaaccgtgagcgcctggaagcggcagcctgtgcgcgtgctgagcctgtttcggaatatcgataaagtcctgaaaagcctgggattcctggagagcggctctggctccggcggtggcaccctgaagtacgtggaggatgtgacaaacgtggtcagacgggatgtggagaagtggggccccttcgatctggtgtacggcagcacccaacccctgggcagctcttgtgaccggtgccctggctggtacatgtttcagttccaccggatcctgcagtacgccctgccgagacaggagtcccagcggccattcttttggattttcatggacaacttgctgctgaccgaggatgaccaggaaactaccactcggttcctgcagaccgaagccgtgaccctgcaggacgtgagaggccgggactaccagaacgccatgcgggtgtggtccaacatccctggactgaaaagcaagcacgcacctctgacccctaaagaagaggagtacctgcaggcccaggtgcggagcagaagcaagctggacgcccctaaggtggatctgctggtgaagaattgcctcctgcccctgagagagtacttcaagtatttcagccagaatagtctgcccctgggcggcccaagcagcggcgcccctcctcccagcggcggcagcccagccggctccccaacctctaccgaggagggcacctctgagtccgccacccccgagagcggccctggcacctccaccgagcccagcgagggcagcgcacccggcagccctgccggcagccccacctccacagaggagggaaccagcaccgagcccagcgaaggcagcgccccaggcaccagcaccgagcctagtgagggcggctctggcggcggcagcgcccaggagattaaacggatcaacaagatcagaagaagacttgtgaaagacagcaacaccaagaaggccggcaagacaggccccatgaaaaccctgctggttagagtgatgacacccgatctgagagagcggctggaaaacctgagaaagaagcctgaaaatatcccccagcccatcagcaatacatctagagccaacctgaataagctgctgaccgattacaccgaaatgaagaaggcgatcctgcatgtgtactgggaagagttccagaaggaccctgtgggcctgatgagccgggtggcccagcctgccagcaagaagatcgatcagaacaagctgaaacctgagatggacgagaagggcaacctgaccaccgccggctttgcctgctctcagtgtggccagcccctgttcgtgtacaagctggagcaggtgtctgagaagggcaaggcttacaccaactacttcggacggtgcaatgtggccgagcacgaaaagctgatcctgctggcccagctgaagcccgagaaggatagcgacgaagccgtgacatatagcctgggaaagtttgggcagagggccctggatttctacagcattcatgtgaccaaggagtccacccaccccgtgaagcccctggcccagatcgccggaaacagatacgcctccggacctgtgggaaaggccctgagcgacgcatgtatgggcacaatcgcctccttcctgtctaagtaccaggacatcatcatcgaacaccagaaggtggtgaagggcaaccagaagagactggagagcctgcgggagctggccggcaaggaaaacctggaataccctagcgtgaccctgccacctcagcctcacaccaaggagggcgttgatgcctacaacgaagtgatcgcccgggtgcgaatgtgggtgaacctgaacctgtggcagaagctgaagctaagcagagatgatgccaagcctctgctgagactgaagggattcccttcctttcctctggtcgagagacaggccaacgaagtggactggtgggacatggtgtgtaacgtgaagaagctgatcaacgagaaaaaggaggatggcaaggtgttttggcagaatctggctggctacaagagacaggaagccctgagaccatacctgagcagcgaggaagatcggaagaagggaaagaaattcgctcggtaccagctgggcgacctgctgctgcacctggaaaagaagcacggcgaggactggggaaaggtgtacgacgaggcctgggagcggattgacaagaaagtggaaggcctgagcaagcacatcaagctggaagaggaacggagaagcgaggacgcccagagcaaggccgccctgaccgactggctgcgggctaaggccagcttcgtgatcgagggcctgaaggaggccgacaaggacgagttctgcagatgcgagctgaagctgcagaagtggtacggggacctgcggggaaagcccttcgccatcgaagccgagaacagcatcctggacatcagcggcttcagcaagcagtacaactgtgccttcatctggcagaaggacggcgtgaagaagctgaacctgtacctgatcatcaactacttcaagggcggcaagctgcggttcaagaagatcaaacctgaagccttcgaagccaacagattctacaccgtgatcaacaaaaagagcggcgagatcgtgcccatggaggtgaacttcaacttcgacgaccccaacctgatcatcctgcctctggcctttggcaagagacagggcagagaattcatctggaacgacctgctgtccctggaaaccggcagcctgaagctggccaacggaagagtgatcgagaagacactgtacaacagaagaacccggcaggatgagcctgccctgttcgtggccctgaccttcgagcggcgggaggtcctggactcctccaatatcaaaccaatgaacctgatcggcgtggcaagaggcgaaaacatccccgccgtgatcgccctgaccgaccccgagggctgcccactgagccggtttaaggatagcctgggaaacccaacccacatcctgagaatcggcgagagctataaggagaagcagcggaccatccaggccaagaaggaggtggagcagcggagagccggcggctacagccggaagtacgccagcaaagccaagaatctggcagacgatatggtgagaaacaccgctagagatctgctgtactacgccgtgacccaggatgccatgctgatcttcgccaacctgagccggggcttcggccggcagggcaagcggaccttcatggccgagagacagtacacacggatggaggactggctgaccgccaagctggcctacgagggcctgagcaagacctacctgtccaagacactggcccagtacacctccaagacatgcagcaactgtgggtttaccatcaccagcgccgactacgacagggtgctggagaagctgaagaagacagcaacaggctggatgaccacaattaacggcaaggagctgaaggtggagggccagattacctactacaacagatacaagagacagaacgtagtcaaggacctgtccgtcgagctggatagactgagcgaagaatctgtgaacaacgacatctcctcctggacaaagggcagaagcggagaagctctgagcctcctgaagaaaagattctcccatagacccgtgcaggagaagttcgtgtgcctgaactgcggcttcgagacacacgcagccgagcaagccgccctgaacatcgccagatcctggctgttcctgcggagccaggagtacaagaaataccagacaaacaagacaaccggcaacaccgataagagagccttcgtcgagacctggcagtccttttaccggaagaagcttaaggaggtgtggaaacctgccgtgcggtctggcggatctggcggaggctccacaagcgtgcaggagcccgtgaccttcaaggacgtggccgtggacttcacccaggaggagtggggccagctggacctggtgcagaggaccctgtacagggacgtgatgctggagacctacggccacctgctgagcgtgggcaaccagatcgccaagcccgaggtgatcagcctgctggagcagggcgaggagccctggagcgtggagcaggcctgcccccagcacacctgccccgagtggatgaggaacaccagccccaagaaaaagagaaaagtctaagctgccttctgcggggcttgccttctggccatgcccttcttctctcccttgcacctgtacctcttggtctttgaataaagcctgagtaggaaggctagcaaaaaaaaaaaaaaaaaaaaaaaaaaaaaaaaaaaaaaaaaaaaaaaaaaaaaaaaaaaaaaaaaaaaaaaaaaaaaaaa

SEQ ID NO: 2614 - RNA, 5419 nt, synthetic construct
  source 1..5419: mol_type = other RNA
aggaaataagagagaaaagaagagtaagaagaaatataagagccaccatggcccctaagaagaagcgtaaagtgagccgggtgaacggcagcggcagcggcggcggcatgaaccacgaccaggagttcgacccccctaaggtgtaccctcccgtccccgccgagaagagaaagcccatccgggtcctgagcctgttcgatggcatcgccaccggtctgctggtgctgaaggacctgggcatccaggtggataggtacattgcctccgaggtgtgcgaggactccatcaccgtgggaatggtgcgtcatcagggcaagatcatgtacgtgggcgacgtgcggagcgtgacacagaagcatatccaggagtggggccctttcgacctggtgatcggcggcagcccttgcaatgacctgagcatcgtgaacccagcccggaagggcctgtacgagggaaccggcagactgttcttcgagttttacagactgctgcacgacgcccggcctaaggaaggcgacgaccggcccttcttttggctgttcgagaatgtggtggccatgggagtcagcgacaagcgggatattagccggttcctggagagcaaccccgtgatgatcgatgccaaggaagtgagcgccgcccaccgggccagatacttctggggcaatctgcctggcatgaacagacccctggccagcaccgtgaacgacaagctggagctgcaggagtgcctggagcacggccggatcgccaagttcagcaaggtgagaaccatcaccacccgaagcaacagcatcaaacaaggcaaggaccagcactttcctgtgttcatgaacgagaaggaggacatcctgtggtgtaccgagatggagagagtgttcgggttcccagtccactacacagatgtcagcaacatgtctagactggccagacagagactgctgggaagaagctggtccgtccctgtgatcagacacctgttcgcccctctgaaggagtacttcgcctgcgtgagcagcggcaacagcaacgccaacagccggggccccagcttctctagcggcctggtgccactgtccctgagagggagccacatgggccccatggagatctacaaaaccgtgagcgcctggaagcggcagcctgtgcgcgtgctgagcctgtttcggaatatcgataaagtcctgaaaagcctgggattcctggagagcggctctggctccggcggtggcaccctgaagtacgtggaggatgtgacaaacgtggtcagacgggatgtggagaagtggggccccttcgatctggtgtacggcagcacccaacccctgggcagctcttgtgaccggtgccctggctggtacatgtttcagttccaccggatcctgcagtacgccctgccgagacaggagtcccagcggccattcttttggattttcatggacaacttgctgctgaccgaggatgaccaggaaactaccactcggttcctgcagaccgaagccgtgaccctgcaggacgtgagaggccgggactaccagaacgccatgcgggtgtggtccaacatccctggactgaaaagcaagcacgcacctctgacccctaaagaagaggagtacctgcaggcccaggtgcggagcagaagcaagctggacgcccctaaggtggatctgctggtgaagaattgcctcctgcccctgagagagtacttcaagtatttcagccagaatagtctgcccctgggcggcccaagcagcggcgcccctcctcccagcggcggcagcccagccggctccccaacctctaccgaggagggcacctctgagtccgccacccccgagagcggccctggcacctccaccgagcccagcgagggcagcgcacccggcagccctgccggcagccccacctccacagaggagggaaccagcaccgagcccagcgaaggcagcgccccaggcaccagcaccgagcctagtgagggcggctctggcggcggcagcgcccaggagattaaacggatcaacaagatcagaagaagacttgtgaaagacagcaacaccaagaaggccggcaagacaggccccatgaaaaccctgctggttagagtgatgacacccgatctgagagagcggctggaaaacctgagaaagaagcctgaaaatatcccccagcccatcagcaatacatctagagccaacctgaataagctgctgaccgattacaccgaaatgaagaaggcgatcctgcatgtgtactgggaagagttccagaaggaccctgtgggcctgatgagccgggtggcccagcctgccagcaagaagatcgatcagaacaagctgaaacctgagatggacgagaagggcaacctgaccaccgccggctttgcctgctctcagtgtggccagcccctgttcgtgtacaagctggagcaggtgtctgagaagggcaaggcttacaccaactacttcggacggtgcaatgtggccgagcacgaaaagctgatcctgctggcccagctgaagcccgagaaggatagcgacgaagccgtgacatatagcctgggaaagtttgggcagagggccctggatttctacagcattcatgtgaccaaggagtccacccaccccgtgaagcccctggcccagatcgccggaaacagatacgcctccggacctgtgggaaaggccctgagcgacgcatgtatgggcacaatcgcctccttcctgtctaagtaccaggacatcatcatcgaacaccagaaggtggtgaagggcaaccagaagagactggagagcctgcgggagctggccggcaaggaaaacctggaataccctagcgtgaccctgccacctcagcctcacaccaaggagggcgttgatgcctacaacgaagtgatcgcccgggtgcgaatgtgggtgaacctgaacctgtggcagaagctgaagctaagcagagatgatgccaagcctctgctgagactgaagggattcccttcctttcctctggtcgagagacaggccaacgaagtggactggtgggacatggtgtgtaacgtgaagaagctgatcaacgagaaaaaggaggatggcaaggtgttttggcagaatctggctggctacaagagacaggaagccctgagaccatacctgagcagcgaggaagatcggaagaagggaaagaaattcgctcggtaccagctgggcgacctgctgctgcacctggaaaagaagcacggcgaggactggggaaaggtgtacgacgaggcctgggagcggattgacaagaaagtggaaggcctgagcaagcacatcaagctggaagaggaacggagaagcgaggacgcccagagcaaggccgccctgaccgactggctgcgggctaaggccagcttcgtgatcgagggcctgaaggaggccgacaaggacgagttctgcagatgcgagctgaagctgcagaagtggtacggggacctgcggggaaagcccttcgccatcgaagccgagaacagcatcctggacatcagcggcttcagcaagcagtacaactgtgccttcatctggcagaaggacggcgtgaagaagctgaacctgtacctgatcatcaactacttcaagggcggcaagctgcggttcaagaagatcaaacctgaagccttcgaagccaacagattctacaccgtgatcaacaaaaagagcggcgagatcgtgcccatggaggtgaacttcaacttcgacgaccccaacctgatcatcctgcctctggcctttggcaagagacagggcagagaattcatctggaacgacctgctgtccctggaaaccggcagcctgaagctggccaacggaagagtgatcgagaagacactgtacaacagaagaacccggcaggatgagcctgccctgttcgtggccctgaccttcgagcggcgggaggtcctggactcctccaatatcaaaccaatgaacctgatcggcgtggcaagaggcgaaaacatccccgccgtgatcgccctgaccgaccccgagggctgcccactgagccggtttaaggatagcctgggaaacccaacccacatcctgagaatcggcgagagctataaggagaagcagcggaccatccaggccaagaaggaggtggagcagcggagagccggcggctacagccggaagtacgccagcaaagccaagaatctggcagacgatatggtgagaaacaccgctagagatctgctgtactacgccgtgacccaggatgccatgctgatcttcgccaacctgagccggggcttcggccggcagggcaagcggaccttcatggccgagagacagtacacacggatggaggactggctgaccgccaagctggcctacgagggcctgagcaagacctacctgtccaagacactggcccagtacacctccaagacatgcagcaactgtgggtttaccatcaccagcgccgactacgacagggtgctggagaagctgaagaagacagcaacaggctggatgaccacaattaacggcaaggagctgaaggtggagggccagattacctactacaacagatacaagagacagaacgtagtcaaggacctgtccgtcgagctggatagactgagcgaagaatctgtgaacaacgacatctcctcctggacaaagggcagaagcggagaagctctgagcctcctgaagaaaagattctcccatagacccgtgcaggagaagttcgtgtgcctgaactgcggcttcgagacacacgcagccgagcaagccgccctgaacatcgccagatcctggctgttcctgcggagccaggagtacaagaaataccagacaaacaagacaaccggcaacaccgataagagagccttcgtcgagacctggcagtccttttaccggaagaagcttaaggaggtgtggaaacctgccgtgcggtctggcggatctggcggaggctccacaagcttccaggccagcgtggtgttcgaggacgtggccgtgaacttcacccccgaggagtgggccctgctgaacaggggccagaggaagctgtacagggacgtgatgctggagacctgcaggaacctgagcgccgtgggcaaggacggcagcatccccagcctggtgttcagcgagaagcagaagttccacagcagcggcgacctgaccaggatgcaggagggcctgctgaggagccccctggtggagaccagccccaagaaaaagagaaaagtctaagctgccttctgcggggcttgccttctggccatgcccttcttctctcccttgcacctgtacctcttggtctttgaataaagcctgagtaggaaggctagcaaaaaaaaaaaaaaaaaaaaaaaaaaaaaaaaaaaaaaaaaaaaaaaaaaaaaaaaaaaaaaaaaaaaaaaaaaaaaaaa

SEQ ID NO: 2615 - RNA, 5419 nt, synthetic construct
  source 1..5419: mol_type = other RNA
aggaaataagagagaaaagaagagtaagaagaaatataagagccaccatggcccctaagaagaagcgtaaagtgagccgggtgaacggcagcggcagcggcggcggcatgaaccacgaccaggagttcgacccccctaaggtgtaccctcccgtccccgccgagaagagaaagcccatccgggtcctgagcctgttcgatggcatcgccaccggtctgctggtgctgaaggacctgggcatccaggtggataggtacattgcctccgaggtgtgcgaggactccatcaccgtgggaatggtgcgtcatcagggcaagatcatgtacgtgggcgacgtgcggagcgtgacacagaagcatatccaggagtggggccctttcgacctggtgatcggcggcagcccttgcaatgacctgagcatcgtgaacccagcccggaagggcctgtacgagggaaccggcagactgttcttcgagttttacagactgctgcacgacgcccggcctaaggaaggcgacgaccggcccttcttttggctgttcgagaatgtggtggccatgggagtcagcgacaagcgggatattagccggttcctggagagcaaccccgtgatgatcgatgccaaggaagtgagcgccgcccaccgggccagatacttctggggcaatctgcctggcatgaacagacccctggccagcaccgtgaacgacaagctggagctgcaggagtgcctggagcacggccggatcgccaagttcagcaaggtgagaaccatcaccacccgaagcaacagcatcaaacaaggcaaggaccagcactttcctgtgttcatgaacgagaaggaggacatcctgtggtgtaccgagatggagagagtgttcgggttcccagtccactacacagatgtcagcaacatgtctagactggccagacagagactgctgggaagaagctggtccgtccctgtgatcagacacctgttcgcccctctgaaggagtacttcgcctgcgtgagcagcggcaacagcaacgccaacagccggggccccagcttctctagcggcctggtgccactgtccctgagagggagccacatgggccccatggagatctacaaaaccgtgagcgcctggaagcggcagcctgtgcgcgtgctgagcctgtttcggaatatcgataaagtcctgaaaagcctgggattcctggagagcggctctggctccggcggtggcaccctgaagtacgtggaggatgtgacaaacgtggtcagacgggatgtggagaagtggggccccttcgatctggtgtacggcagcacccaacccctgggcagctcttgtgaccggtgccctggctggtacatgtttcagttccaccggatcctgcagtacgccctgccgagacaggagtcccagcggccattcttttggattttcatggacaacttgctgctgaccgaggatgaccaggaaactaccactcggttcctgcagaccgaagccgtgaccctgcaggacgtgagaggccgggactaccagaacgccatgcgggtgtggtccaacatccctggactgaaaagcaagcacgcacctctgacccctaaagaagaggagtacctgcaggcccaggtgcggagcagaagcaagctggacgcccctaaggtggatctgctggtgaagaattgcctcctgcccctgagagagtacttcaagtatttcagccagaatagtctgcccctgggcggcccaagcagcggcgcccctcctcccagcggcggcagcccagccggctccccaacctctaccgaggagggcacctctgagtccgccacccccgagagcggccctggcacctccaccgagcccagcgagggcagcgcacccggcagccctgccggcagccccacctccacagaggagggaaccagcaccgagcccagcgaaggcagcgccccaggcaccagcaccgagcctagtgagggcggctctggcggcggcagcgcccaggagattaaacggatcaacaagatcagaagaagacttgtgaaagacagcaacaccaagaaggccggcaagacaggccccatgaaaaccctgctggttagagtgatgacacccgatctgagagagcggctggaaaacctgagaaagaagcctgaaaatatcccccagcccatcagcaatacatctagagccaacctgaataagctgctgaccgattacaccgaaatgaagaaggcgatcctgcatgtgtactgggaagagttccagaaggaccctgtgggcctgatgagccgggtggcccagcctgccagcaagaagatcgatcagaacaagctgaaacctgagatggacgagaagggcaacctgaccaccgccggctttgcctgctctcagtgtggccagcccctgttcgtgtacaagctggagcaggtgtctgagaagggcaaggcttacaccaactacttcggacggtgcaatgtggccgagcacgaaaagctgatcctgctggcccagctgaagcccgagaaggatagcgacgaagccgtgacatatagcctgggaaagtttgggcagagggccctggatttctacagcattcatgtgaccaaggagtccacccaccccgtgaagcccctggcccagatcgccggaaacagatacgcctccggacctgtgggaaaggccctgagcgacgcatgtatgggcacaatcgcctccttcctgtctaagtaccaggacatcatcatcgaacaccagaaggtggtgaagggcaaccagaagagactggagagcctgcgggagctggccggcaaggaaaacctggaataccctagcgtgaccctgccacctcagcctcacaccaaggagggcgttgatgcctacaacgaagtgatcgcccgggtgcgaatgtgggtgaacctgaacctgtggcagaagctgaagctaagcagagatgatgccaagcctctgctgagactgaagggattcccttcctttcctctggtcgagagacaggccaacgaagtggactggtgggacatggtgtgtaacgtgaagaagctgatcaacgagaaaaaggaggatggcaaggtgttttggcagaatctggctggctacaagagacaggaagccctgagaccatacctgagcagcgaggaagatcggaagaagggaaagaaattcgctcggtaccagctgggcgacctgctgctgcacctggaaaagaagcacggcgaggactggggaaaggtgtacgacgaggcctgggagcggattgacaagaaagtggaaggcctgagcaagcacatcaagctggaagaggaacggagaagcgaggacgcccagagcaaggccgccctgaccgactggctgcgggctaaggccagcttcgtgatcgagggcctgaaggaggccgacaaggacgagttctgcagatgcgagctgaagctgcagaagtggtacggggacctgcggggaaagcccttcgccatcgaagccgagaacagcatcctggacatcagcggcttcagcaagcagtacaactgtgccttcatctggcagaaggacggcgtgaagaagctgaacctgtacctgatcatcaactacttcaagggcggcaagctgcggttcaagaagatcaaacctgaagccttcgaagccaacagattctacaccgtgatcaacaaaaagagcggcgagatcgtgcccatggaggtgaacttcaacttcgacgaccccaacctgatcatcctgcctctggcctttggcaagagacagggcagagaattcatctggaacgacctgctgtccctggaaaccggcagcctgaagctggccaacggaagagtgatcgagaagacactgtacaacagaagaacccggcaggatgagcctgccctgttcgtggccctgaccttcgagcggcgggaggtcctggactcctccaatatcaaaccaatgaacctgatcggcgtggcaagaggcgaaaacatccccgccgtgatcgccctgaccgaccccgagggctgcccactgagccggtttaaggatagcctgggaaacccaacccacatcctgagaatcggcgagagctataaggagaagcagcggaccatccaggccaagaaggaggtggagcagcggagagccggcggctacagccggaagtacgccagcaaagccaagaatctggcagacgatatggtgagaaacaccgctagagatctgctgtactacgccgtgacccaggatgccatgctgatcttcgccaacctgagccggggcttcggccggcagggcaagcggaccttcatggccgagagacagtacacacggatggaggactggctgaccgccaagctggcctacgagggcctgagcaagacctacctgtccaagacactggcccagtacacctccaagacatgcagcaactgtgggtttaccatcaccagcgccgactacgacagggtgctggagaagctgaagaagacagcaacaggctggatgaccacaattaacggcaaggagctgaaggtggagggccagattacctactacaacagatacaagagacagaacgtagtcaaggacctgtccgtcgagctggatagactgagcgaagaatctgtgaacaacgacatctcctcctggacaaagggcagaagcggagaagctctgagcctcctgaagaaaagattctcccatagacccgtgcaggagaagttcgtgtgcctgaactgcggcttcgagacacacgcagccgagcaagccgccctgaacatcgccagatcctggctgttcctgcggagccaggagtacaagaaataccagacaaacaagacaaccggcaacaccgataagagagccttcgtcgagacctggcagtccttttaccggaagaagcttaaggaggtgtggaaacctgccgtgcggtctggcggatctggcggaggctccacaagcagcctgggcagcgagctgttcagggacgtggccatcgtgttcagccaggaggagtggcagtggctggcccccgcccagagggacctgtacagggacgtgatgctggagacctacagcaacctggtgagcctgggcctggccatcagcaagcccgacgtgatcagcttcctggagcagggcaaggagccctggatggtggagagggtggccaccggcgacctgtgccccgtgctggagagcggcaccagccccaagaaaaagagaaaagtctaagctgccttctgcggggcttgccttctggccatgcccttcttctctcccttgcacctgtacctcttggtctttgaataaagcctgagtaggaaggctagcaaaaaaaaaaaaaaaaaaaaaaaaaaaaaaaaaaaaaaaaaaaaaaaaaaaaaaaaaaaaaaaaaaaaaaaaaaaaaaaa

SEQ ID NO: 2616 - RNA, 5419 nt, synthetic construct
  source 1..5419: mol_type = other RNA
aggaaataagagagaaaagaagagtaagaagaaatataagagccaccatggcccctaagaagaagcgtaaagtgagccgggtgaacggcagcggcagcggcggcggcatgaaccacgaccaggagttcgacccccctaaggtgtaccctcccgtccccgccgagaagagaaagcccatccgggtcctgagcctgttcgatggcatcgccaccggtctgctggtgctgaaggacctgggcatccaggtggataggtacattgcctccgaggtgtgcgaggactccatcaccgtgggaatggtgcgtcatcagggcaagatcatgtacgtgggcgacgtgcggagcgtgacacagaagcatatccaggagtggggccctttcgacctggtgatcggcggcagcccttgcaatgacctgagcatcgtgaacccagcccggaagggcctgtacgagggaaccggcagactgttcttcgagttttacagactgctgcacgacgcccggcctaaggaaggcgacgaccggcccttcttttggctgttcgagaatgtggtggccatgggagtcagcgacaagcgggatattagccggttcctggagagcaaccccgtgatgatcgatgccaaggaagtgagcgccgcccaccgggccagatacttctggggcaatctgcctggcatgaacagacccctggccagcaccgtgaacgacaagctggagctgcaggagtgcctggagcacggccggatcgccaagttcagcaaggtgagaaccatcaccacccgaagcaacagcatcaaacaaggcaaggaccagcactttcctgtgttcatgaacgagaaggaggacatcctgtggtgtaccgagatggagagagtgttcgggttcccagtccactacacagatgtcagcaacatgtctagactggccagacagagactgctgggaagaagctggtccgtccctgtgatcagacacctgttcgcccctctgaaggagtacttcgcctgcgtgagcagcggcaacagcaacgccaacagccggggccccagcttctctagcggcctggtgccactgtccctgagagggagccacatgggccccatggagatctacaaaaccgtgagcgcctggaagcggcagcctgtgcgcgtgctgagcctgtttcggaatatcgataaagtcctgaaaagcctgggattcctggagagcggctctggctccggcggtggcaccctgaagtacgtggaggatgtgacaaacgtggtcagacgggatgtggagaagtggggccccttcgatctggtgtacggcagcacccaacccctgggcagctcttgtgaccggtgccctggctggtacatgtttcagttccaccggatcctgcagtacgccctgccgagacaggagtcccagcggccattcttttggattttcatggacaacttgctgctgaccgaggatgaccaggaaactaccactcggttcctgcagaccgaagccgtgaccctgcaggacgtgagaggccgggactaccagaacgccatgcgggtgtggtccaacatccctggactgaaaagcaagcacgcacctctgacccctaaagaagaggagtacctgcaggcccaggtgcggagcagaagcaagctggacgcccctaaggtggatctgctggtgaagaattgcctcctgcccctgagagagtacttcaagtatttcagccagaatagtctgcccctgggcggcccaagcagcggcgcccctcctcccagcggcggcagcccagccggctccccaacctctaccgaggagggcacctctgagtccgccacccccgagagcggccctggcacctccaccgagcccagcgagggcagcgcacccggcagccctgccggcagccccacctccacagaggagggaaccagcaccgagcccagcgaaggcagcgccccaggcaccagcaccgagcctagtgagggcggctctggcggcggcagcgcccaggagattaaacggatcaacaagatcagaagaagacttgtgaaagacagcaacaccaagaaggccggcaagacaggccccatgaaaaccctgctggttagagtgatgacacccgatctgagagagcggctggaaaacctgagaaagaagcctgaaaatatcccccagcccatcagcaatacatctagagccaacctgaataagctgctgaccgattacaccgaaatgaagaaggcgatcctgcatgtgtactgggaagagttccagaaggaccctgtgggcctgatgagccgggtggcccagcctgccagcaagaagatcgatcagaacaagctgaaacctgagatggacgagaagggcaacctgaccaccgccggctttgcctgctctcagtgtggccagcccctgttcgtgtacaagctggagcaggtgtctgagaagggcaaggcttacaccaactacttcggacggtgcaatgtggccgagcacgaaaagctgatcctgctggcccagctgaagcccgagaaggatagcgacgaagccgtgacatatagcctgggaaagtttgggcagagggccctggatttctacagcattcatgtgaccaaggagtccacccaccccgtgaagcccctggcccagatcgccggaaacagatacgcctccggacctgtgggaaaggccctgagcgacgcatgtatgggcacaatcgcctccttcctgtctaagtaccaggacatcatcatcgaacaccagaaggtggtgaagggcaaccagaagagactggagagcctgcgggagctggccggcaaggaaaacctggaataccctagcgtgaccctgccacctcagcctcacaccaaggagggcgttgatgcctacaacgaagtgatcgcccgggtgcgaatgtgggtgaacctgaacctgtggcagaagctgaagctaagcagagatgatgccaagcctctgctgagactgaagggattcccttcctttcctctggtcgagagacaggccaacgaagtggactggtgggacatggtgtgtaacgtgaagaagctgatcaacgagaaaaaggaggatggcaaggtgttttggcagaatctggctggctacaagagacaggaagccctgagaccatacctgagcagcgaggaagatcggaagaagggaaagaaattcgctcggtaccagctgggcgacctgctgctgcacctggaaaagaagcacggcgaggactggggaaaggtgtacgacgaggcctgggagcggattgacaagaaagtggaaggcctgagcaagcacatcaagctggaagaggaacggagaagcgaggacgcccagagcaaggccgccctgaccgactggctgcgggctaaggccagcttcgtgatcgagggcctgaaggaggccgacaaggacgagttctgcagatgcgagctgaagctgcagaagtggtacggggacctgcggggaaagcccttcgccatcgaagccgagaacagcatcctggacatcagcggcttcagcaagcagtacaactgtgccttcatctggcagaaggacggcgtgaagaagctgaacctgtacctgatcatcaactacttcaagggcggcaagctgcggttcaagaagatcaaacctgaagccttcgaagccaacagattctacaccgtgatcaacaaaaagagcggcgagatcgtgcccatggaggtgaacttcaacttcgacgaccccaacctgatcatcctgcctctggcctttggcaagagacagggcagagaattcatctggaacgacctgctgtccctggaaaccggcagcctgaagctggccaacggaagagtgatcgagaagacactgtacaacagaagaacccggcaggatgagcctgccctgttcgtggccctgaccttcgagcggcgggaggtcctggactcctccaatatcaaaccaatgaacctgatcggcgtggcaagaggcgaaaacatccccgccgtgatcgccctgaccgaccccgagggctgcccactgagccggtttaaggatagcctgggaaacccaacccacatcctgagaatcggcgagagctataaggagaagcagcggaccatccaggccaagaaggaggtggagcagcggagagccggcggctacagccggaagtacgccagcaaagccaagaatctggcagacgatatggtgagaaacaccgctagagatctgctgtactacgccgtgacccaggatgccatgctgatcttcgccaacctgagccggggcttcggccggcagggcaagcggaccttcatggccgagagacagtacacacggatggaggactggctgaccgccaagctggcctacgagggcctgagcaagacctacctgtccaagacactggcccagtacacctccaagacatgcagcaactgtgggtttaccatcaccagcgccgactacgacagggtgctggagaagctgaagaagacagcaacaggctggatgaccacaattaacggcaaggagctgaaggtggagggccagattacctactacaacagatacaagagacagaacgtagtcaaggacctgtccgtcgagctggatagactgagcgaagaatctgtgaacaacgacatctcctcctggacaaagggcagaagcggagaagctctgagcctcctgaagaaaagattctcccatagacccgtgcaggagaagttcgtgtgcctgaactgcggcttcgagacacacgcagccgagcaagccgccctgaacatcgccagatcctggctgttcctgcggagccaggagtacaagaaataccagacaaacaagacaaccggcaacaccgataagagagccttcgtcgagacctggcagtccttttaccggaagaagcttaaggaggtgtggaaacctgccgtgcggtctggcggatctggcggaggctccacaagcccccaggagagcgtggccttcgacgacgtggccgtgtacttcaccaagaaggagtgggccatcatggtgcccgaccagagggccctgtacagggacgtgatgctggagaactacgaggccgtggccttcgtggccgtgccccccaccagcaagcccgccctgatcagccacctggagcagggcaaggagccctgcttcacccagccccagggcgtgctgagcaggagggactggagggccggcaccagccccaagaaaaagagaaaagtctaagctgccttctgcggggcttgccttctggccatgcccttcttctctcccttgcacctgtacctcttggtctttgaataaagcctgagtaggaaggctagcaaaaaaaaaaaaaaaaaaaaaaaaaaaaaaaaaaaaaaaaaaaaaaaaaaaaaaaaaaaaaaaaaaaaaaaaaaaaaaaa

SEQ ID NO: 2617 - RNA, 5419 nt, synthetic construct
  source 1..5419: mol_type = other RNA
aggaaataagagagaaaagaagagtaagaagaaatataagagccaccatggcccctaagaagaagcgtaaagtgagccgggtgaacggcagcggcagcggcggcggcatgaaccacgaccaggagttcgacccccctaaggtgtaccctcccgtccccgccgagaagagaaagcccatccgggtcctgagcctgttcgatggcatcgccaccggtctgctggtgctgaaggacctgggcatccaggtggataggtacattgcctccgaggtgtgcgaggactccatcaccgtgggaatggtgcgtcatcagggcaagatcatgtacgtgggcgacgtgcggagcgtgacacagaagcatatccaggagtggggccctttcgacctggtgatcggcggcagcccttgcaatgacctgagcatcgtgaacccagcccggaagggcctgtacgagggaaccggcagactgttcttcgagttttacagactgctgcacgacgcccggcctaaggaaggcgacgaccggcccttcttttggctgttcgagaatgtggtggccatgggagtcagcgacaagcgggatattagccggttcctggagagcaaccccgtgatgatcgatgccaaggaagtgagcgccgcccaccgggccagatacttctggggcaatctgcctggcatgaacagacccctggccagcaccgtgaacgacaagctggagctgcaggagtgcctggagcacggccggatcgccaagttcagcaaggtgagaaccatcaccacccgaagcaacagcatcaaacaaggcaaggaccagcactttcctgtgttcatgaacgagaaggaggacatcctgtggtgtaccgagatggagagagtgttcgggttcccagtccactacacagatgtcagcaacatgtctagactggccagacagagactgctgggaagaagctggtccgtccctgtgatcagacacctgttcgcccctctgaaggagtacttcgcctgcgtgagcagcggcaacagcaacgccaacagccggggccccagcttctctagcggcctggtgccactgtccctgagagggagccacatgggccccatggagatctacaaaaccgtgagcgcctggaagcggcagcctgtgcgcgtgctgagcctgtttcggaatatcgataaagtcctgaaaagcctgggattcctggagagcggctctggctccggcggtggcaccctgaagtacgtggaggatgtgacaaacgtggtcagacgggatgtggagaagtggggccccttcgatctggtgtacggcagcacccaacccctgggcagctcttgtgaccggtgccctggctggtacatgtttcagttccaccggatcctgcagtacgccctgccgagacaggagtcccagcggccattcttttggattttcatggacaacttgctgctgaccgaggatgaccaggaaactaccactcggttcctgcagaccgaagccgtgaccctgcaggacgtgagaggccgggactaccagaacgccatgcgggtgtggtccaacatccctggactgaaaagcaagcacgcacctctgacccctaaagaagaggagtacctgcaggcccaggtgcggagcagaagcaagctggacgcccctaaggtggatctgctggtgaagaattgcctcctgcccctgagagagtacttcaagtatttcagccagaatagtctgcccctgggcggcccaagcagcggcgcccctcctcccagcggcggcagcccagccggctccccaacctctaccgaggagggcacctctgagtccgccacccccgagagcggccctggcacctccaccgagcccagcgagggcagcgcacccggcagccctgccggcagccccacctccacagaggagggaaccagcaccgagcccagcgaaggcagcgccccaggcaccagcaccgagcctagtgagggcggctctggcggcggcagcgcccaggagattaaacggatcaacaagatcagaagaagacttgtgaaagacagcaacaccaagaaggccggcaagacaggccccatgaaaaccctgctggttagagtgatgacacccgatctgagagagcggctggaaaacctgagaaagaagcctgaaaatatcccccagcccatcagcaatacatctagagccaacctgaataagctgctgaccgattacaccgaaatgaagaaggcgatcctgcatgtgtactgggaagagttccagaaggaccctgtgggcctgatgagccgggtggcccagcctgccagcaagaagatcgatcagaacaagctgaaacctgagatggacgagaagggcaacctgaccaccgccggctttgcctgctctcagtgtggccagcccctgttcgtgtacaagctggagcaggtgtctgagaagggcaaggcttacaccaactacttcggacggtgcaatgtggccgagcacgaaaagctgatcctgctggcccagctgaagcccgagaaggatagcgacgaagccgtgacatatagcctgggaaagtttgggcagagggccctggatttctacagcattcatgtgaccaaggagtccacccaccccgtgaagcccctggcccagatcgccggaaacagatacgcctccggacctgtgggaaaggccctgagcgacgcatgtatgggcacaatcgcctccttcctgtctaagtaccaggacatcatcatcgaacaccagaaggtggtgaagggcaaccagaagagactggagagcctgcgggagctggccggcaaggaaaacctggaataccctagcgtgaccctgccacctcagcctcacaccaaggagggcgttgatgcctacaacgaagtgatcgcccgggtgcgaatgtgggtgaacctgaacctgtggcagaagctgaagctaagcagagatgatgccaagcctctgctgagactgaagggattcccttcctttcctctggtcgagagacaggccaacgaagtggactggtgggacatggtgtgtaacgtgaagaagctgatcaacgagaaaaaggaggatggcaaggtgttttggcagaatctggctggctacaagagacaggaagccctgagaccatacctgagcagcgaggaagatcggaagaagggaaagaaattcgctcggtaccagctgggcgacctgctgctgcacctggaaaagaagcacggcgaggactggggaaaggtgtacgacgaggcctgggagcggattgacaagaaagtggaaggcctgagcaagcacatcaagctggaagaggaacggagaagcgaggacgcccagagcaaggccgccctgaccgactggctgcgggctaaggccagcttcgtgatcgagggcctgaaggaggccgacaaggacgagttctgcagatgcgagctgaagctgcagaagtggtacggggacctgcggggaaagcccttcgccatcgaagccgagaacagcatcctggacatcagcggcttcagcaagcagtacaactgtgccttcatctggcagaaggacggcgtgaagaagctgaacctgtacctgatcatcaactacttcaagggcggcaagctgcggttcaagaagatcaaacctgaagccttcgaagccaacagattctacaccgtgatcaacaaaaagagcggcgagatcgtgcccatggaggtgaacttcaacttcgacgaccccaacctgatcatcctgcctctggcctttggcaagagacagggcagagaattcatctggaacgacctgctgtccctggaaaccggcagcctgaagctggccaacggaagagtgatcgagaagacactgtacaacagaagaacccggcaggatgagcctgccctgttcgtggccctgaccttcgagcggcgggaggtcctggactcctccaatatcaaaccaatgaacctgatcggcgtggcaagaggcgaaaacatccccgccgtgatcgccctgaccgaccccgagggctgcccactgagccggtttaaggatagcctgggaaacccaacccacatcctgagaatcggcgagagctataaggagaagcagcggaccatccaggccaagaaggaggtggagcagcggagagccggcggctacagccggaagtacgccagcaaagccaagaatctggcagacgatatggtgagaaacaccgctagagatctgctgtactacgccgtgacccaggatgccatgctgatcttcgccaacctgagccggggcttcggccggcagggcaagcggaccttcatggccgagagacagtacacacggatggaggactggctgaccgccaagctggcctacgagggcctgagcaagacctacctgtccaagacactggcccagtacacctccaagacatgcagcaactgtgggtttaccatcaccagcgccgactacgacagggtgctggagaagctgaagaagacagcaacaggctggatgaccacaattaacggcaaggagctgaaggtggagggccagattacctactacaacagatacaagagacagaacgtagtcaaggacctgtccgtcgagctggatagactgagcgaagaatctgtgaacaacgacatctcctcctggacaaagggcagaagcggagaagctctgagcctcctgaagaaaagattctcccatagacccgtgcaggagaagttcgtgtgcctgaactgcggcttcgagacacacgcagccgagcaagccgccctgaacatcgccagatcctggctgttcctgcggagccaggagtacaagaaataccagacaaacaagacaaccggcaacaccgataagagagccttcgtcgagacctggcagtccttttaccggaagaagcttaaggaggtgtggaaacctgccgtgcggtctggcggatctggcggaggctccacaagcgagcccggccccgtgaccttcggcgacgtggccgtgtacttcagcagggaggagtggggctgcctgaggcccgcccagagggccctgtacagggacgtgatgagggagacctacagccacctgggcgccctgggcgtggagggcagcaagcccgccctgatcagctgggtggaggaggaggccgagctgtggggccccgccgcccaggaccccgaggtggccaagaggcccaccgaggccgacaccagccccaagaaaaagagaaaagtctaagctgccttctgcggggcttgccttctggccatgcccttcttctctcccttgcacctgtacctcttggtctttgaataaagcctgagtaggaaggctagcaaaaaaaaaaaaaaaaaaaaaaaaaaaaaaaaaaaaaaaaaaaaaaaaaaaaaaaaaaaaaaaaaaaaaaaaaaaaaaaa

SEQ ID NO: 2618 - RNA, 5419 nt, synthetic construct
  source 1..5419: mol_type = other RNA
aggaaataagagagaaaagaagagtaagaagaaatataagagccaccatggcccctaagaagaagcgtaaagtgagccgggtgaacggcagcggcagcggcggcggcatgaaccacgaccaggagttcgacccccctaaggtgtaccctcccgtccccgccgagaagagaaagcccatccgggtcctgagcctgttcgatggcatcgccaccggtctgctggtgctgaaggacctgggcatccaggtggataggtacattgcctccgaggtgtgcgaggactccatcaccgtgggaatggtgcgtcatcagggcaagatcatgtacgtgggcgacgtgcggagcgtgacacagaagcatatccaggagtggggccctttcgacctggtgatcggcggcagcccttgcaatgacctgagcatcgtgaacccagcccggaagggcctgtacgagggaaccggcagactgttcttcgagttttacagactgctgcacgacgcccggcctaaggaaggcgacgaccggcccttcttttggctgttcgagaatgtggtggccatgggagtcagcgacaagcgggatattagccggttcctggagagcaaccccgtgatgatcgatgccaaggaagtgagcgccgcccaccgggccagatacttctggggcaatctgcctggcatgaacagacccctggccagcaccgtgaacgacaagctggagctgcaggagtgcctggagcacggccggatcgccaagttcagcaaggtgagaaccatcaccacccgaagcaacagcatcaaacaaggcaaggaccagcactttcctgtgttcatgaacgagaaggaggacatcctgtggtgtaccgagatggagagagtgttcgggttcccagtccactacacagatgtcagcaacatgtctagactggccagacagagactgctgggaagaagctggtccgtccctgtgatcagacacctgttcgcccctctgaaggagtacttcgcctgcgtgagcagcggcaacagcaacgccaacagccggggccccagcttctctagcggcctggtgccactgtccctgagagggagccacatgggccccatggagatctacaaaaccgtgagcgcctggaagcggcagcctgtgcgcgtgctgagcctgtttcggaatatcgataaagtcctgaaaagcctgggattcctggagagcggctctggctccggcggtggcaccctgaagtacgtggaggatgtgacaaacgtggtcagacgggatgtggagaagtggggccccttcgatctggtgtacggcagcacccaacccctgggcagctcttgtgaccggtgccctggctggtacatgtttcagttccaccggatcctgcagtacgccctgccgagacaggagtcccagcggccattcttttggattttcatggacaacttgctgctgaccgaggatgaccaggaaactaccactcggttcctgcagaccgaagccgtgaccctgcaggacgtgagaggccgggactaccagaacgccatgcgggtgtggtccaacatccctggactgaaaagcaagcacgcacctctgacccctaaagaagaggagtacctgcaggcccaggtgcggagcagaagcaagctggacgcccctaaggtggatctgctggtgaagaattgcctcctgcccctgagagagtacttcaagtatttcagccagaatagtctgcccctgggcggcccaagcagcggcgcccctcctcccagcggcggcagcccagccggctccccaacctctaccgaggagggcacctctgagtccgccacccccgagagcggccctggcacctccaccgagcccagcgagggcagcgcacccggcagccctgccggcagccccacctccacagaggagggaaccagcaccgagcccagcgaaggcagcgccccaggcaccagcaccgagcctagtgagggcggctctggcggcggcagcgcccaggagattaaacggatcaacaagatcagaagaagacttgtgaaagacagcaacaccaagaaggccggcaagacaggccccatgaaaaccctgctggttagagtgatgacacccgatctgagagagcggctggaaaacctgagaaagaagcctgaaaatatcccccagcccatcagcaatacatctagagccaacctgaataagctgctgaccgattacaccgaaatgaagaaggcgatcctgcatgtgtactgggaagagttccagaaggaccctgtgggcctgatgagccgggtggcccagcctgccagcaagaagatcgatcagaacaagctgaaacctgagatggacgagaagggcaacctgaccaccgccggctttgcctgctctcagtgtggccagcccctgttcgtgtacaagctggagcaggtgtctgagaagggcaaggcttacaccaactacttcggacggtgcaatgtggccgagcacgaaaagctgatcctgctggcccagctgaagcccgagaaggatagcgacgaagccgtgacatatagcctgggaaagtttgggcagagggccctggatttctacagcattcatgtgaccaaggagtccacccaccccgtgaagcccctggcccagatcgccggaaacagatacgcctccggacctgtgggaaaggccctgagcgacgcatgtatgggcacaatcgcctccttcctgtctaagtaccaggacatcatcatcgaacaccagaaggtggtgaagggcaaccagaagagactggagagcctgcgggagctggccggcaaggaaaacctggaataccctagcgtgaccctgccacctcagcctcacaccaaggagggcgttgatgcctacaacgaagtgatcgcccgggtgcgaatgtgggtgaacctgaacctgtggcagaagctgaagctaagcagagatgatgccaagcctctgctgagactgaagggattcccttcctttcctctggtcgagagacaggccaacgaagtggactggtgggacatggtgtgtaacgtgaagaagctgatcaacgagaaaaaggaggatggcaaggtgttttggcagaatctggctggctacaagagacaggaagccctgagaccatacctgagcagcgaggaagatcggaagaagggaaagaaattcgctcggtaccagctgggcgacctgctgctgcacctggaaaagaagcacggcgaggactggggaaaggtgtacgacgaggcctgggagcggattgacaagaaagtggaaggcctgagcaagcacatcaagctggaagaggaacggagaagcgaggacgcccagagcaaggccgccctgaccgactggctgcgggctaaggccagcttcgtgatcgagggcctgaaggaggccgacaaggacgagttctgcagatgcgagctgaagctgcagaagtggtacggggacctgcggggaaagcccttcgccatcgaagccgagaacagcatcctggacatcagcggcttcagcaagcagtacaactgtgccttcatctggcagaaggacggcgtgaagaagctgaacctgtacctgatcatcaactacttcaagggcggcaagctgcggttcaagaagatcaaacctgaagccttcgaagccaacagattctacaccgtgatcaacaaaaagagcggcgagatcgtgcccatggaggtgaacttcaacttcgacgaccccaacctgatcatcctgcctctggcctttggcaagagacagggcagagaattcatctggaacgacctgctgtccctggaaaccggcagcctgaagctggccaacggaagagtgatcgagaagacactgtacaacagaagaacccggcaggatgagcctgccctgttcgtggccctgaccttcgagcggcgggaggtcctggactcctccaatatcaaaccaatgaacctgatcggcgtggcaagaggcgaaaacatccccgccgtgatcgccctgaccgaccccgagggctgcccactgagccggtttaaggatagcctgggaaacccaacccacatcctgagaatcggcgagagctataaggagaagcagcggaccatccaggccaagaaggaggtggagcagcggagagccggcggctacagccggaagtacgccagcaaagccaagaatctggcagacgatatggtgagaaacaccgctagagatctgctgtactacgccgtgacccaggatgccatgctgatcttcgccaacctgagccggggcttcggccggcagggcaagcggaccttcatggccgagagacagtacacacggatggaggactggctgaccgccaagctggcctacgagggcctgagcaagacctacctgtccaagacactggcccagtacacctccaagacatgcagcaactgtgggtttaccatcaccagcgccgactacgacagggtgctggagaagctgaagaagacagcaacaggctggatgaccacaattaacggcaaggagctgaaggtggagggccagattacctactacaacagatacaagagacagaacgtagtcaaggacctgtccgtcgagctggatagactgagcgaagaatctgtgaacaacgacatctcctcctggacaaagggcagaagcggagaagctctgagcctcctgaagaaaagattctcccatagacccgtgcaggagaagttcgtgtgcctgaactgcggcttcgagacacacgcagccgagcaagccgccctgaacatcgccagatcctggctgttcctgcggagccaggagtacaagaaataccagacaaacaagacaaccggcaacaccgataagagagccttcgtcgagacctggcagtccttttaccggaagaagcttaaggaggtgtggaaacctgccgtgcggtctggcggatctggcggaggctccacaagcttccaggagagcgtgaccttccaggacgtggccgtggacttcacctgggaggagtggggccacctgggccccgcccagaaggagctgtacagggaggtgatgctggagaactacaggaacctggtgtgcctgggcctggaggtgagcaagcccgacgtggtgtgccagctggagaggggcgaggccccctggatgcccgagggcgccgtgcccaggagctgcagccagaactggggcgccaggaccagccccaagaaaaagagaaaagtctaagctgccttctgcggggcttgccttctggccatgcccttcttctctcccttgcacctgtacctcttggtctttgaataaagcctgagtaggaaggctagcaaaaaaaaaaaaaaaaaaaaaaaaaaaaaaaaaaaaaaaaaaaaaaaaaaaaaaaaaaaaaaaaaaaaaaaaaaaaaaaa

SEQ ID NO: 2619 - RNA, 5419 nt, synthetic construct
  source 1..5419: mol_type = other RNA
aggaaataagagagaaaagaagagtaagaagaaatataagagccaccatggcccctaagaagaagcgtaaagtgagccgggtgaacggcagcggcagcggcggcggcatgaaccacgaccaggagttcgacccccctaaggtgtaccctcccgtccccgccgagaagagaaagcccatccgggtcctgagcctgttcgatggcatcgccaccggtctgctggtgctgaaggacctgggcatccaggtggataggtacattgcctccgaggtgtgcgaggactccatcaccgtgggaatggtgcgtcatcagggcaagatcatgtacgtgggcgacgtgcggagcgtgacacagaagcatatccaggagtggggccctttcgacctggtgatcggcggcagcccttgcaatgacctgagcatcgtgaacccagcccggaagggcctgtacgagggaaccggcagactgttcttcgagttttacagactgctgcacgacgcccggcctaaggaaggcgacgaccggcccttcttttggctgttcgagaatgtggtggccatgggagtcagcgacaagcgggatattagccggttcctggagagcaaccccgtgatgatcgatgccaaggaagtgagcgccgcccaccgggccagatacttctggggcaatctgcctggcatgaacagacccctggccagcaccgtgaacgacaagctggagctgcaggagtgcctggagcacggccggatcgccaagttcagcaaggtgagaaccatcaccacccgaagcaacagcatcaaacaaggcaaggaccagcactttcctgtgttcatgaacgagaaggaggacatcctgtggtgtaccgagatggagagagtgttcgggttcccagtccactacacagatgtcagcaacatgtctagactggccagacagagactgctgggaagaagctggtccgtccctgtgatcagacacctgttcgcccctctgaaggagtacttcgcctgcgtgagcagcggcaacagcaacgccaacagccggggccccagcttctctagcggcctggtgccactgtccctgagagggagccacatgggccccatggagatctacaaaaccgtgagcgcctggaagcggcagcctgtgcgcgtgctgagcctgtttcggaatatcgataaagtcctgaaaagcctgggattcctggagagcggctctggctccggcggtggcaccctgaagtacgtggaggatgtgacaaacgtggtcagacgggatgtggagaagtggggccccttcgatctggtgtacggcagcacccaacccctgggcagctcttgtgaccggtgccctggctggtacatgtttcagttccaccggatcctgcagtacgccctgccgagacaggagtcccagcggccattcttttggattttcatggacaacttgctgctgaccgaggatgaccaggaaactaccactcggttcctgcagaccgaagccgtgaccctgcaggacgtgagaggccgggactaccagaacgccatgcgggtgtggtccaacatccctggactgaaaagcaagcacgcacctctgacccctaaagaagaggagtacctgcaggcccaggtgcggagcagaagcaagctggacgcccctaaggtggatctgctggtgaagaattgcctcctgcccctgagagagtacttcaagtatttcagccagaatagtctgcccctgggcggcccaagcagcggcgcccctcctcccagcggcggcagcccagccggctccccaacctctaccgaggagggcacctctgagtccgccacccccgagagcggccctggcacctccaccgagcccagcgagggcagcgcacccggcagccctgccggcagccccacctccacagaggagggaaccagcaccgagcccagcgaaggcagcgccccaggcaccagcaccgagcctagtgagggcggctctggcggcggcagcgcccaggagattaaacggatcaacaagatcagaagaagacttgtgaaagacagcaacaccaagaaggccggcaagacaggccccatgaaaaccctgctggttagagtgatgacacccgatctgagagagcggctggaaaacctgagaaagaagcctgaaaatatcccccagcccatcagcaatacatctagagccaacctgaataagctgctgaccgattacaccgaaatgaagaaggcgatcctgcatgtgtactgggaagagttccagaaggaccctgtgggcctgatgagccgggtggcccagcctgccagcaagaagatcgatcagaacaagctgaaacctgagatggacgagaagggcaacctgaccaccgccggctttgcctgctctcagtgtggccagcccctgttcgtgtacaagctggagcaggtgtctgagaagggcaaggcttacaccaactacttcggacggtgcaatgtggccgagcacgaaaagctgatcctgctggcccagctgaagcccgagaaggatagcgacgaagccgtgacatatagcctgggaaagtttgggcagagggccctggatttctacagcattcatgtgaccaaggagtccacccaccccgtgaagcccctggcccagatcgccggaaacagatacgcctccggacctgtgggaaaggccctgagcgacgcatgtatgggcacaatcgcctccttcctgtctaagtaccaggacatcatcatcgaacaccagaaggtggtgaagggcaaccagaagagactggagagcctgcgggagctggccggcaaggaaaacctggaataccctagcgtgaccctgccacctcagcctcacaccaaggagggcgttgatgcctacaacgaagtgatcgcccgggtgcgaatgtgggtgaacctgaacctgtggcagaagctgaagctaagcagagatgatgccaagcctctgctgagactgaagggattcccttcctttcctctggtcgagagacaggccaacgaagtggactggtgggacatggtgtgtaacgtgaagaagctgatcaacgagaaaaaggaggatggcaaggtgttttggcagaatctggctggctacaagagacaggaagccctgagaccatacctgagcagcgaggaagatcggaagaagggaaagaaattcgctcggtaccagctgggcgacctgctgctgcacctggaaaagaagcacggcgaggactggggaaaggtgtacgacgaggcctgggagcggattgacaagaaagtggaaggcctgagcaagcacatcaagctggaagaggaacggagaagcgaggacgcccagagcaaggccgccctgaccgactggctgcgggctaaggccagcttcgtgatcgagggcctgaaggaggccgacaaggacgagttctgcagatgcgagctgaagctgcagaagtggtacggggacctgcggggaaagcccttcgccatcgaagccgagaacagcatcctggacatcagcggcttcagcaagcagtacaactgtgccttcatctggcagaaggacggcgtgaagaagctgaacctgtacctgatcatcaactacttcaagggcggcaagctgcggttcaagaagatcaaacctgaagccttcgaagccaacagattctacaccgtgatcaacaaaaagagcggcgagatcgtgcccatggaggtgaacttcaacttcgacgaccccaacctgatcatcctgcctctggcctttggcaagagacagggcagagaattcatctggaacgacctgctgtccctggaaaccggcagcctgaagctggccaacggaagagtgatcgagaagacactgtacaacagaagaacccggcaggatgagcctgccctgttcgtggccctgaccttcgagcggcgggaggtcctggactcctccaatatcaaaccaatgaacctgatcggcgtggcaagaggcgaaaacatccccgccgtgatcgccctgaccgaccccgagggctgcccactgagccggtttaaggatagcctgggaaacccaacccacatcctgagaatcggcgagagctataaggagaagcagcggaccatccaggccaagaaggaggtggagcagcggagagccggcggctacagccggaagtacgccagcaaagccaagaatctggcagacgatatggtgagaaacaccgctagagatctgctgtactacgccgtgacccaggatgccatgctgatcttcgccaacctgagccggggcttcggccggcagggcaagcggaccttcatggccgagagacagtacacacggatggaggactggctgaccgccaagctggcctacgagggcctgagcaagacctacctgtccaagacactggcccagtacacctccaagacatgcagcaactgtgggtttaccatcaccagcgccgactacgacagggtgctggagaagctgaagaagacagcaacaggctggatgaccacaattaacggcaaggagctgaaggtggagggccagattacctactacaacagatacaagagacagaacgtagtcaaggacctgtccgtcgagctggatagactgagcgaagaatctgtgaacaacgacatctcctcctggacaaagggcagaagcggagaagctctgagcctcctgaagaaaagattctcccatagacccgtgcaggagaagttcgtgtgcctgaactgcggcttcgagacacacgcagccgagcaagccgccctgaacatcgccagatcctggctgttcctgcggagccaggagtacaagaaataccagacaaacaagacaaccggcaacaccgataagagagccttcgtcgagacctggcagtccttttaccggaagaagcttaaggaggtgtggaaacctgccgtgcggtctggcggatctggcggaggctccacaagcagccaggagagcgtggccttcgaggacgtggccgtgtacttcaccaccaaggagtgggccatcatggtgcccgccgagagggccctgtacagggacgtgatgctggagaactacgaggccgtggccttcgtggccgtgccccccaccagcaagcccgccctggtgagccacctggagcagggcaaggagagctgcttcatcaggccccccggcgtgctgagcaggagcgactggagggccggcaccagccccaagaaaaagagaaaagtctaagctgccttctgcggggcttgccttctggccatgcccttcttctctcccttgcacctgtacctcttggtctttgaataaagcctgagtaggaaggctagcaaaaaaaaaaaaaaaaaaaaaaaaaaaaaaaaaaaaaaaaaaaaaaaaaaaaaaaaaaaaaaaaaaaaaaaaaaaaaaaa

SEQ ID NO: 2620 - RNA, 5419 nt, synthetic construct
  source 1..5419: mol_type = other RNA
aggaaataagagagaaaagaagagtaagaagaaatataagagccaccatggcccctaagaagaagcgtaaagtgagccgggtgaacggcagcggcagcggcggcggcatgaaccacgaccaggagttcgacccccctaaggtgtaccctcccgtccccgccgagaagagaaagcccatccgggtcctgagcctgttcgatggcatcgccaccggtctgctggtgctgaaggacctgggcatccaggtggataggtacattgcctccgaggtgtgcgaggactccatcaccgtgggaatggtgcgtcatcagggcaagatcatgtacgtgggcgacgtgcggagcgtgacacagaagcatatccaggagtggggccctttcgacctggtgatcggcggcagcccttgcaatgacctgagcatcgtgaacccagcccggaagggcctgtacgagggaaccggcagactgttcttcgagttttacagactgctgcacgacgcccggcctaaggaaggcgacgaccggcccttcttttggctgttcgagaatgtggtggccatgggagtcagcgacaagcgggatattagccggttcctggagagcaaccccgtgatgatcgatgccaaggaagtgagcgccgcccaccgggccagatacttctggggcaatctgcctggcatgaacagacccctggccagcaccgtgaacgacaagctggagctgcaggagtgcctggagcacggccggatcgccaagttcagcaaggtgagaaccatcaccacccgaagcaacagcatcaaacaaggcaaggaccagcactttcctgtgttcatgaacgagaaggaggacatcctgtggtgtaccgagatggagagagtgttcgggttcccagtccactacacagatgtcagcaacatgtctagactggccagacagagactgctgggaagaagctggtccgtccctgtgatcagacacctgttcgcccctctgaaggagtacttcgcctgcgtgagcagcggcaacagcaacgccaacagccggggccccagcttctctagcggcctggtgccactgtccctgagagggagccacatgggccccatggagatctacaaaaccgtgagcgcctggaagcggcagcctgtgcgcgtgctgagcctgtttcggaatatcgataaagtcctgaaaagcctgggattcctggagagcggctctggctccggcggtggcaccctgaagtacgtggaggatgtgacaaacgtggtcagacgggatgtggagaagtggggccccttcgatctggtgtacggcagcacccaacccctgggcagctcttgtgaccggtgccctggctggtacatgtttcagttccaccggatcctgcagtacgccctgccgagacaggagtcccagcggccattcttttggattttcatggacaacttgctgctgaccgaggatgaccaggaaactaccactcggttcctgcagaccgaagccgtgaccctgcaggacgtgagaggccgggactaccagaacgccatgcgggtgtggtccaacatccctggactgaaaagcaagcacgcacctctgacccctaaagaagaggagtacctgcaggcccaggtgcggagcagaagcaagctggacgcccctaaggtggatctgctggtgaagaattgcctcctgcccctgagagagtacttcaagtatttcagccagaatagtctgcccctgggcggcccaagcagcggcgcccctcctcccagcggcggcagcccagccggctccccaacctctaccgaggagggcacctctgagtccgccacccccgagagcggccctggcacctccaccgagcccagcgagggcagcgcacccggcagccctgccggcagccccacctccacagaggagggaaccagcaccgagcccagcgaaggcagcgccccaggcaccagcaccgagcctagtgagggcggctctggcggcggcagcgcccaggagattaaacggatcaacaagatcagaagaagacttgtgaaagacagcaacaccaagaaggccggcaagacaggccccatgaaaaccctgctggttagagtgatgacacccgatctgagagagcggctggaaaacctgagaaagaagcctgaaaatatcccccagcccatcagcaatacatctagagccaacctgaataagctgctgaccgattacaccgaaatgaagaaggcgatcctgcatgtgtactgggaagagttccagaaggaccctgtgggcctgatgagccgggtggcccagcctgccagcaagaagatcgatcagaacaagctgaaacctgagatggacgagaagggcaacctgaccaccgccggctttgcctgctctcagtgtggccagcccctgttcgtgtacaagctggagcaggtgtctgagaagggcaaggcttacaccaactacttcggacggtgcaatgtggccgagcacgaaaagctgatcctgctggcccagctgaagcccgagaaggatagcgacgaagccgtgacatatagcctgggaaagtttgggcagagggccctggatttctacagcattcatgtgaccaaggagtccacccaccccgtgaagcccctggcccagatcgccggaaacagatacgcctccggacctgtgggaaaggccctgagcgacgcatgtatgggcacaatcgcctccttcctgtctaagtaccaggacatcatcatcgaacaccagaaggtggtgaagggcaaccagaagagactggagagcctgcgggagctggccggcaaggaaaacctggaataccctagcgtgaccctgccacctcagcctcacaccaaggagggcgttgatgcctacaacgaagtgatcgcccgggtgcgaatgtgggtgaacctgaacctgtggcagaagctgaagctaagcagagatgatgccaagcctctgctgagactgaagggattcccttcctttcctctggtcgagagacaggccaacgaagtggactggtgggacatggtgtgtaacgtgaagaagctgatcaacgagaaaaaggaggatggcaaggtgttttggcagaatctggctggctacaagagacaggaagccctgagaccatacctgagcagcgaggaagatcggaagaagggaaagaaattcgctcggtaccagctgggcgacctgctgctgcacctggaaaagaagcacggcgaggactggggaaaggtgtacgacgaggcctgggagcggattgacaagaaagtggaaggcctgagcaagcacatcaagctggaagaggaacggagaagcgaggacgcccagagcaaggccgccctgaccgactggctgcgggctaaggccagcttcgtgatcgagggcctgaaggaggccgacaaggacgagttctgcagatgcgagctgaagctgcagaagtggtacggggacctgcggggaaagcccttcgccatcgaagccgagaacagcatcctggacatcagcggcttcagcaagcagtacaactgtgccttcatctggcagaaggacggcgtgaagaagctgaacctgtacctgatcatcaactacttcaagggcggcaagctgcggttcaagaagatcaaacctgaagccttcgaagccaacagattctacaccgtgatcaacaaaaagagcggcgagatcgtgcccatggaggtgaacttcaacttcgacgaccccaacctgatcatcctgcctctggcctttggcaagagacagggcagagaattcatctggaacgacctgctgtccctggaaaccggcagcctgaagctggccaacggaagagtgatcgagaagacactgtacaacagaagaacccggcaggatgagcctgccctgttcgtggccctgaccttcgagcggcgggaggtcctggactcctccaatatcaaaccaatgaacctgatcggcgtggcaagaggcgaaaacatccccgccgtgatcgccctgaccgaccccgagggctgcccactgagccggtttaaggatagcctgggaaacccaacccacatcctgagaatcggcgagagctataaggagaagcagcggaccatccaggccaagaaggaggtggagcagcggagagccggcggctacagccggaagtacgccagcaaagccaagaatctggcagacgatatggtgagaaacaccgctagagatctgctgtactacgccgtgacccaggatgccatgctgatcttcgccaacctgagccggggcttcggccggcagggcaagcggaccttcatggccgagagacagtacacacggatggaggactggctgaccgccaagctggcctacgagggcctgagcaagacctacctgtccaagacactggcccagtacacctccaagacatgcagcaactgtgggtttaccatcaccagcgccgactacgacagggtgctggagaagctgaagaagacagcaacaggctggatgaccacaattaacggcaaggagctgaaggtggagggccagattacctactacaacagatacaagagacagaacgtagtcaaggacctgtccgtcgagctggatagactgagcgaagaatctgtgaacaacgacatctcctcctggacaaagggcagaagcggagaagctctgagcctcctgaagaaaagattctcccatagacccgtgcaggagaagttcgtgtgcctgaactgcggcttcgagacacacgcagccgagcaagccgccctgaacatcgccagatcctggctgttcctgcggagccaggagtacaagaaataccagacaaacaagacaaccggcaacaccgataagagagccttcgtcgagacctggcagtccttttaccggaagaagcttaaggaggtgtggaaacctgccgtgcggtctggcggatctggcggaggctccacaagcaggcccggcgccgtgagcttcgccgacgtggccgtgtacttcagccccgaggagtggggctgcctgaggcccgcccagagggccctgtacagggacgtgatgagggagacctacggccacctgggcgccctgggcttcgccggccccaagcccgccctgatcagctggctggagaggaagaaggaggtgtggagccccgaggccgaggaccccgaggccggcgccaggcaccccggcagcggcaccagccccaagaaaaagagaaaagtctaagctgccttctgcggggcttgccttctggccatgcccttcttctctcccttgcacctgtacctcttggtctttgaataaagcctgagtaggaaggctagcaaaaaaaaaaaaaaaaaaaaaaaaaaaaaaaaaaaaaaaaaaaaaaaaaaaaaaaaaaaaaaaaaaaaaaaaaaaaaaaa

SEQ ID NO: 2621 - RNA, 5419 nt, synthetic construct
  source 1..5419: mol_type = other RNA
aggaaataagagagaaaagaagagtaagaagaaatataagagccaccatggcccctaagaagaagcgtaaagtgagccgggtgaacggcagcggcagcggcggcggcatgaaccacgaccaggagttcgacccccctaaggtgtaccctcccgtccccgccgagaagagaaagcccatccgggtcctgagcctgttcgatggcatcgccaccggtctgctggtgctgaaggacctgggcatccaggtggataggtacattgcctccgaggtgtgcgaggactccatcaccgtgggaatggtgcgtcatcagggcaagatcatgtacgtgggcgacgtgcggagcgtgacacagaagcatatccaggagtggggccctttcgacctggtgatcggcggcagcccttgcaatgacctgagcatcgtgaacccagcccggaagggcctgtacgagggaaccggcagactgttcttcgagttttacagactgctgcacgacgcccggcctaaggaaggcgacgaccggcccttcttttggctgttcgagaatgtggtggccatgggagtcagcgacaagcgggatattagccggttcctggagagcaaccccgtgatgatcgatgccaaggaagtgagcgccgcccaccgggccagatacttctggggcaatctgcctggcatgaacagacccctggccagcaccgtgaacgacaagctggagctgcaggagtgcctggagcacggccggatcgccaagttcagcaaggtgagaaccatcaccacccgaagcaacagcatcaaacaaggcaaggaccagcactttcctgtgttcatgaacgagaaggaggacatcctgtggtgtaccgagatggagagagtgttcgggttcccagtccactacacagatgtcagcaacatgtctagactggccagacagagactgctgggaagaagctggtccgtccctgtgatcagacacctgttcgcccctctgaaggagtacttcgcctgcgtgagcagcggcaacagcaacgccaacagccggggccccagcttctctagcggcctggtgccactgtccctgagagggagccacatgggccccatggagatctacaaaaccgtgagcgcctggaagcggcagcctgtgcgcgtgctgagcctgtttcggaatatcgataaagtcctgaaaagcctgggattcctggagagcggctctggctccggcggtggcaccctgaagtacgtggaggatgtgacaaacgtggtcagacgggatgtggagaagtggggccccttcgatctggtgtacggcagcacccaacccctgggcagctcttgtgaccggtgccctggctggtacatgtttcagttccaccggatcctgcagtacgccctgccgagacaggagtcccagcggccattcttttggattttcatggacaacttgctgctgaccgaggatgaccaggaaactaccactcggttcctgcagaccgaagccgtgaccctgcaggacgtgagaggccgggactaccagaacgccatgcgggtgtggtccaacatccctggactgaaaagcaagcacgcacctctgacccctaaagaagaggagtacctgcaggcccaggtgcggagcagaagcaagctggacgcccctaaggtggatctgctggtgaagaattgcctcctgcccctgagagagtacttcaagtatttcagccagaatagtctgcccctgggcggcccaagcagcggcgcccctcctcccagcggcggcagcccagccggctccccaacctctaccgaggagggcacctctgagtccgccacccccgagagcggccctggcacctccaccgagcccagcgagggcagcgcacccggcagccctgccggcagccccacctccacagaggagggaaccagcaccgagcccagcgaaggcagcgccccaggcaccagcaccgagcctagtgagggcggctctggcggcggcagcgcccaggagattaaacggatcaacaagatcagaagaagacttgtgaaagacagcaacaccaagaaggccggcaagacaggccccatgaaaaccctgctggttagagtgatgacacccgatctgagagagcggctggaaaacctgagaaagaagcctgaaaatatcccccagcccatcagcaatacatctagagccaacctgaataagctgctgaccgattacaccgaaatgaagaaggcgatcctgcatgtgtactgggaagagttccagaaggaccctgtgggcctgatgagccgggtggcccagcctgccagcaagaagatcgatcagaacaagctgaaacctgagatggacgagaagggcaacctgaccaccgccggctttgcctgctctcagtgtggccagcccctgttcgtgtacaagctggagcaggtgtctgagaagggcaaggcttacaccaactacttcggacggtgcaatgtggccgagcacgaaaagctgatcctgctggcccagctgaagcccgagaaggatagcgacgaagccgtgacatatagcctgggaaagtttgggcagagggccctggatttctacagcattcatgtgaccaaggagtccacccaccccgtgaagcccctggcccagatcgccggaaacagatacgcctccggacctgtgggaaaggccctgagcgacgcatgtatgggcacaatcgcctccttcctgtctaagtaccaggacatcatcatcgaacaccagaaggtggtgaagggcaaccagaagagactggagagcctgcgggagctggccggcaaggaaaacctggaataccctagcgtgaccctgccacctcagcctcacaccaaggagggcgttgatgcctacaacgaagtgatcgcccgggtgcgaatgtgggtgaacctgaacctgtggcagaagctgaagctaagcagagatgatgccaagcctctgctgagactgaagggattcccttcctttcctctggtcgagagacaggccaacgaagtggactggtgggacatggtgtgtaacgtgaagaagctgatcaacgagaaaaaggaggatggcaaggtgttttggcagaatctggctggctacaagagacaggaagccctgagaccatacctgagcagcgaggaagatcggaagaagggaaagaaattcgctcggtaccagctgggcgacctgctgctgcacctggaaaagaagcacggcgaggactggggaaaggtgtacgacgaggcctgggagcggattgacaagaaagtggaaggcctgagcaagcacatcaagctggaagaggaacggagaagcgaggacgcccagagcaaggccgccctgaccgactggctgcgggctaaggccagcttcgtgatcgagggcctgaaggaggccgacaaggacgagttctgcagatgcgagctgaagctgcagaagtggtacggggacctgcggggaaagcccttcgccatcgaagccgagaacagcatcctggacatcagcggcttcagcaagcagtacaactgtgccttcatctggcagaaggacggcgtgaagaagctgaacctgtacctgatcatcaactacttcaagggcggcaagctgcggttcaagaagatcaaacctgaagccttcgaagccaacagattctacaccgtgatcaacaaaaagagcggcgagatcgtgcccatggaggtgaacttcaacttcgacgaccccaacctgatcatcctgcctctggcctttggcaagagacagggcagagaattcatctggaacgacctgctgtccctggaaaccggcagcctgaagctggccaacggaagagtgatcgagaagacactgtacaacagaagaacccggcaggatgagcctgccctgttcgtggccctgaccttcgagcggcgggaggtcctggactcctccaatatcaaaccaatgaacctgatcggcgtggcaagaggcgaaaacatccccgccgtgatcgccctgaccgaccccgagggctgcccactgagccggtttaaggatagcctgggaaacccaacccacatcctgagaatcggcgagagctataaggagaagcagcggaccatccaggccaagaaggaggtggagcagcggagagccggcggctacagccggaagtacgccagcaaagccaagaatctggcagacgatatggtgagaaacaccgctagagatctgctgtactacgccgtgacccaggatgccatgctgatcttcgccaacctgagccggggcttcggccggcagggcaagcggaccttcatggccgagagacagtacacacggatggaggactggctgaccgccaagctggcctacgagggcctgagcaagacctacctgtccaagacactggcccagtacacctccaagacatgcagcaactgtgggtttaccatcaccagcgccgactacgacagggtgctggagaagctgaagaagacagcaacaggctggatgaccacaattaacggcaaggagctgaaggtggagggccagattacctactacaacagatacaagagacagaacgtagtcaaggacctgtccgtcgagctggatagactgagcgaagaatctgtgaacaacgacatctcctcctggacaaagggcagaagcggagaagctctgagcctcctgaagaaaagattctcccatagacccgtgcaggagaagttcgtgtgcctgaactgcggcttcgagacacacgcagccgagcaagccgccctgaacatcgccagatcctggctgttcctgcggagccaggagtacaagaaataccagacaaacaagacaaccggcaacaccgataagagagccttcgtcgagacctggcagtccttttaccggaagaagcttaaggaggtgtggaaacctgccgtgcggtctggcggatctggcggaggctccacaagcagccaggagagcgtgaccttcagggacgtggccatcgacttcagccaggaggagtgggagtggctgcagcccgcccagagggacctgtacaggcacgtgatgctggagaactacagccacctggtgagcctgggcctgaacatcagcaagccctacgtggtgagcctgctggagcagggcaagggcccctggctggagaagggcgacgtgaggagggacctgttcagcgagagccacggcgagaccagccccaagaaaaagagaaaagtctaagctgccttctgcggggcttgccttctggccatgcccttcttctctcccttgcacctgtacctcttggtctttgaataaagcctgagtaggaaggctagcaaaaaaaaaaaaaaaaaaaaaaaaaaaaaaaaaaaaaaaaaaaaaaaaaaaaaaaaaaaaaaaaaaaaaaaaaaaaaaaa

SEQ ID NO: 2622 - RNA, 5419 nt, synthetic construct
  source 1..5419: mol_type = other RNA
aggaaataagagagaaaagaagagtaagaagaaatataagagccaccatggcccctaagaagaagcgtaaagtgagccgggtgaacggcagcggcagcggcggcggcatgaaccacgaccaggagttcgacccccctaaggtgtaccctcccgtccccgccgagaagagaaagcccatccgggtcctgagcctgttcgatggcatcgccaccggtctgctggtgctgaaggacctgggcatccaggtggataggtacattgcctccgaggtgtgcgaggactccatcaccgtgggaatggtgcgtcatcagggcaagatcatgtacgtgggcgacgtgcggagcgtgacacagaagcatatccaggagtggggccctttcgacctggtgatcggcggcagcccttgcaatgacctgagcatcgtgaacccagcccggaagggcctgtacgagggaaccggcagactgttcttcgagttttacagactgctgcacgacgcccggcctaaggaaggcgacgaccggcccttcttttggctgttcgagaatgtggtggccatgggagtcagcgacaagcgggatattagccggttcctggagagcaaccccgtgatgatcgatgccaaggaagtgagcgccgcccaccgggccagatacttctggggcaatctgcctggcatgaacagacccctggccagcaccgtgaacgacaagctggagctgcaggagtgcctggagcacggccggatcgccaagttcagcaaggtgagaaccatcaccacccgaagcaacagcatcaaacaaggcaaggaccagcactttcctgtgttcatgaacgagaaggaggacatcctgtggtgtaccgagatggagagagtgttcgggttcccagtccactacacagatgtcagcaacatgtctagactggccagacagagactgctgggaagaagctggtccgtccctgtgatcagacacctgttcgcccctctgaaggagtacttcgcctgcgtgagcagcggcaacagcaacgccaacagccggggccccagcttctctagcggcctggtgccactgtccctgagagggagccacatgggccccatggagatctacaaaaccgtgagcgcctggaagcggcagcctgtgcgcgtgctgagcctgtttcggaatatcgataaagtcctgaaaagcctgggattcctggagagcggctctggctccggcggtggcaccctgaagtacgtggaggatgtgacaaacgtggtcagacgggatgtggagaagtggggccccttcgatctggtgtacggcagcacccaacccctgggcagctcttgtgaccggtgccctggctggtacatgtttcagttccaccggatcctgcagtacgccctgccgagacaggagtcccagcggccattcttttggattttcatggacaacttgctgctgaccgaggatgaccaggaaactaccactcggttcctgcagaccgaagccgtgaccctgcaggacgtgagaggccgggactaccagaacgccatgcgggtgtggtccaacatccctggactgaaaagcaagcacgcacctctgacccctaaagaagaggagtacctgcaggcccaggtgcggagcagaagcaagctggacgcccctaaggtggatctgctggtgaagaattgcctcctgcccctgagagagtacttcaagtatttcagccagaatagtctgcccctgggcggcccaagcagcggcgcccctcctcccagcggcggcagcccagccggctccccaacctctaccgaggagggcacctctgagtccgccacccccgagagcggccctggcacctccaccgagcccagcgagggcagcgcacccggcagccctgccggcagccccacctccacagaggagggaaccagcaccgagcccagcgaaggcagcgccccaggcaccagcaccgagcctagtgagggcggctctggcggcggcagcgcccaggagattaaacggatcaacaagatcagaagaagacttgtgaaagacagcaacaccaagaaggccggcaagacaggccccatgaaaaccctgctggttagagtgatgacacccgatctgagagagcggctggaaaacctgagaaagaagcctgaaaatatcccccagcccatcagcaatacatctagagccaacctgaataagctgctgaccgattacaccgaaatgaagaaggcgatcctgcatgtgtactgggaagagttccagaaggaccctgtgggcctgatgagccgggtggcccagcctgccagcaagaagatcgatcagaacaagctgaaacctgagatggacgagaagggcaacctgaccaccgccggctttgcctgctctcagtgtggccagcccctgttcgtgtacaagctggagcaggtgtctgagaagggcaaggcttacaccaactacttcggacggtgcaatgtggccgagcacgaaaagctgatcctgctggcccagctgaagcccgagaaggatagcgacgaagccgtgacatatagcctgggaaagtttgggcagagggccctggatttctacagcattcatgtgaccaaggagtccacccaccccgtgaagcccctggcccagatcgccggaaacagatacgcctccggacctgtgggaaaggccctgagcgacgcatgtatgggcacaatcgcctccttcctgtctaagtaccaggacatcatcatcgaacaccagaaggtggtgaagggcaaccagaagagactggagagcctgcgggagctggccggcaaggaaaacctggaataccctagcgtgaccctgccacctcagcctcacaccaaggagggcgttgatgcctacaacgaagtgatcgcccgggtgcgaatgtgggtgaacctgaacctgtggcagaagctgaagctaagcagagatgatgccaagcctctgctgagactgaagggattcccttcctttcctctggtcgagagacaggccaacgaagtggactggtgggacatggtgtgtaacgtgaagaagctgatcaacgagaaaaaggaggatggcaaggtgttttggcagaatctggctggctacaagagacaggaagccctgagaccatacctgagcagcgaggaagatcggaagaagggaaagaaattcgctcggtaccagctgggcgacctgctgctgcacctggaaaagaagcacggcgaggactggggaaaggtgtacgacgaggcctgggagcggattgacaagaaagtggaaggcctgagcaagcacatcaagctggaagaggaacggagaagcgaggacgcccagagcaaggccgccctgaccgactggctgcgggctaaggccagcttcgtgatcgagggcctgaaggaggccgacaaggacgagttctgcagatgcgagctgaagctgcagaagtggtacggggacctgcggggaaagcccttcgccatcgaagccgagaacagcatcctggacatcagcggcttcagcaagcagtacaactgtgccttcatctggcagaaggacggcgtgaagaagctgaacctgtacctgatcatcaactacttcaagggcggcaagctgcggttcaagaagatcaaacctgaagccttcgaagccaacagattctacaccgtgatcaacaaaaagagcggcgagatcgtgcccatggaggtgaacttcaacttcgacgaccccaacctgatcatcctgcctctggcctttggcaagagacagggcagagaattcatctggaacgacctgctgtccctggaaaccggcagcctgaagctggccaacggaagagtgatcgagaagacactgtacaacagaagaacccggcaggatgagcctgccctgttcgtggccctgaccttcgagcggcgggaggtcctggactcctccaatatcaaaccaatgaacctgatcggcgtggcaagaggcgaaaacatccccgccgtgatcgccctgaccgaccccgagggctgcccactgagccggtttaaggatagcctgggaaacccaacccacatcctgagaatcggcgagagctataaggagaagcagcggaccatccaggccaagaaggaggtggagcagcggagagccggcggctacagccggaagtacgccagcaaagccaagaatctggcagacgatatggtgagaaacaccgctagagatctgctgtactacgccgtgacccaggatgccatgctgatcttcgccaacctgagccggggcttcggccggcagggcaagcggaccttcatggccgagagacagtacacacggatggaggactggctgaccgccaagctggcctacgagggcctgagcaagacctacctgtccaagacactggcccagtacacctccaagacatgcagcaactgtgggtttaccatcaccagcgccgactacgacagggtgctggagaagctgaagaagacagcaacaggctggatgaccacaattaacggcaaggagctgaaggtggagggccagattacctactacaacagatacaagagacagaacgtagtcaaggacctgtccgtcgagctggatagactgagcgaagaatctgtgaacaacgacatctcctcctggacaaagggcagaagcggagaagctctgagcctcctgaagaaaagattctcccatagacccgtgcaggagaagttcgtgtgcctgaactgcggcttcgagacacacgcagccgagcaagccgccctgaacatcgccagatcctggctgttcctgcggagccaggagtacaagaaataccagacaaacaagacaaccggcaacaccgataagagagccttcgtcgagacctggcagtccttttaccggaagaagcttaaggaggtgtggaaacctgccgtgcggtctggcggatctggcggaggctccacaagcgaggagctgcccgtggtgttcgaggacgtggccgtgtacttcaccagggaggagtggggcgccctggacaagtggcagaaggagctgtacagggacgtgatgcagatgaactacgagctgctggccagcctgggccccgccgccgccaagcccgacctgatcagcaagctggagaggagggccgccccctggatcagggacccccacggccccaagctgggcaagggcaggcccccccccggcaccagccccaagaaaaagagaaaagtctaagctgccttctgcggggcttgccttctggccatgcccttcttctctcccttgcacctgtacctcttggtctttgaataaagcctgagtaggaaggctagcaaaaaaaaaaaaaaaaaaaaaaaaaaaaaaaaaaaaaaaaaaaaaaaaaaaaaaaaaaaaaaaaaaaaaaaaaaaaaaaa

SEQ ID NO: 2623 - RNA, 5419 nt, synthetic construct
  source 1..5419: mol_type = other RNA
aggaaataagagagaaaagaagagtaagaagaaatataagagccaccatggcccctaagaagaagcgtaaagtgagccgggtgaacggcagcggcagcggcggcggcatgaaccacgaccaggagttcgacccccctaaggtgtaccctcccgtccccgccgagaagagaaagcccatccgggtcctgagcctgttcgatggcatcgccaccggtctgctggtgctgaaggacctgggcatccaggtggataggtacattgcctccgaggtgtgcgaggactccatcaccgtgggaatggtgcgtcatcagggcaagatcatgtacgtgggcgacgtgcggagcgtgacacagaagcatatccaggagtggggccctttcgacctggtgatcggcggcagcccttgcaatgacctgagcatcgtgaacccagcccggaagggcctgtacgagggaaccggcagactgttcttcgagttttacagactgctgcacgacgcccggcctaaggaaggcgacgaccggcccttcttttggctgttcgagaatgtggtggccatgggagtcagcgacaagcgggatattagccggttcctggagagcaaccccgtgatgatcgatgccaaggaagtgagcgccgcccaccgggccagatacttctggggcaatctgcctggcatgaacagacccctggccagcaccgtgaacgacaagctggagctgcaggagtgcctggagcacggccggatcgccaagttcagcaaggtgagaaccatcaccacccgaagcaacagcatcaaacaaggcaaggaccagcactttcctgtgttcatgaacgagaaggaggacatcctgtggtgtaccgagatggagagagtgttcgggttcccagtccactacacagatgtcagcaacatgtctagactggccagacagagactgctgggaagaagctggtccgtccctgtgatcagacacctgttcgcccctctgaaggagtacttcgcctgcgtgagcagcggcaacagcaacgccaacagccggggccccagcttctctagcggcctggtgccactgtccctgagagggagccacatgggccccatggagatctacaaaaccgtgagcgcctggaagcggcagcctgtgcgcgtgctgagcctgtttcggaatatcgataaagtcctgaaaagcctgggattcctggagagcggctctggctccggcggtggcaccctgaagtacgtggaggatgtgacaaacgtggtcagacgggatgtggagaagtggggccccttcgatctggtgtacggcagcacccaacccctgggcagctcttgtgaccggtgccctggctggtacatgtttcagttccaccggatcctgcagtacgccctgccgagacaggagtcccagcggccattcttttggattttcatggacaacttgctgctgaccgaggatgaccaggaaactaccactcggttcctgcagaccgaagccgtgaccctgcaggacgtgagaggccgggactaccagaacgccatgcgggtgtggtccaacatccctggactgaaaagcaagcacgcacctctgacccctaaagaagaggagtacctgcaggcccaggtgcggagcagaagcaagctggacgcccctaaggtggatctgctggtgaagaattgcctcctgcccctgagagagtacttcaagtatttcagccagaatagtctgcccctgggcggcccaagcagcggcgcccctcctcccagcggcggcagcccagccggctccccaacctctaccgaggagggcacctctgagtccgccacccccgagagcggccctggcacctccaccgagcccagcgagggcagcgcacccggcagccctgccggcagccccacctccacagaggagggaaccagcaccgagcccagcgaaggcagcgccccaggcaccagcaccgagcctagtgagggcggctctggcggcggcagcgcccaggagattaaacggatcaacaagatcagaagaagacttgtgaaagacagcaacaccaagaaggccggcaagacaggccccatgaaaaccctgctggttagagtgatgacacccgatctgagagagcggctggaaaacctgagaaagaagcctgaaaatatcccccagcccatcagcaatacatctagagccaacctgaataagctgctgaccgattacaccgaaatgaagaaggcgatcctgcatgtgtactgggaagagttccagaaggaccctgtgggcctgatgagccgggtggcccagcctgccagcaagaagatcgatcagaacaagctgaaacctgagatggacgagaagggcaacctgaccaccgccggctttgcctgctctcagtgtggccagcccctgttcgtgtacaagctggagcaggtgtctgagaagggcaaggcttacaccaactacttcggacggtgcaatgtggccgagcacgaaaagctgatcctgctggcccagctgaagcccgagaaggatagcgacgaagccgtgacatatagcctgggaaagtttgggcagagggccctggatttctacagcattcatgtgaccaaggagtccacccaccccgtgaagcccctggcccagatcgccggaaacagatacgcctccggacctgtgggaaaggccctgagcgacgcatgtatgggcacaatcgcctccttcctgtctaagtaccaggacatcatcatcgaacaccagaaggtggtgaagggcaaccagaagagactggagagcctgcgggagctggccggcaaggaaaacctggaataccctagcgtgaccctgccacctcagcctcacaccaaggagggcgttgatgcctacaacgaagtgatcgcccgggtgcgaatgtgggtgaacctgaacctgtggcagaagctgaagctaagcagagatgatgccaagcctctgctgagactgaagggattcccttcctttcctctggtcgagagacaggccaacgaagtggactggtgggacatggtgtgtaacgtgaagaagctgatcaacgagaaaaaggaggatggcaaggtgttttggcagaatctggctggctacaagagacaggaagccctgagaccatacctgagcagcgaggaagatcggaagaagggaaagaaattcgctcggtaccagctgggcgacctgctgctgcacctggaaaagaagcacggcgaggactggggaaaggtgtacgacgaggcctgggagcggattgacaagaaagtggaaggcctgagcaagcacatcaagctggaagaggaacggagaagcgaggacgcccagagcaaggccgccctgaccgactggctgcgggctaaggccagcttcgtgatcgagggcctgaaggaggccgacaaggacgagttctgcagatgcgagctgaagctgcagaagtggtacggggacctgcggggaaagcccttcgccatcgaagccgagaacagcatcctggacatcagcggcttcagcaagcagtacaactgtgccttcatctggcagaaggacggcgtgaagaagctgaacctgtacctgatcatcaactacttcaagggcggcaagctgcggttcaagaagatcaaacctgaagccttcgaagccaacagattctacaccgtgatcaacaaaaagagcggcgagatcgtgcccatggaggtgaacttcaacttcgacgaccccaacctgatcatcctgcctctggcctttggcaagagacagggcagagaattcatctggaacgacctgctgtccctggaaaccggcagcctgaagctggccaacggaagagtgatcgagaagacactgtacaacagaagaacccggcaggatgagcctgccctgttcgtggccctgaccttcgagcggcgggaggtcctggactcctccaatatcaaaccaatgaacctgatcggcgtggcaagaggcgaaaacatccccgccgtgatcgccctgaccgaccccgagggctgcccactgagccggtttaaggatagcctgggaaacccaacccacatcctgagaatcggcgagagctataaggagaagcagcggaccatccaggccaagaaggaggtggagcagcggagagccggcggctacagccggaagtacgccagcaaagccaagaatctggcagacgatatggtgagaaacaccgctagagatctgctgtactacgccgtgacccaggatgccatgctgatcttcgccaacctgagccggggcttcggccggcagggcaagcggaccttcatggccgagagacagtacacacggatggaggactggctgaccgccaagctggcctacgagggcctgagcaagacctacctgtccaagacactggcccagtacacctccaagacatgcagcaactgtgggtttaccatcaccagcgccgactacgacagggtgctggagaagctgaagaagacagcaacaggctggatgaccacaattaacggcaaggagctgaaggtggagggccagattacctactacaacagatacaagagacagaacgtagtcaaggacctgtccgtcgagctggatagactgagcgaagaatctgtgaacaacgacatctcctcctggacaaagggcagaagcggagaagctctgagcctcctgaagaaaagattctcccatagacccgtgcaggagaagttcgtgtgcctgaactgcggcttcgagacacacgcagccgagcaagccgccctgaacatcgccagatcctggctgttcctgcggagccaggagtacaagaaataccagacaaacaagacaaccggcaacaccgataagagagccttcgtcgagacctggcagtccttttaccggaagaagcttaaggaggtgtggaaacctgccgtgcggtctggcggatctggcggaggctccacaagcatgatgttccaggacagcgtggccttcgaggacgtggccgtgaccttcacccaggaggagtgggccctgctggaccccagccagaagaacctgtacagggacgtgatgcaggagaccttcaggaacctggccagcatcggcaagaagtggaagccccagaacatctacgtggagtacgagaacctgaggaggaacctgaggatcgtgggcgagaggctgttcgagagcaaggagggccaccagaccagccccaagaaaaagagaaaagtctaagctgccttctgcggggcttgccttctggccatgcccttcttctctcccttgcacctgtacctcttggtctttgaataaagcctgagtaggaaggctagcaaaaaaaaaaaaaaaaaaaaaaaaaaaaaaaaaaaaaaaaaaaaaaaaaaaaaaaaaaaaaaaaaaaaaaaaaaaaaaaa

SEQ ID NO: 2624 - RNA, 5419 nt, synthetic construct
  source 1..5419: mol_type = other RNA
aggaaataagagagaaaagaagagtaagaagaaatataagagccaccatggcccctaagaagaagcgtaaagtgagccgggtgaacggcagcggcagcggcggcggcatgaaccacgaccaggagttcgacccccctaaggtgtaccctcccgtccccgccgagaagagaaagcccatccgggtcctgagcctgttcgatggcatcgccaccggtctgctggtgctgaaggacctgggcatccaggtggataggtacattgcctccgaggtgtgcgaggactccatcaccgtgggaatggtgcgtcatcagggcaagatcatgtacgtgggcgacgtgcggagcgtgacacagaagcatatccaggagtggggccctttcgacctggtgatcggcggcagcccttgcaatgacctgagcatcgtgaacccagcccggaagggcctgtacgagggaaccggcagactgttcttcgagttttacagactgctgcacgacgcccggcctaaggaaggcgacgaccggcccttcttttggctgttcgagaatgtggtggccatgggagtcagcgacaagcgggatattagccggttcctggagagcaaccccgtgatgatcgatgccaaggaagtgagcgccgcccaccgggccagatacttctggggcaatctgcctggcatgaacagacccctggccagcaccgtgaacgacaagctggagctgcaggagtgcctggagcacggccggatcgccaagttcagcaaggtgagaaccatcaccacccgaagcaacagcatcaaacaaggcaaggaccagcactttcctgtgttcatgaacgagaaggaggacatcctgtggtgtaccgagatggagagagtgttcgggttcccagtccactacacagatgtcagcaacatgtctagactggccagacagagactgctgggaagaagctggtccgtccctgtgatcagacacctgttcgcccctctgaaggagtacttcgcctgcgtgagcagcggcaacagcaacgccaacagccggggccccagcttctctagcggcctggtgccactgtccctgagagggagccacatgggccccatggagatctacaaaaccgtgagcgcctggaagcggcagcctgtgcgcgtgctgagcctgtttcggaatatcgataaagtcctgaaaagcctgggattcctggagagcggctctggctccggcggtggcaccctgaagtacgtggaggatgtgacaaacgtggtcagacgggatgtggagaagtggggccccttcgatctggtgtacggcagcacccaacccctgggcagctcttgtgaccggtgccctggctggtacatgtttcagttccaccggatcctgcagtacgccctgccgagacaggagtcccagcggccattcttttggattttcatggacaacttgctgctgaccgaggatgaccaggaaactaccactcggttcctgcagaccgaagccgtgaccctgcaggacgtgagaggccgggactaccagaacgccatgcgggtgtggtccaacatccctggactgaaaagcaagcacgcacctctgacccctaaagaagaggagtacctgcaggcccaggtgcggagcagaagcaagctggacgcccctaaggtggatctgctggtgaagaattgcctcctgcccctgagagagtacttcaagtatttcagccagaatagtctgcccctgggcggcccaagcagcggcgcccctcctcccagcggcggcagcccagccggctccccaacctctaccgaggagggcacctctgagtccgccacccccgagagcggccctggcacctccaccgagcccagcgagggcagcgcacccggcagccctgccggcagccccacctccacagaggagggaaccagcaccgagcccagcgaaggcagcgccccaggcaccagcaccgagcctagtgagggcggctctggcggcggcagcgcccaggagattaaacggatcaacaagatcagaagaagacttgtgaaagacagcaacaccaagaaggccggcaagacaggccccatgaaaaccctgctggttagagtgatgacacccgatctgagagagcggctggaaaacctgagaaagaagcctgaaaatatcccccagcccatcagcaatacatctagagccaacctgaataagctgctgaccgattacaccgaaatgaagaaggcgatcctgcatgtgtactgggaagagttccagaaggaccctgtgggcctgatgagccgggtggcccagcctgccagcaagaagatcgatcagaacaagctgaaacctgagatggacgagaagggcaacctgaccaccgccggctttgcctgctctcagtgtggccagcccctgttcgtgtacaagctggagcaggtgtctgagaagggcaaggcttacaccaactacttcggacggtgcaatgtggccgagcacgaaaagctgatcctgctggcccagctgaagcccgagaaggatagcgacgaagccgtgacatatagcctgggaaagtttgggcagagggccctggatttctacagcattcatgtgaccaaggagtccacccaccccgtgaagcccctggcccagatcgccggaaacagatacgcctccggacctgtgggaaaggccctgagcgacgcatgtatgggcacaatcgcctccttcctgtctaagtaccaggacatcatcatcgaacaccagaaggtggtgaagggcaaccagaagagactggagagcctgcgggagctggccggcaaggaaaacctggaataccctagcgtgaccctgccacctcagcctcacaccaaggagggcgttgatgcctacaacgaagtgatcgcccgggtgcgaatgtgggtgaacctgaacctgtggcagaagctgaagctaagcagagatgatgccaagcctctgctgagactgaagggattcccttcctttcctctggtcgagagacaggccaacgaagtggactggtgggacatggtgtgtaacgtgaagaagctgatcaacgagaaaaaggaggatggcaaggtgttttggcagaatctggctggctacaagagacaggaagccctgagaccatacctgagcagcgaggaagatcggaagaagggaaagaaattcgctcggtaccagctgggcgacctgctgctgcacctggaaaagaagcacggcgaggactggggaaaggtgtacgacgaggcctgggagcggattgacaagaaagtggaaggcctgagcaagcacatcaagctggaagaggaacggagaagcgaggacgcccagagcaaggccgccctgaccgactggctgcgggctaaggccagcttcgtgatcgagggcctgaaggaggccgacaaggacgagttctgcagatgcgagctgaagctgcagaagtggtacggggacctgcggggaaagcccttcgccatcgaagccgagaacagcatcctggacatcagcggcttcagcaagcagtacaactgtgccttcatctggcagaaggacggcgtgaagaagctgaacctgtacctgatcatcaactacttcaagggcggcaagctgcggttcaagaagatcaaacctgaagccttcgaagccaacagattctacaccgtgatcaacaaaaagagcggcgagatcgtgcccatggaggtgaacttcaacttcgacgaccccaacctgatcatcctgcctctggcctttggcaagagacagggcagagaattcatctggaacgacctgctgtccctggaaaccggcagcctgaagctggccaacggaagagtgatcgagaagacactgtacaacagaagaacccggcaggatgagcctgccctgttcgtggccctgaccttcgagcggcgggaggtcctggactcctccaatatcaaaccaatgaacctgatcggcgtggcaagaggcgaaaacatccccgccgtgatcgccctgaccgaccccgagggctgcccactgagccggtttaaggatagcctgggaaacccaacccacatcctgagaatcggcgagagctataaggagaagcagcggaccatccaggccaagaaggaggtggagcagcggagagccggcggctacagccggaagtacgccagcaaagccaagaatctggcagacgatatggtgagaaacaccgctagagatctgctgtactacgccgtgacccaggatgccatgctgatcttcgccaacctgagccggggcttcggccggcagggcaagcggaccttcatggccgagagacagtacacacggatggaggactggctgaccgccaagctggcctacgagggcctgagcaagacctacctgtccaagacactggcccagtacacctccaagacatgcagcaactgtgggtttaccatcaccagcgccgactacgacagggtgctggagaagctgaagaagacagcaacaggctggatgaccacaattaacggcaaggagctgaaggtggagggccagattacctactacaacagatacaagagacagaacgtagtcaaggacctgtccgtcgagctggatagactgagcgaagaatctgtgaacaacgacatctcctcctggacaaagggcagaagcggagaagctctgagcctcctgaagaaaagattctcccatagacccgtgcaggagaagttcgtgtgcctgaactgcggcttcgagacacacgcagccgagcaagccgccctgaacatcgccagatcctggctgttcctgcggagccaggagtacaagaaataccagacaaacaagacaaccggcaacaccgataagagagccttcgtcgagacctggcagtccttttaccggaagaagcttaaggaggtgtggaaacctgccgtgcggtctggcggatctggcggaggctccacaagcgacagcgtggccttcgaggacgtggccgtgaacttcacccaggaggagtgggccctgctggacaggagccagaagaagctgtacagggaggtgatgcaggagaccctgaggaacctgaccagcatcggcaagacctggagcaaccagaacgccgaggagaggcaccagaaccccaggaggaacctgaggaggctgatcggcgagaggctgttccagagcaaggagagccaccagcacgccgagaccagccccaagaaaaagagaaaagtctaagctgccttctgcggggcttgccttctggccatgcccttcttctctcccttgcacctgtacctcttggtctttgaataaagcctgagtaggaaggctagcaaaaaaaaaaaaaaaaaaaaaaaaaaaaaaaaaaaaaaaaaaaaaaaaaaaaaaaaaaaaaaaaaaaaaaaaaaaaaaaa

SEQ ID NO: 2625 - RNA, 5419 nt, synthetic construct
  source 1..5419: mol_type = other RNA
aggaaataagagagaaaagaagagtaagaagaaatataagagccaccatggcccctaagaagaagcgtaaagtgagccgggtgaacggcagcggcagcggcggcggcatgaaccacgaccaggagttcgacccccctaaggtgtaccctcccgtccccgccgagaagagaaagcccatccgggtcctgagcctgttcgatggcatcgccaccggtctgctggtgctgaaggacctgggcatccaggtggataggtacattgcctccgaggtgtgcgaggactccatcaccgtgggaatggtgcgtcatcagggcaagatcatgtacgtgggcgacgtgcggagcgtgacacagaagcatatccaggagtggggccctttcgacctggtgatcggcggcagcccttgcaatgacctgagcatcgtgaacccagcccggaagggcctgtacgagggaaccggcagactgttcttcgagttttacagactgctgcacgacgcccggcctaaggaaggcgacgaccggcccttcttttggctgttcgagaatgtggtggccatgggagtcagcgacaagcgggatattagccggttcctggagagcaaccccgtgatgatcgatgccaaggaagtgagcgccgcccaccgggccagatacttctggggcaatctgcctggcatgaacagacccctggccagcaccgtgaacgacaagctggagctgcaggagtgcctggagcacggccggatcgccaagttcagcaaggtgagaaccatcaccacccgaagcaacagcatcaaacaaggcaaggaccagcactttcctgtgttcatgaacgagaaggaggacatcctgtggtgtaccgagatggagagagtgttcgggttcccagtccactacacagatgtcagcaacatgtctagactggccagacagagactgctgggaagaagctggtccgtccctgtgatcagacacctgttcgcccctctgaaggagtacttcgcctgcgtgagcagcggcaacagcaacgccaacagccggggccccagcttctctagcggcctggtgccactgtccctgagagggagccacatgggccccatggagatctacaaaaccgtgagcgcctggaagcggcagcctgtgcgcgtgctgagcctgtttcggaatatcgataaagtcctgaaaagcctgggattcctggagagcggctctggctccggcggtggcaccctgaagtacgtggaggatgtgacaaacgtggtcagacgggatgtggagaagtggggccccttcgatctggtgtacggcagcacccaacccctgggcagctcttgtgaccggtgccctggctggtacatgtttcagttccaccggatcctgcagtacgccctgccgagacaggagtcccagcggccattcttttggattttcatggacaacttgctgctgaccgaggatgaccaggaaactaccactcggttcctgcagaccgaagccgtgaccctgcaggacgtgagaggccgggactaccagaacgccatgcgggtgtggtccaacatccctggactgaaaagcaagcacgcacctctgacccctaaagaagaggagtacctgcaggcccaggtgcggagcagaagcaagctggacgcccctaaggtggatctgctggtgaagaattgcctcctgcccctgagagagtacttcaagtatttcagccagaatagtctgcccctgggcggcccaagcagcggcgcccctcctcccagcggcggcagcccagccggctccccaacctctaccgaggagggcacctctgagtccgccacccccgagagcggccctggcacctccaccgagcccagcgagggcagcgcacccggcagccctgccggcagccccacctccacagaggagggaaccagcaccgagcccagcgaaggcagcgccccaggcaccagcaccgagcctagtgagggcggctctggcggcggcagcgcccaggagattaaacggatcaacaagatcagaagaagacttgtgaaagacagcaacaccaagaaggccggcaagacaggccccatgaaaaccctgctggttagagtgatgacacccgatctgagagagcggctggaaaacctgagaaagaagcctgaaaatatcccccagcccatcagcaatacatctagagccaacctgaataagctgctgaccgattacaccgaaatgaagaaggcgatcctgcatgtgtactgggaagagttccagaaggaccctgtgggcctgatgagccgggtggcccagcctgccagcaagaagatcgatcagaacaagctgaaacctgagatggacgagaagggcaacctgaccaccgccggctttgcctgctctcagtgtggccagcccctgttcgtgtacaagctggagcaggtgtctgagaagggcaaggcttacaccaactacttcggacggtgcaatgtggccgagcacgaaaagctgatcctgctggcccagctgaagcccgagaaggatagcgacgaagccgtgacatatagcctgggaaagtttgggcagagggccctggatttctacagcattcatgtgaccaaggagtccacccaccccgtgaagcccctggcccagatcgccggaaacagatacgcctccggacctgtgggaaaggccctgagcgacgcatgtatgggcacaatcgcctccttcctgtctaagtaccaggacatcatcatcgaacaccagaaggtggtgaagggcaaccagaagagactggagagcctgcgggagctggccggcaaggaaaacctggaataccctagcgtgaccctgccacctcagcctcacaccaaggagggcgttgatgcctacaacgaagtgatcgcccgggtgcgaatgtgggtgaacctgaacctgtggcagaagctgaagctaagcagagatgatgccaagcctctgctgagactgaagggattcccttcctttcctctggtcgagagacaggccaacgaagtggactggtgggacatggtgtgtaacgtgaagaagctgatcaacgagaaaaaggaggatggcaaggtgttttggcagaatctggctggctacaagagacaggaagccctgagaccatacctgagcagcgaggaagatcggaagaagggaaagaaattcgctcggtaccagctgggcgacctgctgctgcacctggaaaagaagcacggcgaggactggggaaaggtgtacgacgaggcctgggagcggattgacaagaaagtggaaggcctgagcaagcacatcaagctggaagaggaacggagaagcgaggacgcccagagcaaggccgccctgaccgactggctgcgggctaaggccagcttcgtgatcgagggcctgaaggaggccgacaaggacgagttctgcagatgcgagctgaagctgcagaagtggtacggggacctgcggggaaagcccttcgccatcgaagccgagaacagcatcctggacatcagcggcttcagcaagcagtacaactgtgccttcatctggcagaaggacggcgtgaagaagctgaacctgtacctgatcatcaactacttcaagggcggcaagctgcggttcaagaagatcaaacctgaagccttcgaagccaacagattctacaccgtgatcaacaaaaagagcggcgagatcgtgcccatggaggtgaacttcaacttcgacgaccccaacctgatcatcctgcctctggcctttggcaagagacagggcagagaattcatctggaacgacctgctgtccctggaaaccggcagcctgaagctggccaacggaagagtgatcgagaagacactgtacaacagaagaacccggcaggatgagcctgccctgttcgtggccctgaccttcgagcggcgggaggtcctggactcctccaatatcaaaccaatgaacctgatcggcgtggcaagaggcgaaaacatccccgccgtgatcgccctgaccgaccccgagggctgcccactgagccggtttaaggatagcctgggaaacccaacccacatcctgagaatcggcgagagctataaggagaagcagcggaccatccaggccaagaaggaggtggagcagcggagagccggcggctacagccggaagtacgccagcaaagccaagaatctggcagacgatatggtgagaaacaccgctagagatctgctgtactacgccgtgacccaggatgccatgctgatcttcgccaacctgagccggggcttcggccggcagggcaagcggaccttcatggccgagagacagtacacacggatggaggactggctgaccgccaagctggcctacgagggcctgagcaagacctacctgtccaagacactggcccagtacacctccaagacatgcagcaactgtgggtttaccatcaccagcgccgactacgacagggtgctggagaagctgaagaagacagcaacaggctggatgaccacaattaacggcaaggagctgaaggtggagggccagattacctactacaacagatacaagagacagaacgtagtcaaggacctgtccgtcgagctggatagactgagcgaagaatctgtgaacaacgacatctcctcctggacaaagggcagaagcggagaagctctgagcctcctgaagaaaagattctcccatagacccgtgcaggagaagttcgtgtgcctgaactgcggcttcgagacacacgcagccgagcaagccgccctgaacatcgccagatcctggctgttcctgcggagccaggagtacaagaaataccagacaaacaagacaaccggcaacaccgataagagagccttcgtcgagacctggcagtccttttaccggaagaagcttaaggaggtgtggaaacctgccgtgcggtctggcggatctggcggaggctccacaagcttccagggcagcgtgatgttcagcgacgtgagcatcgacttcagccaggaggagtgggagtacctggacctggagcagagggccctgtacagggacgtgatgctggagaactacagcaacctggtgagcctgggctgcttcatcagcaagcccgacgtgatcagcctgctggagcagggcaaggagccctggaaggtggtgaggaagggcaagaggaggtaccccgacctggagaccaggtacaccagccccaagaaaaagagaaaagtctaagctgccttctgcggggcttgccttctggccatgcccttcttctctcccttgcacctgtacctcttggtctttgaataaagcctgagtaggaaggctagcaaaaaaaaaaaaaaaaaaaaaaaaaaaaaaaaaaaaaaaaaaaaaaaaaaaaaaaaaaaaaaaaaaaaaaaaaaaaaaaa

SEQ ID NO: 2626 - RNA, 5419 nt, synthetic construct
  source 1..5419: mol_type = other RNA
aggaaataagagagaaaagaagagtaagaagaaatataagagccaccatggcccctaagaagaagcgtaaagtgagccgggtgaacggcagcggcagcggcggcggcatgaaccacgaccaggagttcgacccccctaaggtgtaccctcccgtccccgccgagaagagaaagcccatccgggtcctgagcctgttcgatggcatcgccaccggtctgctggtgctgaaggacctgggcatccaggtggataggtacattgcctccgaggtgtgcgaggactccatcaccgtgggaatggtgcgtcatcagggcaagatcatgtacgtgggcgacgtgcggagcgtgacacagaagcatatccaggagtggggccctttcgacctggtgatcggcggcagcccttgcaatgacctgagcatcgtgaacccagcccggaagggcctgtacgagggaaccggcagactgttcttcgagttttacagactgctgcacgacgcccggcctaaggaaggcgacgaccggcccttcttttggctgttcgagaatgtggtggccatgggagtcagcgacaagcgggatattagccggttcctggagagcaaccccgtgatgatcgatgccaaggaagtgagcgccgcccaccgggccagatacttctggggcaatctgcctggcatgaacagacccctggccagcaccgtgaacgacaagctggagctgcaggagtgcctggagcacggccggatcgccaagttcagcaaggtgagaaccatcaccacccgaagcaacagcatcaaacaaggcaaggaccagcactttcctgtgttcatgaacgagaaggaggacatcctgtggtgtaccgagatggagagagtgttcgggttcccagtccactacacagatgtcagcaacatgtctagactggccagacagagactgctgggaagaagctggtccgtccctgtgatcagacacctgttcgcccctctgaaggagtacttcgcctgcgtgagcagcggcaacagcaacgccaacagccggggccccagcttctctagcggcctggtgccactgtccctgagagggagccacatgggccccatggagatctacaaaaccgtgagcgcctggaagcggcagcctgtgcgcgtgctgagcctgtttcggaatatcgataaagtcctgaaaagcctgggattcctggagagcggctctggctccggcggtggcaccctgaagtacgtggaggatgtgacaaacgtggtcagacgggatgtggagaagtggggccccttcgatctggtgtacggcagcacccaacccctgggcagctcttgtgaccggtgccctggctggtacatgtttcagttccaccggatcctgcagtacgccctgccgagacaggagtcccagcggccattcttttggattttcatggacaacttgctgctgaccgaggatgaccaggaaactaccactcggttcctgcagaccgaagccgtgaccctgcaggacgtgagaggccgggactaccagaacgccatgcgggtgtggtccaacatccctggactgaaaagcaagcacgcacctctgacccctaaagaagaggagtacctgcaggcccaggtgcggagcagaagcaagctggacgcccctaaggtggatctgctggtgaagaattgcctcctgcccctgagagagtacttcaagtatttcagccagaatagtctgcccctgggcggcccaagcagcggcgcccctcctcccagcggcggcagcccagccggctccccaacctctaccgaggagggcacctctgagtccgccacccccgagagcggccctggcacctccaccgagcccagcgagggcagcgcacccggcagccctgccggcagccccacctccacagaggagggaaccagcaccgagcccagcgaaggcagcgccccaggcaccagcaccgagcctagtgagggcggctctggcggcggcagcgcccaggagattaaacggatcaacaagatcagaagaagacttgtgaaagacagcaacaccaagaaggccggcaagacaggccccatgaaaaccctgctggttagagtgatgacacccgatctgagagagcggctggaaaacctgagaaagaagcctgaaaatatcccccagcccatcagcaatacatctagagccaacctgaataagctgctgaccgattacaccgaaatgaagaaggcgatcctgcatgtgtactgggaagagttccagaaggaccctgtgggcctgatgagccgggtggcccagcctgccagcaagaagatcgatcagaacaagctgaaacctgagatggacgagaagggcaacctgaccaccgccggctttgcctgctctcagtgtggccagcccctgttcgtgtacaagctggagcaggtgtctgagaagggcaaggcttacaccaactacttcggacggtgcaatgtggccgagcacgaaaagctgatcctgctggcccagctgaagcccgagaaggatagcgacgaagccgtgacatatagcctgggaaagtttgggcagagggccctggatttctacagcattcatgtgaccaaggagtccacccaccccgtgaagcccctggcccagatcgccggaaacagatacgcctccggacctgtgggaaaggccctgagcgacgcatgtatgggcacaatcgcctccttcctgtctaagtaccaggacatcatcatcgaacaccagaaggtggtgaagggcaaccagaagagactggagagcctgcgggagctggccggcaaggaaaacctggaataccctagcgtgaccctgccacctcagcctcacaccaaggagggcgttgatgcctacaacgaagtgatcgcccgggtgcgaatgtgggtgaacctgaacctgtggcagaagctgaagctaagcagagatgatgccaagcctctgctgagactgaagggattcccttcctttcctctggtcgagagacaggccaacgaagtggactggtgggacatggtgtgtaacgtgaagaagctgatcaacgagaaaaaggaggatggcaaggtgttttggcagaatctggctggctacaagagacaggaagccctgagaccatacctgagcagcgaggaagatcggaagaagggaaagaaattcgctcggtaccagctgggcgacctgctgctgcacctggaaaagaagcacggcgaggactggggaaaggtgtacgacgaggcctgggagcggattgacaagaaagtggaaggcctgagcaagcacatcaagctggaagaggaacggagaagcgaggacgcccagagcaaggccgccctgaccgactggctgcgggctaaggccagcttcgtgatcgagggcctgaaggaggccgacaaggacgagttctgcagatgcgagctgaagctgcagaagtggtacggggacctgcggggaaagcccttcgccatcgaagccgagaacagcatcctggacatcagcggcttcagcaagcagtacaactgtgccttcatctggcagaaggacggcgtgaagaagctgaacctgtacctgatcatcaactacttcaagggcggcaagctgcggttcaagaagatcaaacctgaagccttcgaagccaacagattctacaccgtgatcaacaaaaagagcggcgagatcgtgcccatggaggtgaacttcaacttcgacgaccccaacctgatcatcctgcctctggcctttggcaagagacagggcagagaattcatctggaacgacctgctgtccctggaaaccggcagcctgaagctggccaacggaagagtgatcgagaagacactgtacaacagaagaacccggcaggatgagcctgccctgttcgtggccctgaccttcgagcggcgggaggtcctggactcctccaatatcaaaccaatgaacctgatcggcgtggcaagaggcgaaaacatccccgccgtgatcgccctgaccgaccccgagggctgcccactgagccggtttaaggatagcctgggaaacccaacccacatcctgagaatcggcgagagctataaggagaagcagcggaccatccaggccaagaaggaggtggagcagcggagagccggcggctacagccggaagtacgccagcaaagccaagaatctggcagacgatatggtgagaaacaccgctagagatctgctgtactacgccgtgacccaggatgccatgctgatcttcgccaacctgagccggggcttcggccggcagggcaagcggaccttcatggccgagagacagtacacacggatggaggactggctgaccgccaagctggcctacgagggcctgagcaagacctacctgtccaagacactggcccagtacacctccaagacatgcagcaactgtgggtttaccatcaccagcgccgactacgacagggtgctggagaagctgaagaagacagcaacaggctggatgaccacaattaacggcaaggagctgaaggtggagggccagattacctactacaacagatacaagagacagaacgtagtcaaggacctgtccgtcgagctggatagactgagcgaagaatctgtgaacaacgacatctcctcctggacaaagggcagaagcggagaagctctgagcctcctgaagaaaagattctcccatagacccgtgcaggagaagttcgtgtgcctgaactgcggcttcgagacacacgcagccgagcaagccgccctgaacatcgccagatcctggctgttcctgcggagccaggagtacaagaaataccagacaaacaagacaaccggcaacaccgataagagagccttcgtcgagacctggcagtccttttaccggaagaagcttaaggaggtgtggaaacctgccgtgcggtctggcggatctggcggaggctccacaagcagccagagcctggtgaccttcggcgacgtggccgtggagttcagccccgaggagtgggagtggctggacagcgcccagaggagcctgtacaggagcgtgatgctggagaactacaggagcctggtgagcctgggcctgtgcgtgagcaagcccaagatgatcagcagcctggagcagaggaaggagccctgggtggccaagaggaccctgaccaggggcggctgccccgacagcagggccctgaccagccccaagaaaaagagaaaagtctaagctgccttctgcggggcttgccttctggccatgcccttcttctctcccttgcacctgtacctcttggtctttgaataaagcctgagtaggaaggctagcaaaaaaaaaaaaaaaaaaaaaaaaaaaaaaaaaaaaaaaaaaaaaaaaaaaaaaaaaaaaaaaaaaaaaaaaaaaaaaaa

SEQ ID NO: 2627 - RNA, 5419 nt, synthetic construct
  source 1..5419: mol_type = other RNA
aggaaataagagagaaaagaagagtaagaagaaatataagagccaccatggcccctaagaagaagcgtaaagtgagccgggtgaacggcagcggcagcggcggcggcatgaaccacgaccaggagttcgacccccctaaggtgtaccctcccgtccccgccgagaagagaaagcccatccgggtcctgagcctgttcgatggcatcgccaccggtctgctggtgctgaaggacctgggcatccaggtggataggtacattgcctccgaggtgtgcgaggactccatcaccgtgggaatggtgcgtcatcagggcaagatcatgtacgtgggcgacgtgcggagcgtgacacagaagcatatccaggagtggggccctttcgacctggtgatcggcggcagcccttgcaatgacctgagcatcgtgaacccagcccggaagggcctgtacgagggaaccggcagactgttcttcgagttttacagactgctgcacgacgcccggcctaaggaaggcgacgaccggcccttcttttggctgttcgagaatgtggtggccatgggagtcagcgacaagcgggatattagccggttcctggagagcaaccccgtgatgatcgatgccaaggaagtgagcgccgcccaccgggccagatacttctggggcaatctgcctggcatgaacagacccctggccagcaccgtgaacgacaagctggagctgcaggagtgcctggagcacggccggatcgccaagttcagcaaggtgagaaccatcaccacccgaagcaacagcatcaaacaaggcaaggaccagcactttcctgtgttcatgaacgagaaggaggacatcctgtggtgtaccgagatggagagagtgttcgggttcccagtccactacacagatgtcagcaacatgtctagactggccagacagagactgctgggaagaagctggtccgtccctgtgatcagacacctgttcgcccctctgaaggagtacttcgcctgcgtgagcagcggcaacagcaacgccaacagccggggccccagcttctctagcggcctggtgccactgtccctgagagggagccacatgggccccatggagatctacaaaaccgtgagcgcctggaagcggcagcctgtgcgcgtgctgagcctgtttcggaatatcgataaagtcctgaaaagcctgggattcctggagagcggctctggctccggcggtggcaccctgaagtacgtggaggatgtgacaaacgtggtcagacgggatgtggagaagtggggccccttcgatctggtgtacggcagcacccaacccctgggcagctcttgtgaccggtgccctggctggtacatgtttcagttccaccggatcctgcagtacgccctgccgagacaggagtcccagcggccattcttttggattttcatggacaacttgctgctgaccgaggatgaccaggaaactaccactcggttcctgcagaccgaagccgtgaccctgcaggacgtgagaggccgggactaccagaacgccatgcgggtgtggtccaacatccctggactgaaaagcaagcacgcacctctgacccctaaagaagaggagtacctgcaggcccaggtgcggagcagaagcaagctggacgcccctaaggtggatctgctggtgaagaattgcctcctgcccctgagagagtacttcaagtatttcagccagaatagtctgcccctgggcggcccaagcagcggcgcccctcctcccagcggcggcagcccagccggctccccaacctctaccgaggagggcacctctgagtccgccacccccgagagcggccctggcacctccaccgagcccagcgagggcagcgcacccggcagccctgccggcagccccacctccacagaggagggaaccagcaccgagcccagcgaaggcagcgccccaggcaccagcaccgagcctagtgagggcggctctggcggcggcagcgcccaggagattaaacggatcaacaagatcagaagaagacttgtgaaagacagcaacaccaagaaggccggcaagacaggccccatgaaaaccctgctggttagagtgatgacacccgatctgagagagcggctggaaaacctgagaaagaagcctgaaaatatcccccagcccatcagcaatacatctagagccaacctgaataagctgctgaccgattacaccgaaatgaagaaggcgatcctgcatgtgtactgggaagagttccagaaggaccctgtgggcctgatgagccgggtggcccagcctgccagcaagaagatcgatcagaacaagctgaaacctgagatggacgagaagggcaacctgaccaccgccggctttgcctgctctcagtgtggccagcccctgttcgtgtacaagctggagcaggtgtctgagaagggcaaggcttacaccaactacttcggacggtgcaatgtggccgagcacgaaaagctgatcctgctggcccagctgaagcccgagaaggatagcgacgaagccgtgacatatagcctgggaaagtttgggcagagggccctggatttctacagcattcatgtgaccaaggagtccacccaccccgtgaagcccctggcccagatcgccggaaacagatacgcctccggacctgtgggaaaggccctgagcgacgcatgtatgggcacaatcgcctccttcctgtctaagtaccaggacatcatcatcgaacaccagaaggtggtgaagggcaaccagaagagactggagagcctgcgggagctggccggcaaggaaaacctggaataccctagcgtgaccctgccacctcagcctcacaccaaggagggcgttgatgcctacaacgaagtgatcgcccgggtgcgaatgtgggtgaacctgaacctgtggcagaagctgaagctaagcagagatgatgccaagcctctgctgagactgaagggattcccttcctttcctctggtcgagagacaggccaacgaagtggactggtgggacatggtgtgtaacgtgaagaagctgatcaacgagaaaaaggaggatggcaaggtgttttggcagaatctggctggctacaagagacaggaagccctgagaccatacctgagcagcgaggaagatcggaagaagggaaagaaattcgctcggtaccagctgggcgacctgctgctgcacctggaaaagaagcacggcgaggactggggaaaggtgtacgacgaggcctgggagcggattgacaagaaagtggaaggcctgagcaagcacatcaagctggaagaggaacggagaagcgaggacgcccagagcaaggccgccctgaccgactggctgcgggctaaggccagcttcgtgatcgagggcctgaaggaggccgacaaggacgagttctgcagatgcgagctgaagctgcagaagtggtacggggacctgcggggaaagcccttcgccatcgaagccgagaacagcatcctggacatcagcggcttcagcaagcagtacaactgtgccttcatctggcagaaggacggcgtgaagaagctgaacctgtacctgatcatcaactacttcaagggcggcaagctgcggttcaagaagatcaaacctgaagccttcgaagccaacagattctacaccgtgatcaacaaaaagagcggcgagatcgtgcccatggaggtgaacttcaacttcgacgaccccaacctgatcatcctgcctctggcctttggcaagagacagggcagagaattcatctggaacgacctgctgtccctggaaaccggcagcctgaagctggccaacggaagagtgatcgagaagacactgtacaacagaagaacccggcaggatgagcctgccctgttcgtggccctgaccttcgagcggcgggaggtcctggactcctccaatatcaaaccaatgaacctgatcggcgtggcaagaggcgaaaacatccccgccgtgatcgccctgaccgaccccgagggctgcccactgagccggtttaaggatagcctgggaaacccaacccacatcctgagaatcggcgagagctataaggagaagcagcggaccatccaggccaagaaggaggtggagcagcggagagccggcggctacagccggaagtacgccagcaaagccaagaatctggcagacgatatggtgagaaacaccgctagagatctgctgtactacgccgtgacccaggatgccatgctgatcttcgccaacctgagccggggcttcggccggcagggcaagcggaccttcatggccgagagacagtacacacggatggaggactggctgaccgccaagctggcctacgagggcctgagcaagacctacctgtccaagacactggcccagtacacctccaagacatgcagcaactgtgggtttaccatcaccagcgccgactacgacagggtgctggagaagctgaagaagacagcaacaggctggatgaccacaattaacggcaaggagctgaaggtggagggccagattacctactacaacagatacaagagacagaacgtagtcaaggacctgtccgtcgagctggatagactgagcgaagaatctgtgaacaacgacatctcctcctggacaaagggcagaagcggagaagctctgagcctcctgaagaaaagattctcccatagacccgtgcaggagaagttcgtgtgcctgaactgcggcttcgagacacacgcagccgagcaagccgccctgaacatcgccagatcctggctgttcctgcggagccaggagtacaagaaataccagacaaacaagacaaccggcaacaccgataagagagccttcgtcgagacctggcagtccttttaccggaagaagcttaaggaggtgtggaaacctgccgtgcggtctggcggatctggcggaggctccacaagcagccaggagagcgtggccttcgaggacgtggccgtgtacttcaccaccaaggagtgggccatcatggtgcccgccgagagggccctgtacagggacgtgatgctggagaactacgaggccgtggccttcgtggtgccccccaccagcaagcccgccctgatcagccacctggagcagggcaaggagagctgcttcatcaggccccagggcgtgctgagcaggagcgactggagggccggcctgaccagccccaagaaaaagagaaaagtctaagctgccttctgcggggcttgccttctggccatgcccttcttctctcccttgcacctgtacctcttggtctttgaataaagcctgagtaggaaggctagcaaaaaaaaaaaaaaaaaaaaaaaaaaaaaaaaaaaaaaaaaaaaaaaaaaaaaaaaaaaaaaaaaaaaaaaaaaaaaaaa

SEQ ID NO: 2628 - RNA, 5419 nt, synthetic construct
  source 1..5419: mol_type = other RNA
aggaaataagagagaaaagaagagtaagaagaaatataagagccaccatggcccctaagaagaagcgtaaagtgagccgggtgaacggcagcggcagcggcggcggcatgaaccacgaccaggagttcgacccccctaaggtgtaccctcccgtccccgccgagaagagaaagcccatccgggtcctgagcctgttcgatggcatcgccaccggtctgctggtgctgaaggacctgggcatccaggtggataggtacattgcctccgaggtgtgcgaggactccatcaccgtgggaatggtgcgtcatcagggcaagatcatgtacgtgggcgacgtgcggagcgtgacacagaagcatatccaggagtggggccctttcgacctggtgatcggcggcagcccttgcaatgacctgagcatcgtgaacccagcccggaagggcctgtacgagggaaccggcagactgttcttcgagttttacagactgctgcacgacgcccggcctaaggaaggcgacgaccggcccttcttttggctgttcgagaatgtggtggccatgggagtcagcgacaagcgggatattagccggttcctggagagcaaccccgtgatgatcgatgccaaggaagtgagcgccgcccaccgggccagatacttctggggcaatctgcctggcatgaacagacccctggccagcaccgtgaacgacaagctggagctgcaggagtgcctggagcacggccggatcgccaagttcagcaaggtgagaaccatcaccacccgaagcaacagcatcaaacaaggcaaggaccagcactttcctgtgttcatgaacgagaaggaggacatcctgtggtgtaccgagatggagagagtgttcgggttcccagtccactacacagatgtcagcaacatgtctagactggccagacagagactgctgggaagaagctggtccgtccctgtgatcagacacctgttcgcccctctgaaggagtacttcgcctgcgtgagcagcggcaacagcaacgccaacagccggggccccagcttctctagcggcctggtgccactgtccctgagagggagccacatgggccccatggagatctacaaaaccgtgagcgcctggaagcggcagcctgtgcgcgtgctgagcctgtttcggaatatcgataaagtcctgaaaagcctgggattcctggagagcggctctggctccggcggtggcaccctgaagtacgtggaggatgtgacaaacgtggtcagacgggatgtggagaagtggggccccttcgatctggtgtacggcagcacccaacccctgggcagctcttgtgaccggtgccctggctggtacatgtttcagttccaccggatcctgcagtacgccctgccgagacaggagtcccagcggccattcttttggattttcatggacaacttgctgctgaccgaggatgaccaggaaactaccactcggttcctgcagaccgaagccgtgaccctgcaggacgtgagaggccgggactaccagaacgccatgcgggtgtggtccaacatccctggactgaaaagcaagcacgcacctctgacccctaaagaagaggagtacctgcaggcccaggtgcggagcagaagcaagctggacgcccctaaggtggatctgctggtgaagaattgcctcctgcccctgagagagtacttcaagtatttcagccagaatagtctgcccctgggcggcccaagcagcggcgcccctcctcccagcggcggcagcccagccggctccccaacctctaccgaggagggcacctctgagtccgccacccccgagagcggccctggcacctccaccgagcccagcgagggcagcgcacccggcagccctgccggcagccccacctccacagaggagggaaccagcaccgagcccagcgaaggcagcgccccaggcaccagcaccgagcctagtgagggcggctctggcggcggcagcgcccaggagattaaacggatcaacaagatcagaagaagacttgtgaaagacagcaacaccaagaaggccggcaagacaggccccatgaaaaccctgctggttagagtgatgacacccgatctgagagagcggctggaaaacctgagaaagaagcctgaaaatatcccccagcccatcagcaatacatctagagccaacctgaataagctgctgaccgattacaccgaaatgaagaaggcgatcctgcatgtgtactgggaagagttccagaaggaccctgtgggcctgatgagccgggtggcccagcctgccagcaagaagatcgatcagaacaagctgaaacctgagatggacgagaagggcaacctgaccaccgccggctttgcctgctctcagtgtggccagcccctgttcgtgtacaagctggagcaggtgtctgagaagggcaaggcttacaccaactacttcggacggtgcaatgtggccgagcacgaaaagctgatcctgctggcccagctgaagcccgagaaggatagcgacgaagccgtgacatatagcctgggaaagtttgggcagagggccctggatttctacagcattcatgtgaccaaggagtccacccaccccgtgaagcccctggcccagatcgccggaaacagatacgcctccggacctgtgggaaaggccctgagcgacgcatgtatgggcacaatcgcctccttcctgtctaagtaccaggacatcatcatcgaacaccagaaggtggtgaagggcaaccagaagagactggagagcctgcgggagctggccggcaaggaaaacctggaataccctagcgtgaccctgccacctcagcctcacaccaaggagggcgttgatgcctacaacgaagtgatcgcccgggtgcgaatgtgggtgaacctgaacctgtggcagaagctgaagctaagcagagatgatgccaagcctctgctgagactgaagggattcccttcctttcctctggtcgagagacaggccaacgaagtggactggtgggacatggtgtgtaacgtgaagaagctgatcaacgagaaaaaggaggatggcaaggtgttttggcagaatctggctggctacaagagacaggaagccctgagaccatacctgagcagcgaggaagatcggaagaagggaaagaaattcgctcggtaccagctgggcgacctgctgctgcacctggaaaagaagcacggcgaggactggggaaaggtgtacgacgaggcctgggagcggattgacaagaaagtggaaggcctgagcaagcacatcaagctggaagaggaacggagaagcgaggacgcccagagcaaggccgccctgaccgactggctgcgggctaaggccagcttcgtgatcgagggcctgaaggaggccgacaaggacgagttctgcagatgcgagctgaagctgcagaagtggtacggggacctgcggggaaagcccttcgccatcgaagccgagaacagcatcctggacatcagcggcttcagcaagcagtacaactgtgccttcatctggcagaaggacggcgtgaagaagctgaacctgtacctgatcatcaactacttcaagggcggcaagctgcggttcaagaagatcaaacctgaagccttcgaagccaacagattctacaccgtgatcaacaaaaagagcggcgagatcgtgcccatggaggtgaacttcaacttcgacgaccccaacctgatcatcctgcctctggcctttggcaagagacagggcagagaattcatctggaacgacctgctgtccctggaaaccggcagcctgaagctggccaacggaagagtgatcgagaagacactgtacaacagaagaacccggcaggatgagcctgccctgttcgtggccctgaccttcgagcggcgggaggtcctggactcctccaatatcaaaccaatgaacctgatcggcgtggcaagaggcgaaaacatccccgccgtgatcgccctgaccgaccccgagggctgcccactgagccggtttaaggatagcctgggaaacccaacccacatcctgagaatcggcgagagctataaggagaagcagcggaccatccaggccaagaaggaggtggagcagcggagagccggcggctacagccggaagtacgccagcaaagccaagaatctggcagacgatatggtgagaaacaccgctagagatctgctgtactacgccgtgacccaggatgccatgctgatcttcgccaacctgagccggggcttcggccggcagggcaagcggaccttcatggccgagagacagtacacacggatggaggactggctgaccgccaagctggcctacgagggcctgagcaagacctacctgtccaagacactggcccagtacacctccaagacatgcagcaactgtgggtttaccatcaccagcgccgactacgacagggtgctggagaagctgaagaagacagcaacaggctggatgaccacaattaacggcaaggagctgaaggtggagggccagattacctactacaacagatacaagagacagaacgtagtcaaggacctgtccgtcgagctggatagactgagcgaagaatctgtgaacaacgacatctcctcctggacaaagggcagaagcggagaagctctgagcctcctgaagaaaagattctcccatagacccgtgcaggagaagttcgtgtgcctgaactgcggcttcgagacacacgcagccgagcaagccgccctgaacatcgccagatcctggctgttcctgcggagccaggagtacaagaaataccagacaaacaagacaaccggcaacaccgataagagagccttcgtcgagacctggcagtccttttaccggaagaagcttaaggaggtgtggaaacctgccgtgcggtctggcggatctggcggaggctccacaagcagcaaggtgcccgtgaccttcggcgacctggccatctacttcagccaggaggagtgggagtggctgagccccatccagaaggacctgtacgaggacgtgatgctggagaactaccagaacctggtgagcctgggcctgagcttcaggaggcccaacgtgatcaccctgctggagaagggcaaggccccctggatcgtggagcccgtgaggaagaggaggggcgtggacagcggcagcaagagcaccagccccaagaaaaagagaaaagtctaagctgccttctgcggggcttgccttctggccatgcccttcttctctcccttgcacctgtacctcttggtctttgaataaagcctgagtaggaaggctagcaaaaaaaaaaaaaaaaaaaaaaaaaaaaaaaaaaaaaaaaaaaaaaaaaaaaaaaaaaaaaaaaaaaaaaaaaaaaaaaa

SEQ ID NO: 2629 - RNA, 5419 nt, synthetic construct
  source 1..5419: mol_type = other RNA
aggaaataagagagaaaagaagagtaagaagaaatataagagccaccatggcccctaagaagaagcgtaaagtgagccgggtgaacggcagcggcagcggcggcggcatgaaccacgaccaggagttcgacccccctaaggtgtaccctcccgtccccgccgagaagagaaagcccatccgggtcctgagcctgttcgatggcatcgccaccggtctgctggtgctgaaggacctgggcatccaggtggataggtacattgcctccgaggtgtgcgaggactccatcaccgtgggaatggtgcgtcatcagggcaagatcatgtacgtgggcgacgtgcggagcgtgacacagaagcatatccaggagtggggccctttcgacctggtgatcggcggcagcccttgcaatgacctgagcatcgtgaacccagcccggaagggcctgtacgagggaaccggcagactgttcttcgagttttacagactgctgcacgacgcccggcctaaggaaggcgacgaccggcccttcttttggctgttcgagaatgtggtggccatgggagtcagcgacaagcgggatattagccggttcctggagagcaaccccgtgatgatcgatgccaaggaagtgagcgccgcccaccgggccagatacttctggggcaatctgcctggcatgaacagacccctggccagcaccgtgaacgacaagctggagctgcaggagtgcctggagcacggccggatcgccaagttcagcaaggtgagaaccatcaccacccgaagcaacagcatcaaacaaggcaaggaccagcactttcctgtgttcatgaacgagaaggaggacatcctgtggtgtaccgagatggagagagtgttcgggttcccagtccactacacagatgtcagcaacatgtctagactggccagacagagactgctgggaagaagctggtccgtccctgtgatcagacacctgttcgcccctctgaaggagtacttcgcctgcgtgagcagcggcaacagcaacgccaacagccggggccccagcttctctagcggcctggtgccactgtccctgagagggagccacatgggccccatggagatctacaaaaccgtgagcgcctggaagcggcagcctgtgcgcgtgctgagcctgtttcggaatatcgataaagtcctgaaaagcctgggattcctggagagcggctctggctccggcggtggcaccctgaagtacgtggaggatgtgacaaacgtggtcagacgggatgtggagaagtggggccccttcgatctggtgtacggcagcacccaacccctgggcagctcttgtgaccggtgccctggctggtacatgtttcagttccaccggatcctgcagtacgccctgccgagacaggagtcccagcggccattcttttggattttcatggacaacttgctgctgaccgaggatgaccaggaaactaccactcggttcctgcagaccgaagccgtgaccctgcaggacgtgagaggccgggactaccagaacgccatgcgggtgtggtccaacatccctggactgaaaagcaagcacgcacctctgacccctaaagaagaggagtacctgcaggcccaggtgcggagcagaagcaagctggacgcccctaaggtggatctgctggtgaagaattgcctcctgcccctgagagagtacttcaagtatttcagccagaatagtctgcccctgggcggcccaagcagcggcgcccctcctcccagcggcggcagcccagccggctccccaacctctaccgaggagggcacctctgagtccgccacccccgagagcggccctggcacctccaccgagcccagcgagggcagcgcacccggcagccctgccggcagccccacctccacagaggagggaaccagcaccgagcccagcgaaggcagcgccccaggcaccagcaccgagcctagtgagggcggctctggcggcggcagcgcccaggagattaaacggatcaacaagatcagaagaagacttgtgaaagacagcaacaccaagaaggccggcaagacaggccccatgaaaaccctgctggttagagtgatgacacccgatctgagagagcggctggaaaacctgagaaagaagcctgaaaatatcccccagcccatcagcaatacatctagagccaacctgaataagctgctgaccgattacaccgaaatgaagaaggcgatcctgcatgtgtactgggaagagttccagaaggaccctgtgggcctgatgagccgggtggcccagcctgccagcaagaagatcgatcagaacaagctgaaacctgagatggacgagaagggcaacctgaccaccgccggctttgcctgctctcagtgtggccagcccctgttcgtgtacaagctggagcaggtgtctgagaagggcaaggcttacaccaactacttcggacggtgcaatgtggccgagcacgaaaagctgatcctgctggcccagctgaagcccgagaaggatagcgacgaagccgtgacatatagcctgggaaagtttgggcagagggccctggatttctacagcattcatgtgaccaaggagtccacccaccccgtgaagcccctggcccagatcgccggaaacagatacgcctccggacctgtgggaaaggccctgagcgacgcatgtatgggcacaatcgcctccttcctgtctaagtaccaggacatcatcatcgaacaccagaaggtggtgaagggcaaccagaagagactggagagcctgcgggagctggccggcaaggaaaacctggaataccctagcgtgaccctgccacctcagcctcacaccaaggagggcgttgatgcctacaacgaagtgatcgcccgggtgcgaatgtgggtgaacctgaacctgtggcagaagctgaagctaagcagagatgatgccaagcctctgctgagactgaagggattcccttcctttcctctggtcgagagacaggccaacgaagtggactggtgggacatggtgtgtaacgtgaagaagctgatcaacgagaaaaaggaggatggcaaggtgttttggcagaatctggctggctacaagagacaggaagccctgagaccatacctgagcagcgaggaagatcggaagaagggaaagaaattcgctcggtaccagctgggcgacctgctgctgcacctggaaaagaagcacggcgaggactggggaaaggtgtacgacgaggcctgggagcggattgacaagaaagtggaaggcctgagcaagcacatcaagctggaagaggaacggagaagcgaggacgcccagagcaaggccgccctgaccgactggctgcgggctaaggccagcttcgtgatcgagggcctgaaggaggccgacaaggacgagttctgcagatgcgagctgaagctgcagaagtggtacggggacctgcggggaaagcccttcgccatcgaagccgagaacagcatcctggacatcagcggcttcagcaagcagtacaactgtgccttcatctggcagaaggacggcgtgaagaagctgaacctgtacctgatcatcaactacttcaagggcggcaagctgcggttcaagaagatcaaacctgaagccttcgaagccaacagattctacaccgtgatcaacaaaaagagcggcgagatcgtgcccatggaggtgaacttcaacttcgacgaccccaacctgatcatcctgcctctggcctttggcaagagacagggcagagaattcatctggaacgacctgctgtccctggaaaccggcagcctgaagctggccaacggaagagtgatcgagaagacactgtacaacagaagaacccggcaggatgagcctgccctgttcgtggccctgaccttcgagcggcgggaggtcctggactcctccaatatcaaaccaatgaacctgatcggcgtggcaagaggcgaaaacatccccgccgtgatcgccctgaccgaccccgagggctgcccactgagccggtttaaggatagcctgggaaacccaacccacatcctgagaatcggcgagagctataaggagaagcagcggaccatccaggccaagaaggaggtggagcagcggagagccggcggctacagccggaagtacgccagcaaagccaagaatctggcagacgatatggtgagaaacaccgctagagatctgctgtactacgccgtgacccaggatgccatgctgatcttcgccaacctgagccggggcttcggccggcagggcaagcggaccttcatggccgagagacagtacacacggatggaggactggctgaccgccaagctggcctacgagggcctgagcaagacctacctgtccaagacactggcccagtacacctccaagacatgcagcaactgtgggtttaccatcaccagcgccgactacgacagggtgctggagaagctgaagaagacagcaacaggctggatgaccacaattaacggcaaggagctgaaggtggagggccagattacctactacaacagatacaagagacagaacgtagtcaaggacctgtccgtcgagctggatagactgagcgaagaatctgtgaacaacgacatctcctcctggacaaagggcagaagcggagaagctctgagcctcctgaagaaaagattctcccatagacccgtgcaggagaagttcgtgtgcctgaactgcggcttcgagacacacgcagccgagcaagccgccctgaacatcgccagatcctggctgttcctgcggagccaggagtacaagaaataccagacaaacaagacaaccggcaacaccgataagagagccttcgtcgagacctggcagtccttttaccggaagaagcttaaggaggtgtggaaacctgccgtgcggtctggcggatctggcggaggctccacaagcaagcccggcgccgtgagcttcgccgacgtggccgtgtacttcagccccgaggagtggggctgcctgaggcccgcccagagggccctgtacagggacgtgatgagggagacctacggccacctgggcgccctgggcttccccggccccaagcccgccctgatcagctggatggagcaggagagcgaggcctggagcagcgccgcccaggaccccgagaacggcgagagcctgggcggcgccaggaccagccccaagaaaaagagaaaagtctaagctgccttctgcggggcttgccttctggccatgcccttcttctctcccttgcacctgtacctcttggtctttgaataaagcctgagtaggaaggctagcaaaaaaaaaaaaaaaaaaaaaaaaaaaaaaaaaaaaaaaaaaaaaaaaaaaaaaaaaaaaaaaaaaaaaaaaaaaaaaaa

SEQ ID NO: 2630 - RNA, 5419 nt, synthetic construct
  source 1..5419: mol_type = other RNA
aggaaataagagagaaaagaagagtaagaagaaatataagagccaccatggcccctaagaagaagcgtaaagtgagccgggtgaacggcagcggcagcggcggcggcatgaaccacgaccaggagttcgacccccctaaggtgtaccctcccgtccccgccgagaagagaaagcccatccgggtcctgagcctgttcgatggcatcgccaccggtctgctggtgctgaaggacctgggcatccaggtggataggtacattgcctccgaggtgtgcgaggactccatcaccgtgggaatggtgcgtcatcagggcaagatcatgtacgtgggcgacgtgcggagcgtgacacagaagcatatccaggagtggggccctttcgacctggtgatcggcggcagcccttgcaatgacctgagcatcgtgaacccagcccggaagggcctgtacgagggaaccggcagactgttcttcgagttttacagactgctgcacgacgcccggcctaaggaaggcgacgaccggcccttcttttggctgttcgagaatgtggtggccatgggagtcagcgacaagcgggatattagccggttcctggagagcaaccccgtgatgatcgatgccaaggaagtgagcgccgcccaccgggccagatacttctggggcaatctgcctggcatgaacagacccctggccagcaccgtgaacgacaagctggagctgcaggagtgcctggagcacggccggatcgccaagttcagcaaggtgagaaccatcaccacccgaagcaacagcatcaaacaaggcaaggaccagcactttcctgtgttcatgaacgagaaggaggacatcctgtggtgtaccgagatggagagagtgttcgggttcccagtccactacacagatgtcagcaacatgtctagactggccagacagagactgctgggaagaagctggtccgtccctgtgatcagacacctgttcgcccctctgaaggagtacttcgcctgcgtgagcagcggcaacagcaacgccaacagccggggccccagcttctctagcggcctggtgccactgtccctgagagggagccacatgggccccatggagatctacaaaaccgtgagcgcctggaagcggcagcctgtgcgcgtgctgagcctgtttcggaatatcgataaagtcctgaaaagcctgggattcctggagagcggctctggctccggcggtggcaccctgaagtacgtggaggatgtgacaaacgtggtcagacgggatgtggagaagtggggccccttcgatctggtgtacggcagcacccaacccctgggcagctcttgtgaccggtgccctggctggtacatgtttcagttccaccggatcctgcagtacgccctgccgagacaggagtcccagcggccattcttttggattttcatggacaacttgctgctgaccgaggatgaccaggaaactaccactcggttcctgcagaccgaagccgtgaccctgcaggacgtgagaggccgggactaccagaacgccatgcgggtgtggtccaacatccctggactgaaaagcaagcacgcacctctgacccctaaagaagaggagtacctgcaggcccaggtgcggagcagaagcaagctggacgcccctaaggtggatctgctggtgaagaattgcctcctgcccctgagagagtacttcaagtatttcagccagaatagtctgcccctgggcggcccaagcagcggcgcccctcctcccagcggcggcagcccagccggctccccaacctctaccgaggagggcacctctgagtccgccacccccgagagcggccctggcacctccaccgagcccagcgagggcagcgcacccggcagccctgccggcagccccacctccacagaggagggaaccagcaccgagcccagcgaaggcagcgccccaggcaccagcaccgagcctagtgagggcggctctggcggcggcagcgcccaggagattaaacggatcaacaagatcagaagaagacttgtgaaagacagcaacaccaagaaggccggcaagacaggccccatgaaaaccctgctggttagagtgatgacacccgatctgagagagcggctggaaaacctgagaaagaagcctgaaaatatcccccagcccatcagcaatacatctagagccaacctgaataagctgctgaccgattacaccgaaatgaagaaggcgatcctgcatgtgtactgggaagagttccagaaggaccctgtgggcctgatgagccgggtggcccagcctgccagcaagaagatcgatcagaacaagctgaaacctgagatggacgagaagggcaacctgaccaccgccggctttgcctgctctcagtgtggccagcccctgttcgtgtacaagctggagcaggtgtctgagaagggcaaggcttacaccaactacttcggacggtgcaatgtggccgagcacgaaaagctgatcctgctggcccagctgaagcccgagaaggatagcgacgaagccgtgacatatagcctgggaaagtttgggcagagggccctggatttctacagcattcatgtgaccaaggagtccacccaccccgtgaagcccctggcccagatcgccggaaacagatacgcctccggacctgtgggaaaggccctgagcgacgcatgtatgggcacaatcgcctccttcctgtctaagtaccaggacatcatcatcgaacaccagaaggtggtgaagggcaaccagaagagactggagagcctgcgggagctggccggcaaggaaaacctggaataccctagcgtgaccctgccacctcagcctcacaccaaggagggcgttgatgcctacaacgaagtgatcgcccgggtgcgaatgtgggtgaacctgaacctgtggcagaagctgaagctaagcagagatgatgccaagcctctgctgagactgaagggattcccttcctttcctctggtcgagagacaggccaacgaagtggactggtgggacatggtgtgtaacgtgaagaagctgatcaacgagaaaaaggaggatggcaaggtgttttggcagaatctggctggctacaagagacaggaagccctgagaccatacctgagcagcgaggaagatcggaagaagggaaagaaattcgctcggtaccagctgggcgacctgctgctgcacctggaaaagaagcacggcgaggactggggaaaggtgtacgacgaggcctgggagcggattgacaagaaagtggaaggcctgagcaagcacatcaagctggaagaggaacggagaagcgaggacgcccagagcaaggccgccctgaccgactggctgcgggctaaggccagcttcgtgatcgagggcctgaaggaggccgacaaggacgagttctgcagatgcgagctgaagctgcagaagtggtacggggacctgcggggaaagcccttcgccatcgaagccgagaacagcatcctggacatcagcggcttcagcaagcagtacaactgtgccttcatctggcagaaggacggcgtgaagaagctgaacctgtacctgatcatcaactacttcaagggcggcaagctgcggttcaagaagatcaaacctgaagccttcgaagccaacagattctacaccgtgatcaacaaaaagagcggcgagatcgtgcccatggaggtgaacttcaacttcgacgaccccaacctgatcatcctgcctctggcctttggcaagagacagggcagagaattcatctggaacgacctgctgtccctggaaaccggcagcctgaagctggccaacggaagagtgatcgagaagacactgtacaacagaagaacccggcaggatgagcctgccctgttcgtggccctgaccttcgagcggcgggaggtcctggactcctccaatatcaaaccaatgaacctgatcggcgtggcaagaggcgaaaacatccccgccgtgatcgccctgaccgaccccgagggctgcccactgagccggtttaaggatagcctgggaaacccaacccacatcctgagaatcggcgagagctataaggagaagcagcggaccatccaggccaagaaggaggtggagcagcggagagccggcggctacagccggaagtacgccagcaaagccaagaatctggcagacgatatggtgagaaacaccgctagagatctgctgtactacgccgtgacccaggatgccatgctgatcttcgccaacctgagccggggcttcggccggcagggcaagcggaccttcatggccgagagacagtacacacggatggaggactggctgaccgccaagctggcctacgagggcctgagcaagacctacctgtccaagacactggcccagtacacctccaagacatgcagcaactgtgggtttaccatcaccagcgccgactacgacagggtgctggagaagctgaagaagacagcaacaggctggatgaccacaattaacggcaaggagctgaaggtggagggccagattacctactacaacagatacaagagacagaacgtagtcaaggacctgtccgtcgagctggatagactgagcgaagaatctgtgaacaacgacatctcctcctggacaaagggcagaagcggagaagctctgagcctcctgaagaaaagattctcccatagacccgtgcaggagaagttcgtgtgcctgaactgcggcttcgagacacacgcagccgagcaagccgccctgaacatcgccagatcctggctgttcctgcggagccaggagtacaagaaataccagacaaacaagacaaccggcaacaccgataagagagccttcgtcgagacctggcagtccttttaccggaagaagcttaaggaggtgtggaaacctgccgtgcggtctggcggatctggcggaggctccacaagcgtgaggatgcccgtgaccttcgaggacgtggccgtgaccttcacccaggaggagtggggccagctggaccccgcccagaggaccctgtaccaggaggtgatgctggagacctgcggcctgctggtgagcctgggctgccccctgcccaagcccgagctgttctaccccctggaccacagccccgagctgcagaccctgaagaggggcctgagccccaacagctgccccggcgacagcaccaagaccagccccaagaaaaagagaaaagtctaagctgccttctgcggggcttgccttctggccatgcccttcttctctcccttgcacctgtacctcttggtctttgaataaagcctgagtaggaaggctagcaaaaaaaaaaaaaaaaaaaaaaaaaaaaaaaaaaaaaaaaaaaaaaaaaaaaaaaaaaaaaaaaaaaaaaaaaaaaaaaa

SEQ ID NO: 2631 - RNA, 5419 nt, synthetic construct
  source 1..5419: mol_type = other RNA
aggaaataagagagaaaagaagagtaagaagaaatataagagccaccatggcccctaagaagaagcgtaaagtgagccgggtgaacggcagcggcagcggcggcggcatgaaccacgaccaggagttcgacccccctaaggtgtaccctcccgtccccgccgagaagagaaagcccatccgggtcctgagcctgttcgatggcatcgccaccggtctgctggtgctgaaggacctgggcatccaggtggataggtacattgcctccgaggtgtgcgaggactccatcaccgtgggaatggtgcgtcatcagggcaagatcatgtacgtgggcgacgtgcggagcgtgacacagaagcatatccaggagtggggccctttcgacctggtgatcggcggcagcccttgcaatgacctgagcatcgtgaacccagcccggaagggcctgtacgagggaaccggcagactgttcttcgagttttacagactgctgcacgacgcccggcctaaggaaggcgacgaccggcccttcttttggctgttcgagaatgtggtggccatgggagtcagcgacaagcgggatattagccggttcctggagagcaaccccgtgatgatcgatgccaaggaagtgagcgccgcccaccgggccagatacttctggggcaatctgcctggcatgaacagacccctggccagcaccgtgaacgacaagctggagctgcaggagtgcctggagcacggccggatcgccaagttcagcaaggtgagaaccatcaccacccgaagcaacagcatcaaacaaggcaaggaccagcactttcctgtgttcatgaacgagaaggaggacatcctgtggtgtaccgagatggagagagtgttcgggttcccagtccactacacagatgtcagcaacatgtctagactggccagacagagactgctgggaagaagctggtccgtccctgtgatcagacacctgttcgcccctctgaaggagtacttcgcctgcgtgagcagcggcaacagcaacgccaacagccggggccccagcttctctagcggcctggtgccactgtccctgagagggagccacatgggccccatggagatctacaaaaccgtgagcgcctggaagcggcagcctgtgcgcgtgctgagcctgtttcggaatatcgataaagtcctgaaaagcctgggattcctggagagcggctctggctccggcggtggcaccctgaagtacgtggaggatgtgacaaacgtggtcagacgggatgtggagaagtggggccccttcgatctggtgtacggcagcacccaacccctgggcagctcttgtgaccggtgccctggctggtacatgtttcagttccaccggatcctgcagtacgccctgccgagacaggagtcccagcggccattcttttggattttcatggacaacttgctgctgaccgaggatgaccaggaaactaccactcggttcctgcagaccgaagccgtgaccctgcaggacgtgagaggccgggactaccagaacgccatgcgggtgtggtccaacatccctggactgaaaagcaagcacgcacctctgacccctaaagaagaggagtacctgcaggcccaggtgcggagcagaagcaagctggacgcccctaaggtggatctgctggtgaagaattgcctcctgcccctgagagagtacttcaagtatttcagccagaatagtctgcccctgggcggcccaagcagcggcgcccctcctcccagcggcggcagcccagccggctccccaacctctaccgaggagggcacctctgagtccgccacccccgagagcggccctggcacctccaccgagcccagcgagggcagcgcacccggcagccctgccggcagccccacctccacagaggagggaaccagcaccgagcccagcgaaggcagcgccccaggcaccagcaccgagcctagtgagggcggctctggcggcggcagcgcccaggagattaaacggatcaacaagatcagaagaagacttgtgaaagacagcaacaccaagaaggccggcaagacaggccccatgaaaaccctgctggttagagtgatgacacccgatctgagagagcggctggaaaacctgagaaagaagcctgaaaatatcccccagcccatcagcaatacatctagagccaacctgaataagctgctgaccgattacaccgaaatgaagaaggcgatcctgcatgtgtactgggaagagttccagaaggaccctgtgggcctgatgagccgggtggcccagcctgccagcaagaagatcgatcagaacaagctgaaacctgagatggacgagaagggcaacctgaccaccgccggctttgcctgctctcagtgtggccagcccctgttcgtgtacaagctggagcaggtgtctgagaagggcaaggcttacaccaactacttcggacggtgcaatgtggccgagcacgaaaagctgatcctgctggcccagctgaagcccgagaaggatagcgacgaagccgtgacatatagcctgggaaagtttgggcagagggccctggatttctacagcattcatgtgaccaaggagtccacccaccccgtgaagcccctggcccagatcgccggaaacagatacgcctccggacctgtgggaaaggccctgagcgacgcatgtatgggcacaatcgcctccttcctgtctaagtaccaggacatcatcatcgaacaccagaaggtggtgaagggcaaccagaagagactggagagcctgcgggagctggccggcaaggaaaacctggaataccctagcgtgaccctgccacctcagcctcacaccaaggagggcgttgatgcctacaacgaagtgatcgcccgggtgcgaatgtgggtgaacctgaacctgtggcagaagctgaagctaagcagagatgatgccaagcctctgctgagactgaagggattcccttcctttcctctggtcgagagacaggccaacgaagtggactggtgggacatggtgtgtaacgtgaagaagctgatcaacgagaaaaaggaggatggcaaggtgttttggcagaatctggctggctacaagagacaggaagccctgagaccatacctgagcagcgaggaagatcggaagaagggaaagaaattcgctcggtaccagctgggcgacctgctgctgcacctggaaaagaagcacggcgaggactggggaaaggtgtacgacgaggcctgggagcggattgacaagaaagtggaaggcctgagcaagcacatcaagctggaagaggaacggagaagcgaggacgcccagagcaaggccgccctgaccgactggctgcgggctaaggccagcttcgtgatcgagggcctgaaggaggccgacaaggacgagttctgcagatgcgagctgaagctgcagaagtggtacggggacctgcggggaaagcccttcgccatcgaagccgagaacagcatcctggacatcagcggcttcagcaagcagtacaactgtgccttcatctggcagaaggacggcgtgaagaagctgaacctgtacctgatcatcaactacttcaagggcggcaagctgcggttcaagaagatcaaacctgaagccttcgaagccaacagattctacaccgtgatcaacaaaaagagcggcgagatcgtgcccatggaggtgaacttcaacttcgacgaccccaacctgatcatcctgcctctggcctttggcaagagacagggcagagaattcatctggaacgacctgctgtccctggaaaccggcagcctgaagctggccaacggaagagtgatcgagaagacactgtacaacagaagaacccggcaggatgagcctgccctgttcgtggccctgaccttcgagcggcgggaggtcctggactcctccaatatcaaaccaatgaacctgatcggcgtggcaagaggcgaaaacatccccgccgtgatcgccctgaccgaccccgagggctgcccactgagccggtttaaggatagcctgggaaacccaacccacatcctgagaatcggcgagagctataaggagaagcagcggaccatccaggccaagaaggaggtggagcagcggagagccggcggctacagccggaagtacgccagcaaagccaagaatctggcagacgatatggtgagaaacaccgctagagatctgctgtactacgccgtgacccaggatgccatgctgatcttcgccaacctgagccggggcttcggccggcagggcaagcggaccttcatggccgagagacagtacacacggatggaggactggctgaccgccaagctggcctacgagggcctgagcaagacctacctgtccaagacactggcccagtacacctccaagacatgcagcaactgtgggtttaccatcaccagcgccgactacgacagggtgctggagaagctgaagaagacagcaacaggctggatgaccacaattaacggcaaggagctgaaggtggagggccagattacctactacaacagatacaagagacagaacgtagtcaaggacctgtccgtcgagctggatagactgagcgaagaatctgtgaacaacgacatctcctcctggacaaagggcagaagcggagaagctctgagcctcctgaagaaaagattctcccatagacccgtgcaggagaagttcgtgtgcctgaactgcggcttcgagacacacgcagccgagcaagccgccctgaacatcgccagatcctggctgttcctgcggagccaggagtacaagaaataccagacaaacaagacaaccggcaacaccgataagagagccttcgtcgagacctggcagtccttttaccggaagaagcttaaggaggtgtggaaacctgccgtgcggtctggcggatctggcggaggctccacaagcatggccttcgaggacgtggccgtgcacttcagccaggaggagtggggcctgctggacaccgcccagaggagcctgtacaggagggtgatgctggagaacttcgccctgctggccagcctgggcctgagcgtgagcaggccccacgtggtgacccagctggagaggggcgaggagccctgggtgctgagcggcgtggacgtgaccctgccccaggacgcccagaggaggcccaggaggggcagcaccagccccaagaaaaagagaaaagtctaagctgccttctgcggggcttgccttctggccatgcccttcttctctcccttgcacctgtacctcttggtctttgaataaagcctgagtaggaaggctagcaaaaaaaaaaaaaaaaaaaaaaaaaaaaaaaaaaaaaaaaaaaaaaaaaaaaaaaaaaaaaaaaaaaaaaaaaaaaaaaa

SEQ ID NO: 2632 - RNA, 5419 nt, synthetic construct
  source 1..5419: mol_type = other RNA
aggaaataagagagaaaagaagagtaagaagaaatataagagccaccatggcccctaagaagaagcgtaaagtgagccgggtgaacggcagcggcagcggcggcggcatgaaccacgaccaggagttcgacccccctaaggtgtaccctcccgtccccgccgagaagagaaagcccatccgggtcctgagcctgttcgatggcatcgccaccggtctgctggtgctgaaggacctgggcatccaggtggataggtacattgcctccgaggtgtgcgaggactccatcaccgtgggaatggtgcgtcatcagggcaagatcatgtacgtgggcgacgtgcggagcgtgacacagaagcatatccaggagtggggccctttcgacctggtgatcggcggcagcccttgcaatgacctgagcatcgtgaacccagcccggaagggcctgtacgagggaaccggcagactgttcttcgagttttacagactgctgcacgacgcccggcctaaggaaggcgacgaccggcccttcttttggctgttcgagaatgtggtggccatgggagtcagcgacaagcgggatattagccggttcctggagagcaaccccgtgatgatcgatgccaaggaagtgagcgccgcccaccgggccagatacttctggggcaatctgcctggcatgaacagacccctggccagcaccgtgaacgacaagctggagctgcaggagtgcctggagcacggccggatcgccaagttcagcaaggtgagaaccatcaccacccgaagcaacagcatcaaacaaggcaaggaccagcactttcctgtgttcatgaacgagaaggaggacatcctgtggtgtaccgagatggagagagtgttcgggttcccagtccactacacagatgtcagcaacatgtctagactggccagacagagactgctgggaagaagctggtccgtccctgtgatcagacacctgttcgcccctctgaaggagtacttcgcctgcgtgagcagcggcaacagcaacgccaacagccggggccccagcttctctagcggcctggtgccactgtccctgagagggagccacatgggccccatggagatctacaaaaccgtgagcgcctggaagcggcagcctgtgcgcgtgctgagcctgtttcggaatatcgataaagtcctgaaaagcctgggattcctggagagcggctctggctccggcggtggcaccctgaagtacgtggaggatgtgacaaacgtggtcagacgggatgtggagaagtggggccccttcgatctggtgtacggcagcacccaacccctgggcagctcttgtgaccggtgccctggctggtacatgtttcagttccaccggatcctgcagtacgccctgccgagacaggagtcccagcggccattcttttggattttcatggacaacttgctgctgaccgaggatgaccaggaaactaccactcggttcctgcagaccgaagccgtgaccctgcaggacgtgagaggccgggactaccagaacgccatgcgggtgtggtccaacatccctggactgaaaagcaagcacgcacctctgacccctaaagaagaggagtacctgcaggcccaggtgcggagcagaagcaagctggacgcccctaaggtggatctgctggtgaagaattgcctcctgcccctgagagagtacttcaagtatttcagccagaatagtctgcccctgggcggcccaagcagcggcgcccctcctcccagcggcggcagcccagccggctccccaacctctaccgaggagggcacctctgagtccgccacccccgagagcggccctggcacctccaccgagcccagcgagggcagcgcacccggcagccctgccggcagccccacctccacagaggagggaaccagcaccgagcccagcgaaggcagcgccccaggcaccagcaccgagcctagtgagggcggctctggcggcggcagcgcccaggagattaaacggatcaacaagatcagaagaagacttgtgaaagacagcaacaccaagaaggccggcaagacaggccccatgaaaaccctgctggttagagtgatgacacccgatctgagagagcggctggaaaacctgagaaagaagcctgaaaatatcccccagcccatcagcaatacatctagagccaacctgaataagctgctgaccgattacaccgaaatgaagaaggcgatcctgcatgtgtactgggaagagttccagaaggaccctgtgggcctgatgagccgggtggcccagcctgccagcaagaagatcgatcagaacaagctgaaacctgagatggacgagaagggcaacctgaccaccgccggctttgcctgctctcagtgtggccagcccctgttcgtgtacaagctggagcaggtgtctgagaagggcaaggcttacaccaactacttcggacggtgcaatgtggccgagcacgaaaagctgatcctgctggcccagctgaagcccgagaaggatagcgacgaagccgtgacatatagcctgggaaagtttgggcagagggccctggatttctacagcattcatgtgaccaaggagtccacccaccccgtgaagcccctggcccagatcgccggaaacagatacgcctccggacctgtgggaaaggccctgagcgacgcatgtatgggcacaatcgcctccttcctgtctaagtaccaggacatcatcatcgaacaccagaaggtggtgaagggcaaccagaagagactggagagcctgcgggagctggccggcaaggaaaacctggaataccctagcgtgaccctgccacctcagcctcacaccaaggagggcgttgatgcctacaacgaagtgatcgcccgggtgcgaatgtgggtgaacctgaacctgtggcagaagctgaagctaagcagagatgatgccaagcctctgctgagactgaagggattcccttcctttcctctggtcgagagacaggccaacgaagtggactggtgggacatggtgtgtaacgtgaagaagctgatcaacgagaaaaaggaggatggcaaggtgttttggcagaatctggctggctacaagagacaggaagccctgagaccatacctgagcagcgaggaagatcggaagaagggaaagaaattcgctcggtaccagctgggcgacctgctgctgcacctggaaaagaagcacggcgaggactggggaaaggtgtacgacgaggcctgggagcggattgacaagaaagtggaaggcctgagcaagcacatcaagctggaagaggaacggagaagcgaggacgcccagagcaaggccgccctgaccgactggctgcgggctaaggccagcttcgtgatcgagggcctgaaggaggccgacaaggacgagttctgcagatgcgagctgaagctgcagaagtggtacggggacctgcggggaaagcccttcgccatcgaagccgagaacagcatcctggacatcagcggcttcagcaagcagtacaactgtgccttcatctggcagaaggacggcgtgaagaagctgaacctgtacctgatcatcaactacttcaagggcggcaagctgcggttcaagaagatcaaacctgaagccttcgaagccaacagattctacaccgtgatcaacaaaaagagcggcgagatcgtgcccatggaggtgaacttcaacttcgacgaccccaacctgatcatcctgcctctggcctttggcaagagacagggcagagaattcatctggaacgacctgctgtccctggaaaccggcagcctgaagctggccaacggaagagtgatcgagaagacactgtacaacagaagaacccggcaggatgagcctgccctgttcgtggccctgaccttcgagcggcgggaggtcctggactcctccaatatcaaaccaatgaacctgatcggcgtggcaagaggcgaaaacatccccgccgtgatcgccctgaccgaccccgagggctgcccactgagccggtttaaggatagcctgggaaacccaacccacatcctgagaatcggcgagagctataaggagaagcagcggaccatccaggccaagaaggaggtggagcagcggagagccggcggctacagccggaagtacgccagcaaagccaagaatctggcagacgatatggtgagaaacaccgctagagatctgctgtactacgccgtgacccaggatgccatgctgatcttcgccaacctgagccggggcttcggccggcagggcaagcggaccttcatggccgagagacagtacacacggatggaggactggctgaccgccaagctggcctacgagggcctgagcaagacctacctgtccaagacactggcccagtacacctccaagacatgcagcaactgtgggtttaccatcaccagcgccgactacgacagggtgctggagaagctgaagaagacagcaacaggctggatgaccacaattaacggcaaggagctgaaggtggagggccagattacctactacaacagatacaagagacagaacgtagtcaaggacctgtccgtcgagctggatagactgagcgaagaatctgtgaacaacgacatctcctcctggacaaagggcagaagcggagaagctctgagcctcctgaagaaaagattctcccatagacccgtgcaggagaagttcgtgtgcctgaactgcggcttcgagacacacgcagccgagcaagccgccctgaacatcgccagatcctggctgttcctgcggagccaggagtacaagaaataccagacaaacaagacaaccggcaacaccgataagagagccttcgtcgagacctggcagtccttttaccggaagaagcttaaggaggtgtggaaacctgccgtgcggtctggcggatctggcggaggctccacaagcttccagagcgaggtgatgttcagggacgtgaccgtgaacttcagccaggaggagtgggagtgcctgaacagctacgagagggacctgtacaaggacgtgatgctggagaactacagccacctggtgagcctgggctgcagcatcagcaagcccgacgtgatcaccctgctggagcagggcaaggagccctggatgatcgtgagggacgagaggaggaggtggagccaggacctggagaccaggaccagccccaagaaaaagagaaaagtctaagctgccttctgcggggcttgccttctggccatgcccttcttctctcccttgcacctgtacctcttggtctttgaataaagcctgagtaggaaggctagcaaaaaaaaaaaaaaaaaaaaaaaaaaaaaaaaaaaaaaaaaaaaaaaaaaaaaaaaaaaaaaaaaaaaaaaaaaaaaaaa

SEQ ID NO: 2633 - RNA, 5419 nt, synthetic construct
  source 1..5419: mol_type = other RNA
aggaaataagagagaaaagaagagtaagaagaaatataagagccaccatggcccctaagaagaagcgtaaagtgagccgggtgaacggcagcggcagcggcggcggcatgaaccacgaccaggagttcgacccccctaaggtgtaccctcccgtccccgccgagaagagaaagcccatccgggtcctgagcctgttcgatggcatcgccaccggtctgctggtgctgaaggacctgggcatccaggtggataggtacattgcctccgaggtgtgcgaggactccatcaccgtgggaatggtgcgtcatcagggcaagatcatgtacgtgggcgacgtgcggagcgtgacacagaagcatatccaggagtggggccctttcgacctggtgatcggcggcagcccttgcaatgacctgagcatcgtgaacccagcccggaagggcctgtacgagggaaccggcagactgttcttcgagttttacagactgctgcacgacgcccggcctaaggaaggcgacgaccggcccttcttttggctgttcgagaatgtggtggccatgggagtcagcgacaagcgggatattagccggttcctggagagcaaccccgtgatgatcgatgccaaggaagtgagcgccgcccaccgggccagatacttctggggcaatctgcctggcatgaacagacccctggccagcaccgtgaacgacaagctggagctgcaggagtgcctggagcacggccggatcgccaagttcagcaaggtgagaaccatcaccacccgaagcaacagcatcaaacaaggcaaggaccagcactttcctgtgttcatgaacgagaaggaggacatcctgtggtgtaccgagatggagagagtgttcgggttcccagtccactacacagatgtcagcaacatgtctagactggccagacagagactgctgggaagaagctggtccgtccctgtgatcagacacctgttcgcccctctgaaggagtacttcgcctgcgtgagcagcggcaacagcaacgccaacagccggggccccagcttctctagcggcctggtgccactgtccctgagagggagccacatgggccccatggagatctacaaaaccgtgagcgcctggaagcggcagcctgtgcgcgtgctgagcctgtttcggaatatcgataaagtcctgaaaagcctgggattcctggagagcggctctggctccggcggtggcaccctgaagtacgtggaggatgtgacaaacgtggtcagacgggatgtggagaagtggggccccttcgatctggtgtacggcagcacccaacccctgggcagctcttgtgaccggtgccctggctggtacatgtttcagttccaccggatcctgcagtacgccctgccgagacaggagtcccagcggccattcttttggattttcatggacaacttgctgctgaccgaggatgaccaggaaactaccactcggttcctgcagaccgaagccgtgaccctgcaggacgtgagaggccgggactaccagaacgccatgcgggtgtggtccaacatccctggactgaaaagcaagcacgcacctctgacccctaaagaagaggagtacctgcaggcccaggtgcggagcagaagcaagctggacgcccctaaggtggatctgctggtgaagaattgcctcctgcccctgagagagtacttcaagtatttcagccagaatagtctgcccctgggcggcccaagcagcggcgcccctcctcccagcggcggcagcccagccggctccccaacctctaccgaggagggcacctctgagtccgccacccccgagagcggccctggcacctccaccgagcccagcgagggcagcgcacccggcagccctgccggcagccccacctccacagaggagggaaccagcaccgagcccagcgaaggcagcgccccaggcaccagcaccgagcctagtgagggcggctctggcggcggcagcgcccaggagattaaacggatcaacaagatcagaagaagacttgtgaaagacagcaacaccaagaaggccggcaagacaggccccatgaaaaccctgctggttagagtgatgacacccgatctgagagagcggctggaaaacctgagaaagaagcctgaaaatatcccccagcccatcagcaatacatctagagccaacctgaataagctgctgaccgattacaccgaaatgaagaaggcgatcctgcatgtgtactgggaagagttccagaaggaccctgtgggcctgatgagccgggtggcccagcctgccagcaagaagatcgatcagaacaagctgaaacctgagatggacgagaagggcaacctgaccaccgccggctttgcctgctctcagtgtggccagcccctgttcgtgtacaagctggagcaggtgtctgagaagggcaaggcttacaccaactacttcggacggtgcaatgtggccgagcacgaaaagctgatcctgctggcccagctgaagcccgagaaggatagcgacgaagccgtgacatatagcctgggaaagtttgggcagagggccctggatttctacagcattcatgtgaccaaggagtccacccaccccgtgaagcccctggcccagatcgccggaaacagatacgcctccggacctgtgggaaaggccctgagcgacgcatgtatgggcacaatcgcctccttcctgtctaagtaccaggacatcatcatcgaacaccagaaggtggtgaagggcaaccagaagagactggagagcctgcgggagctggccggcaaggaaaacctggaataccctagcgtgaccctgccacctcagcctcacaccaaggagggcgttgatgcctacaacgaagtgatcgcccgggtgcgaatgtgggtgaacctgaacctgtggcagaagctgaagctaagcagagatgatgccaagcctctgctgagactgaagggattcccttcctttcctctggtcgagagacaggccaacgaagtggactggtgggacatggtgtgtaacgtgaagaagctgatcaacgagaaaaaggaggatggcaaggtgttttggcagaatctggctggctacaagagacaggaagccctgagaccatacctgagcagcgaggaagatcggaagaagggaaagaaattcgctcggtaccagctgggcgacctgctgctgcacctggaaaagaagcacggcgaggactggggaaaggtgtacgacgaggcctgggagcggattgacaagaaagtggaaggcctgagcaagcacatcaagctggaagaggaacggagaagcgaggacgcccagagcaaggccgccctgaccgactggctgcgggctaaggccagcttcgtgatcgagggcctgaaggaggccgacaaggacgagttctgcagatgcgagctgaagctgcagaagtggtacggggacctgcggggaaagcccttcgccatcgaagccgagaacagcatcctggacatcagcggcttcagcaagcagtacaactgtgccttcatctggcagaaggacggcgtgaagaagctgaacctgtacctgatcatcaactacttcaagggcggcaagctgcggttcaagaagatcaaacctgaagccttcgaagccaacagattctacaccgtgatcaacaaaaagagcggcgagatcgtgcccatggaggtgaacttcaacttcgacgaccccaacctgatcatcctgcctctggcctttggcaagagacagggcagagaattcatctggaacgacctgctgtccctggaaaccggcagcctgaagctggccaacggaagagtgatcgagaagacactgtacaacagaagaacccggcaggatgagcctgccctgttcgtggccctgaccttcgagcggcgggaggtcctggactcctccaatatcaaaccaatgaacctgatcggcgtggcaagaggcgaaaacatccccgccgtgatcgccctgaccgaccccgagggctgcccactgagccggtttaaggatagcctgggaaacccaacccacatcctgagaatcggcgagagctataaggagaagcagcggaccatccaggccaagaaggaggtggagcagcggagagccggcggctacagccggaagtacgccagcaaagccaagaatctggcagacgatatggtgagaaacaccgctagagatctgctgtactacgccgtgacccaggatgccatgctgatcttcgccaacctgagccggggcttcggccggcagggcaagcggaccttcatggccgagagacagtacacacggatggaggactggctgaccgccaagctggcctacgagggcctgagcaagacctacctgtccaagacactggcccagtacacctccaagacatgcagcaactgtgggtttaccatcaccagcgccgactacgacagggtgctggagaagctgaagaagacagcaacaggctggatgaccacaattaacggcaaggagctgaaggtggagggccagattacctactacaacagatacaagagacagaacgtagtcaaggacctgtccgtcgagctggatagactgagcgaagaatctgtgaacaacgacatctcctcctggacaaagggcagaagcggagaagctctgagcctcctgaagaaaagattctcccatagacccgtgcaggagaagttcgtgtgcctgaactgcggcttcgagacacacgcagccgagcaagccgccctgaacatcgccagatcctggctgttcctgcggagccaggagtacaagaaataccagacaaacaagacaaccggcaacaccgataagagagccttcgtcgagacctggcagtccttttaccggaagaagcttaaggaggtgtggaaacctgccgtgcggtctggcggatctggcggaggctccacaagcgtgcaggagcccgtgaccttcaaggacgtggccgtggacttcacccaggaggagtggggccagctggacctggtgcagaggaccctgtacagggacgtgatgctggagacctacggccacctgctgagcgtgggcaaccagatcgccaagcccgaggtgatcagcctgctggagcagggcgaggagccctggagcgtggagcagacctgcccccagagggcctgccccgagtggatgaggaacaccagccccaagaaaaagagaaaagtctaagctgccttctgcggggcttgccttctggccatgcccttcttctctcccttgcacctgtacctcttggtctttgaataaagcctgagtaggaaggctagcaaaaaaaaaaaaaaaaaaaaaaaaaaaaaaaaaaaaaaaaaaaaaaaaaaaaaaaaaaaaaaaaaaaaaaaaaaaaaaaa

SEQ ID NO: 2634 - RNA, 5419 nt, synthetic construct
  source 1..5419: mol_type = other RNA
aggaaataagagagaaaagaagagtaagaagaaatataagagccaccatggcccctaagaagaagcgtaaagtgagccgggtgaacggcagcggcagcggcggcggcatgaaccacgaccaggagttcgacccccctaaggtgtaccctcccgtccccgccgagaagagaaagcccatccgggtcctgagcctgttcgatggcatcgccaccggtctgctggtgctgaaggacctgggcatccaggtggataggtacattgcctccgaggtgtgcgaggactccatcaccgtgggaatggtgcgtcatcagggcaagatcatgtacgtgggcgacgtgcggagcgtgacacagaagcatatccaggagtggggccctttcgacctggtgatcggcggcagcccttgcaatgacctgagcatcgtgaacccagcccggaagggcctgtacgagggaaccggcagactgttcttcgagttttacagactgctgcacgacgcccggcctaaggaaggcgacgaccggcccttcttttggctgttcgagaatgtggtggccatgggagtcagcgacaagcgggatattagccggttcctggagagcaaccccgtgatgatcgatgccaaggaagtgagcgccgcccaccgggccagatacttctggggcaatctgcctggcatgaacagacccctggccagcaccgtgaacgacaagctggagctgcaggagtgcctggagcacggccggatcgccaagttcagcaaggtgagaaccatcaccacccgaagcaacagcatcaaacaaggcaaggaccagcactttcctgtgttcatgaacgagaaggaggacatcctgtggtgtaccgagatggagagagtgttcgggttcccagtccactacacagatgtcagcaacatgtctagactggccagacagagactgctgggaagaagctggtccgtccctgtgatcagacacctgttcgcccctctgaaggagtacttcgcctgcgtgagcagcggcaacagcaacgccaacagccggggccccagcttctctagcggcctggtgccactgtccctgagagggagccacatgggccccatggagatctacaaaaccgtgagcgcctggaagcggcagcctgtgcgcgtgctgagcctgtttcggaatatcgataaagtcctgaaaagcctgggattcctggagagcggctctggctccggcggtggcaccctgaagtacgtggaggatgtgacaaacgtggtcagacgggatgtggagaagtggggccccttcgatctggtgtacggcagcacccaacccctgggcagctcttgtgaccggtgccctggctggtacatgtttcagttccaccggatcctgcagtacgccctgccgagacaggagtcccagcggccattcttttggattttcatggacaacttgctgctgaccgaggatgaccaggaaactaccactcggttcctgcagaccgaagccgtgaccctgcaggacgtgagaggccgggactaccagaacgccatgcgggtgtggtccaacatccctggactgaaaagcaagcacgcacctctgacccctaaagaagaggagtacctgcaggcccaggtgcggagcagaagcaagctggacgcccctaaggtggatctgctggtgaagaattgcctcctgcccctgagagagtacttcaagtatttcagccagaatagtctgcccctgggcggcccaagcagcggcgcccctcctcccagcggcggcagcccagccggctccccaacctctaccgaggagggcacctctgagtccgccacccccgagagcggccctggcacctccaccgagcccagcgagggcagcgcacccggcagccctgccggcagccccacctccacagaggagggaaccagcaccgagcccagcgaaggcagcgccccaggcaccagcaccgagcctagtgagggcggctctggcggcggcagcgcccaggagattaaacggatcaacaagatcagaagaagacttgtgaaagacagcaacaccaagaaggccggcaagacaggccccatgaaaaccctgctggttagagtgatgacacccgatctgagagagcggctggaaaacctgagaaagaagcctgaaaatatcccccagcccatcagcaatacatctagagccaacctgaataagctgctgaccgattacaccgaaatgaagaaggcgatcctgcatgtgtactgggaagagttccagaaggaccctgtgggcctgatgagccgggtggcccagcctgccagcaagaagatcgatcagaacaagctgaaacctgagatggacgagaagggcaacctgaccaccgccggctttgcctgctctcagtgtggccagcccctgttcgtgtacaagctggagcaggtgtctgagaagggcaaggcttacaccaactacttcggacggtgcaatgtggccgagcacgaaaagctgatcctgctggcccagctgaagcccgagaaggatagcgacgaagccgtgacatatagcctgggaaagtttgggcagagggccctggatttctacagcattcatgtgaccaaggagtccacccaccccgtgaagcccctggcccagatcgccggaaacagatacgcctccggacctgtgggaaaggccctgagcgacgcatgtatgggcacaatcgcctccttcctgtctaagtaccaggacatcatcatcgaacaccagaaggtggtgaagggcaaccagaagagactggagagcctgcgggagctggccggcaaggaaaacctggaataccctagcgtgaccctgccacctcagcctcacaccaaggagggcgttgatgcctacaacgaagtgatcgcccgggtgcgaatgtgggtgaacctgaacctgtggcagaagctgaagctaagcagagatgatgccaagcctctgctgagactgaagggattcccttcctttcctctggtcgagagacaggccaacgaagtggactggtgggacatggtgtgtaacgtgaagaagctgatcaacgagaaaaaggaggatggcaaggtgttttggcagaatctggctggctacaagagacaggaagccctgagaccatacctgagcagcgaggaagatcggaagaagggaaagaaattcgctcggtaccagctgggcgacctgctgctgcacctggaaaagaagcacggcgaggactggggaaaggtgtacgacgaggcctgggagcggattgacaagaaagtggaaggcctgagcaagcacatcaagctggaagaggaacggagaagcgaggacgcccagagcaaggccgccctgaccgactggctgcgggctaaggccagcttcgtgatcgagggcctgaaggaggccgacaaggacgagttctgcagatgcgagctgaagctgcagaagtggtacggggacctgcggggaaagcccttcgccatcgaagccgagaacagcatcctggacatcagcggcttcagcaagcagtacaactgtgccttcatctggcagaaggacggcgtgaagaagctgaacctgtacctgatcatcaactacttcaagggcggcaagctgcggttcaagaagatcaaacctgaagccttcgaagccaacagattctacaccgtgatcaacaaaaagagcggcgagatcgtgcccatggaggtgaacttcaacttcgacgaccccaacctgatcatcctgcctctggcctttggcaagagacagggcagagaattcatctggaacgacctgctgtccctggaaaccggcagcctgaagctggccaacggaagagtgatcgagaagacactgtacaacagaagaacccggcaggatgagcctgccctgttcgtggccctgaccttcgagcggcgggaggtcctggactcctccaatatcaaaccaatgaacctgatcggcgtggcaagaggcgaaaacatccccgccgtgatcgccctgaccgaccccgagggctgcccactgagccggtttaaggatagcctgggaaacccaacccacatcctgagaatcggcgagagctataaggagaagcagcggaccatccaggccaagaaggaggtggagcagcggagagccggcggctacagccggaagtacgccagcaaagccaagaatctggcagacgatatggtgagaaacaccgctagagatctgctgtactacgccgtgacccaggatgccatgctgatcttcgccaacctgagccggggcttcggccggcagggcaagcggaccttcatggccgagagacagtacacacggatggaggactggctgaccgccaagctggcctacgagggcctgagcaagacctacctgtccaagacactggcccagtacacctccaagacatgcagcaactgtgggtttaccatcaccagcgccgactacgacagggtgctggagaagctgaagaagacagcaacaggctggatgaccacaattaacggcaaggagctgaaggtggagggccagattacctactacaacagatacaagagacagaacgtagtcaaggacctgtccgtcgagctggatagactgagcgaagaatctgtgaacaacgacatctcctcctggacaaagggcagaagcggagaagctctgagcctcctgaagaaaagattctcccatagacccgtgcaggagaagttcgtgtgcctgaactgcggcttcgagacacacgcagccgagcaagccgccctgaacatcgccagatcctggctgttcctgcggagccaggagtacaagaaataccagacaaacaagacaaccggcaacaccgataagagagccttcgtcgagacctggcagtccttttaccggaagaagcttaaggaggtgtggaaacctgccgtgcggtctggcggatctggcggaggctccacaagcggcgaggagcccgtgaacttcgaggaggtggccgtgtacttcagcagggaggagtgggccctgctggaccccgcccagagggccctgtacagggacgtgatgctggagacctacgagtgcgtggccagcctggcccccctgcccgcccccaagcccatggtgatcagcctgctggaggagggcgaggagccctggatccccgacgtgggcagccccgaggccgtggccggcgacgtgagccccaccagccccaagaaaaagagaaaagtctaagctgccttctgcggggcttgccttctggccatgcccttcttctctcccttgcacctgtacctcttggtctttgaataaagcctgagtaggaaggctagcaaaaaaaaaaaaaaaaaaaaaaaaaaaaaaaaaaaaaaaaaaaaaaaaaaaaaaaaaaaaaaaaaaaaaaaaaaaaaaaa

SEQ ID NO: 2635 - RNA, 5419 nt, synthetic construct
  source 1..5419: mol_type = other RNA
aggaaataagagagaaaagaagagtaagaagaaatataagagccaccatggcccctaagaagaagcgtaaagtgagccgggtgaacggcagcggcagcggcggcggcatgaaccacgaccaggagttcgacccccctaaggtgtaccctcccgtccccgccgagaagagaaagcccatccgggtcctgagcctgttcgatggcatcgccaccggtctgctggtgctgaaggacctgggcatccaggtggataggtacattgcctccgaggtgtgcgaggactccatcaccgtgggaatggtgcgtcatcagggcaagatcatgtacgtgggcgacgtgcggagcgtgacacagaagcatatccaggagtggggccctttcgacctggtgatcggcggcagcccttgcaatgacctgagcatcgtgaacccagcccggaagggcctgtacgagggaaccggcagactgttcttcgagttttacagactgctgcacgacgcccggcctaaggaaggcgacgaccggcccttcttttggctgttcgagaatgtggtggccatgggagtcagcgacaagcgggatattagccggttcctggagagcaaccccgtgatgatcgatgccaaggaagtgagcgccgcccaccgggccagatacttctggggcaatctgcctggcatgaacagacccctggccagcaccgtgaacgacaagctggagctgcaggagtgcctggagcacggccggatcgccaagttcagcaaggtgagaaccatcaccacccgaagcaacagcatcaaacaaggcaaggaccagcactttcctgtgttcatgaacgagaaggaggacatcctgtggtgtaccgagatggagagagtgttcgggttcccagtccactacacagatgtcagcaacatgtctagactggccagacagagactgctgggaagaagctggtccgtccctgtgatcagacacctgttcgcccctctgaaggagtacttcgcctgcgtgagcagcggcaacagcaacgccaacagccggggccccagcttctctagcggcctggtgccactgtccctgagagggagccacatgggccccatggagatctacaaaaccgtgagcgcctggaagcggcagcctgtgcgcgtgctgagcctgtttcggaatatcgataaagtcctgaaaagcctgggattcctggagagcggctctggctccggcggtggcaccctgaagtacgtggaggatgtgacaaacgtggtcagacgggatgtggagaagtggggccccttcgatctggtgtacggcagcacccaacccctgggcagctcttgtgaccggtgccctggctggtacatgtttcagttccaccggatcctgcagtacgccctgccgagacaggagtcccagcggccattcttttggattttcatggacaacttgctgctgaccgaggatgaccaggaaactaccactcggttcctgcagaccgaagccgtgaccctgcaggacgtgagaggccgggactaccagaacgccatgcgggtgtggtccaacatccctggactgaaaagcaagcacgcacctctgacccctaaagaagaggagtacctgcaggcccaggtgcggagcagaagcaagctggacgcccctaaggtggatctgctggtgaagaattgcctcctgcccctgagagagtacttcaagtatttcagccagaatagtctgcccctgggcggcccaagcagcggcgcccctcctcccagcggcggcagcccagccggctccccaacctctaccgaggagggcacctctgagtccgccacccccgagagcggccctggcacctccaccgagcccagcgagggcagcgcacccggcagccctgccggcagccccacctccacagaggagggaaccagcaccgagcccagcgaaggcagcgccccaggcaccagcaccgagcctagtgagggcggctctggcggcggcagcgcccaggagattaaacggatcaacaagatcagaagaagacttgtgaaagacagcaacaccaagaaggccggcaagacaggccccatgaaaaccctgctggttagagtgatgacacccgatctgagagagcggctggaaaacctgagaaagaagcctgaaaatatcccccagcccatcagcaatacatctagagccaacctgaataagctgctgaccgattacaccgaaatgaagaaggcgatcctgcatgtgtactgggaagagttccagaaggaccctgtgggcctgatgagccgggtggcccagcctgccagcaagaagatcgatcagaacaagctgaaacctgagatggacgagaagggcaacctgaccaccgccggctttgcctgctctcagtgtggccagcccctgttcgtgtacaagctggagcaggtgtctgagaagggcaaggcttacaccaactacttcggacggtgcaatgtggccgagcacgaaaagctgatcctgctggcccagctgaagcccgagaaggatagcgacgaagccgtgacatatagcctgggaaagtttgggcagagggccctggatttctacagcattcatgtgaccaaggagtccacccaccccgtgaagcccctggcccagatcgccggaaacagatacgcctccggacctgtgggaaaggccctgagcgacgcatgtatgggcacaatcgcctccttcctgtctaagtaccaggacatcatcatcgaacaccagaaggtggtgaagggcaaccagaagagactggagagcctgcgggagctggccggcaaggaaaacctggaataccctagcgtgaccctgccacctcagcctcacaccaaggagggcgttgatgcctacaacgaagtgatcgcccgggtgcgaatgtgggtgaacctgaacctgtggcagaagctgaagctaagcagagatgatgccaagcctctgctgagactgaagggattcccttcctttcctctggtcgagagacaggccaacgaagtggactggtgggacatggtgtgtaacgtgaagaagctgatcaacgagaaaaaggaggatggcaaggtgttttggcagaatctggctggctacaagagacaggaagccctgagaccatacctgagcagcgaggaagatcggaagaagggaaagaaattcgctcggtaccagctgggcgacctgctgctgcacctggaaaagaagcacggcgaggactggggaaaggtgtacgacgaggcctgggagcggattgacaagaaagtggaaggcctgagcaagcacatcaagctggaagaggaacggagaagcgaggacgcccagagcaaggccgccctgaccgactggctgcgggctaaggccagcttcgtgatcgagggcctgaaggaggccgacaaggacgagttctgcagatgcgagctgaagctgcagaagtggtacggggacctgcggggaaagcccttcgccatcgaagccgagaacagcatcctggacatcagcggcttcagcaagcagtacaactgtgccttcatctggcagaaggacggcgtgaagaagctgaacctgtacctgatcatcaactacttcaagggcggcaagctgcggttcaagaagatcaaacctgaagccttcgaagccaacagattctacaccgtgatcaacaaaaagagcggcgagatcgtgcccatggaggtgaacttcaacttcgacgaccccaacctgatcatcctgcctctggcctttggcaagagacagggcagagaattcatctggaacgacctgctgtccctggaaaccggcagcctgaagctggccaacggaagagtgatcgagaagacactgtacaacagaagaacccggcaggatgagcctgccctgttcgtggccctgaccttcgagcggcgggaggtcctggactcctccaatatcaaaccaatgaacctgatcggcgtggcaagaggcgaaaacatccccgccgtgatcgccctgaccgaccccgagggctgcccactgagccggtttaaggatagcctgggaaacccaacccacatcctgagaatcggcgagagctataaggagaagcagcggaccatccaggccaagaaggaggtggagcagcggagagccggcggctacagccggaagtacgccagcaaagccaagaatctggcagacgatatggtgagaaacaccgctagagatctgctgtactacgccgtgacccaggatgccatgctgatcttcgccaacctgagccggggcttcggccggcagggcaagcggaccttcatggccgagagacagtacacacggatggaggactggctgaccgccaagctggcctacgagggcctgagcaagacctacctgtccaagacactggcccagtacacctccaagacatgcagcaactgtgggtttaccatcaccagcgccgactacgacagggtgctggagaagctgaagaagacagcaacaggctggatgaccacaattaacggcaaggagctgaaggtggagggccagattacctactacaacagatacaagagacagaacgtagtcaaggacctgtccgtcgagctggatagactgagcgaagaatctgtgaacaacgacatctcctcctggacaaagggcagaagcggagaagctctgagcctcctgaagaaaagattctcccatagacccgtgcaggagaagttcgtgtgcctgaactgcggcttcgagacacacgcagccgagcaagccgccctgaacatcgccagatcctggctgttcctgcggagccaggagtacaagaaataccagacaaacaagacaaccggcaacaccgataagagagccttcgtcgagacctggcagtccttttaccggaagaagcttaaggaggtgtggaaacctgccgtgcggtctggcggatctggcggaggctccacaagccagccccagggcaccatgaccttcaaggacgtggaggtgaccttcagccaggacgagtggggcctgctggacgccagccagaggaacctgtacagggacgtgatgctggagaactacggcaacatggccagcgtggtgggccccttcaccaagcccgccctgatcagctggctggaggccagggagccctggggcctgaacgtgcagggcgtgcagttcaagggcaaccccggcgccgcccccaccagccccaagaaaaagagaaaagtctaagctgccttctgcggggcttgccttctggccatgcccttcttctctcccttgcacctgtacctcttggtctttgaataaagcctgagtaggaaggctagcaaaaaaaaaaaaaaaaaaaaaaaaaaaaaaaaaaaaaaaaaaaaaaaaaaaaaaaaaaaaaaaaaaaaaaaaaaaaaaaa

SEQ ID NO: 2636 - RNA, 5419 nt, synthetic construct
  source 1..5419: mol_type = other RNA
aggaaataagagagaaaagaagagtaagaagaaatataagagccaccatggcccctaagaagaagcgtaaagtgagccgggtgaacggcagcggcagcggcggcggcatgaaccacgaccaggagttcgacccccctaaggtgtaccctcccgtccccgccgagaagagaaagcccatccgggtcctgagcctgttcgatggcatcgccaccggtctgctggtgctgaaggacctgggcatccaggtggataggtacattgcctccgaggtgtgcgaggactccatcaccgtgggaatggtgcgtcatcagggcaagatcatgtacgtgggcgacgtgcggagcgtgacacagaagcatatccaggagtggggccctttcgacctggtgatcggcggcagcccttgcaatgacctgagcatcgtgaacccagcccggaagggcctgtacgagggaaccggcagactgttcttcgagttttacagactgctgcacgacgcccggcctaaggaaggcgacgaccggcccttcttttggctgttcgagaatgtggtggccatgggagtcagcgacaagcgggatattagccggttcctggagagcaaccccgtgatgatcgatgccaaggaagtgagcgccgcccaccgggccagatacttctggggcaatctgcctggcatgaacagacccctggccagcaccgtgaacgacaagctggagctgcaggagtgcctggagcacggccggatcgccaagttcagcaaggtgagaaccatcaccacccgaagcaacagcatcaaacaaggcaaggaccagcactttcctgtgttcatgaacgagaaggaggacatcctgtggtgtaccgagatggagagagtgttcgggttcccagtccactacacagatgtcagcaacatgtctagactggccagacagagactgctgggaagaagctggtccgtccctgtgatcagacacctgttcgcccctctgaaggagtacttcgcctgcgtgagcagcggcaacagcaacgccaacagccggggccccagcttctctagcggcctggtgccactgtccctgagagggagccacatgggccccatggagatctacaaaaccgtgagcgcctggaagcggcagcctgtgcgcgtgctgagcctgtttcggaatatcgataaagtcctgaaaagcctgggattcctggagagcggctctggctccggcggtggcaccctgaagtacgtggaggatgtgacaaacgtggtcagacgggatgtggagaagtggggccccttcgatctggtgtacggcagcacccaacccctgggcagctcttgtgaccggtgccctggctggtacatgtttcagttccaccggatcctgcagtacgccctgccgagacaggagtcccagcggccattcttttggattttcatggacaacttgctgctgaccgaggatgaccaggaaactaccactcggttcctgcagaccgaagccgtgaccctgcaggacgtgagaggccgggactaccagaacgccatgcgggtgtggtccaacatccctggactgaaaagcaagcacgcacctctgacccctaaagaagaggagtacctgcaggcccaggtgcggagcagaagcaagctggacgcccctaaggtggatctgctggtgaagaattgcctcctgcccctgagagagtacttcaagtatttcagccagaatagtctgcccctgggcggcccaagcagcggcgcccctcctcccagcggcggcagcccagccggctccccaacctctaccgaggagggcacctctgagtccgccacccccgagagcggccctggcacctccaccgagcccagcgagggcagcgcacccggcagccctgccggcagccccacctccacagaggagggaaccagcaccgagcccagcgaaggcagcgccccaggcaccagcaccgagcctagtgagggcggctctggcggcggcagcgcccaggagattaaacggatcaacaagatcagaagaagacttgtgaaagacagcaacaccaagaaggccggcaagacaggccccatgaaaaccctgctggttagagtgatgacacccgatctgagagagcggctggaaaacctgagaaagaagcctgaaaatatcccccagcccatcagcaatacatctagagccaacctgaataagctgctgaccgattacaccgaaatgaagaaggcgatcctgcatgtgtactgggaagagttccagaaggaccctgtgggcctgatgagccgggtggcccagcctgccagcaagaagatcgatcagaacaagctgaaacctgagatggacgagaagggcaacctgaccaccgccggctttgcctgctctcagtgtggccagcccctgttcgtgtacaagctggagcaggtgtctgagaagggcaaggcttacaccaactacttcggacggtgcaatgtggccgagcacgaaaagctgatcctgctggcccagctgaagcccgagaaggatagcgacgaagccgtgacatatagcctgggaaagtttgggcagagggccctggatttctacagcattcatgtgaccaaggagtccacccaccccgtgaagcccctggcccagatcgccggaaacagatacgcctccggacctgtgggaaaggccctgagcgacgcatgtatgggcacaatcgcctccttcctgtctaagtaccaggacatcatcatcgaacaccagaaggtggtgaagggcaaccagaagagactggagagcctgcgggagctggccggcaaggaaaacctggaataccctagcgtgaccctgccacctcagcctcacaccaaggagggcgttgatgcctacaacgaagtgatcgcccgggtgcgaatgtgggtgaacctgaacctgtggcagaagctgaagctaagcagagatgatgccaagcctctgctgagactgaagggattcccttcctttcctctggtcgagagacaggccaacgaagtggactggtgggacatggtgtgtaacgtgaagaagctgatcaacgagaaaaaggaggatggcaaggtgttttggcagaatctggctggctacaagagacaggaagccctgagaccatacctgagcagcgaggaagatcggaagaagggaaagaaattcgctcggtaccagctgggcgacctgctgctgcacctggaaaagaagcacggcgaggactggggaaaggtgtacgacgaggcctgggagcggattgacaagaaagtggaaggcctgagcaagcacatcaagctggaagaggaacggagaagcgaggacgcccagagcaaggccgccctgaccgactggctgcgggctaaggccagcttcgtgatcgagggcctgaaggaggccgacaaggacgagttctgcagatgcgagctgaagctgcagaagtggtacggggacctgcggggaaagcccttcgccatcgaagccgagaacagcatcctggacatcagcggcttcagcaagcagtacaactgtgccttcatctggcagaaggacggcgtgaagaagctgaacctgtacctgatcatcaactacttcaagggcggcaagctgcggttcaagaagatcaaacctgaagccttcgaagccaacagattctacaccgtgatcaacaaaaagagcggcgagatcgtgcccatggaggtgaacttcaacttcgacgaccccaacctgatcatcctgcctctggcctttggcaagagacagggcagagaattcatctggaacgacctgctgtccctggaaaccggcagcctgaagctggccaacggaagagtgatcgagaagacactgtacaacagaagaacccggcaggatgagcctgccctgttcgtggccctgaccttcgagcggcgggaggtcctggactcctccaatatcaaaccaatgaacctgatcggcgtggcaagaggcgaaaacatccccgccgtgatcgccctgaccgaccccgagggctgcccactgagccggtttaaggatagcctgggaaacccaacccacatcctgagaatcggcgagagctataaggagaagcagcggaccatccaggccaagaaggaggtggagcagcggagagccggcggctacagccggaagtacgccagcaaagccaagaatctggcagacgatatggtgagaaacaccgctagagatctgctgtactacgccgtgacccaggatgccatgctgatcttcgccaacctgagccggggcttcggccggcagggcaagcggaccttcatggccgagagacagtacacacggatggaggactggctgaccgccaagctggcctacgagggcctgagcaagacctacctgtccaagacactggcccagtacacctccaagacatgcagcaactgtgggtttaccatcaccagcgccgactacgacagggtgctggagaagctgaagaagacagcaacaggctggatgaccacaattaacggcaaggagctgaaggtggagggccagattacctactacaacagatacaagagacagaacgtagtcaaggacctgtccgtcgagctggatagactgagcgaagaatctgtgaacaacgacatctcctcctggacaaagggcagaagcggagaagctctgagcctcctgaagaaaagattctcccatagacccgtgcaggagaagttcgtgtgcctgaactgcggcttcgagacacacgcagccgagcaagccgccctgaacatcgccagatcctggctgttcctgcggagccaggagtacaagaaataccagacaaacaagacaaccggcaacaccgataagagagccttcgtcgagacctggcagtccttttaccggaagaagcttaaggaggtgtggaaacctgccgtgcggtctggcggatctggcggaggctccacaagcaggcccggcgccgtgagcttcgccgacgtggccgtgtacttcagccccgaggagtggggctgcctgaggcccgcccagagggccctgtacagggacgtgatgagggagacctacggccacctgggcgccctgggcttcgccggccccaagcccgccctgatcagctggctggagaggaagaaggaggtgtggagccccgaggccgaggaccccgaggagggcgccaggcaccccggcagcggcaccagccccaagaaaaagagaaaagtctaagctgccttctgcggggcttgccttctggccatgcccttcttctctcccttgcacctgtacctcttggtctttgaataaagcctgagtaggaaggctagcaaaaaaaaaaaaaaaaaaaaaaaaaaaaaaaaaaaaaaaaaaaaaaaaaaaaaaaaaaaaaaaaaaaaaaaaaaaaaaaa

SEQ ID NO: 2637 - RNA, 5419 nt, synthetic construct
  source 1..5419: mol_type = other RNA
aggaaataagagagaaaagaagagtaagaagaaatataagagccaccatggcccctaagaagaagcgtaaagtgagccgggtgaacggcagcggcagcggcggcggcatgaaccacgaccaggagttcgacccccctaaggtgtaccctcccgtccccgccgagaagagaaagcccatccgggtcctgagcctgttcgatggcatcgccaccggtctgctggtgctgaaggacctgggcatccaggtggataggtacattgcctccgaggtgtgcgaggactccatcaccgtgggaatggtgcgtcatcagggcaagatcatgtacgtgggcgacgtgcggagcgtgacacagaagcatatccaggagtggggccctttcgacctggtgatcggcggcagcccttgcaatgacctgagcatcgtgaacccagcccggaagggcctgtacgagggaaccggcagactgttcttcgagttttacagactgctgcacgacgcccggcctaaggaaggcgacgaccggcccttcttttggctgttcgagaatgtggtggccatgggagtcagcgacaagcgggatattagccggttcctggagagcaaccccgtgatgatcgatgccaaggaagtgagcgccgcccaccgggccagatacttctggggcaatctgcctggcatgaacagacccctggccagcaccgtgaacgacaagctggagctgcaggagtgcctggagcacggccggatcgccaagttcagcaaggtgagaaccatcaccacccgaagcaacagcatcaaacaaggcaaggaccagcactttcctgtgttcatgaacgagaaggaggacatcctgtggtgtaccgagatggagagagtgttcgggttcccagtccactacacagatgtcagcaacatgtctagactggccagacagagactgctgggaagaagctggtccgtccctgtgatcagacacctgttcgcccctctgaaggagtacttcgcctgcgtgagcagcggcaacagcaacgccaacagccggggccccagcttctctagcggcctggtgccactgtccctgagagggagccacatgggccccatggagatctacaaaaccgtgagcgcctggaagcggcagcctgtgcgcgtgctgagcctgtttcggaatatcgataaagtcctgaaaagcctgggattcctggagagcggctctggctccggcggtggcaccctgaagtacgtggaggatgtgacaaacgtggtcagacgggatgtggagaagtggggccccttcgatctggtgtacggcagcacccaacccctgggcagctcttgtgaccggtgccctggctggtacatgtttcagttccaccggatcctgcagtacgccctgccgagacaggagtcccagcggccattcttttggattttcatggacaacttgctgctgaccgaggatgaccaggaaactaccactcggttcctgcagaccgaagccgtgaccctgcaggacgtgagaggccgggactaccagaacgccatgcgggtgtggtccaacatccctggactgaaaagcaagcacgcacctctgacccctaaagaagaggagtacctgcaggcccaggtgcggagcagaagcaagctggacgcccctaaggtggatctgctggtgaagaattgcctcctgcccctgagagagtacttcaagtatttcagccagaatagtctgcccctgggcggcccaagcagcggcgcccctcctcccagcggcggcagcccagccggctccccaacctctaccgaggagggcacctctgagtccgccacccccgagagcggccctggcacctccaccgagcccagcgagggcagcgcacccggcagccctgccggcagccccacctccacagaggagggaaccagcaccgagcccagcgaaggcagcgccccaggcaccagcaccgagcctagtgagggcggctctggcggcggcagcgcccaggagattaaacggatcaacaagatcagaagaagacttgtgaaagacagcaacaccaagaaggccggcaagacaggccccatgaaaaccctgctggttagagtgatgacacccgatctgagagagcggctggaaaacctgagaaagaagcctgaaaatatcccccagcccatcagcaatacatctagagccaacctgaataagctgctgaccgattacaccgaaatgaagaaggcgatcctgcatgtgtactgggaagagttccagaaggaccctgtgggcctgatgagccgggtggcccagcctgccagcaagaagatcgatcagaacaagctgaaacctgagatggacgagaagggcaacctgaccaccgccggctttgcctgctctcagtgtggccagcccctgttcgtgtacaagctggagcaggtgtctgagaagggcaaggcttacaccaactacttcggacggtgcaatgtggccgagcacgaaaagctgatcctgctggcccagctgaagcccgagaaggatagcgacgaagccgtgacatatagcctgggaaagtttgggcagagggccctggatttctacagcattcatgtgaccaaggagtccacccaccccgtgaagcccctggcccagatcgccggaaacagatacgcctccggacctgtgggaaaggccctgagcgacgcatgtatgggcacaatcgcctccttcctgtctaagtaccaggacatcatcatcgaacaccagaaggtggtgaagggcaaccagaagagactggagagcctgcgggagctggccggcaaggaaaacctggaataccctagcgtgaccctgccacctcagcctcacaccaaggagggcgttgatgcctacaacgaagtgatcgcccgggtgcgaatgtgggtgaacctgaacctgtggcagaagctgaagctaagcagagatgatgccaagcctctgctgagactgaagggattcccttcctttcctctggtcgagagacaggccaacgaagtggactggtgggacatggtgtgtaacgtgaagaagctgatcaacgagaaaaaggaggatggcaaggtgttttggcagaatctggctggctacaagagacaggaagccctgagaccatacctgagcagcgaggaagatcggaagaagggaaagaaattcgctcggtaccagctgggcgacctgctgctgcacctggaaaagaagcacggcgaggactggggaaaggtgtacgacgaggcctgggagcggattgacaagaaagtggaaggcctgagcaagcacatcaagctggaagaggaacggagaagcgaggacgcccagagcaaggccgccctgaccgactggctgcgggctaaggccagcttcgtgatcgagggcctgaaggaggccgacaaggacgagttctgcagatgcgagctgaagctgcagaagtggtacggggacctgcggggaaagcccttcgccatcgaagccgagaacagcatcctggacatcagcggcttcagcaagcagtacaactgtgccttcatctggcagaaggacggcgtgaagaagctgaacctgtacctgatcatcaactacttcaagggcggcaagctgcggttcaagaagatcaaacctgaagccttcgaagccaacagattctacaccgtgatcaacaaaaagagcggcgagatcgtgcccatggaggtgaacttcaacttcgacgaccccaacctgatcatcctgcctctggcctttggcaagagacagggcagagaattcatctggaacgacctgctgtccctggaaaccggcagcctgaagctggccaacggaagagtgatcgagaagacactgtacaacagaagaacccggcaggatgagcctgccctgttcgtggccctgaccttcgagcggcgggaggtcctggactcctccaatatcaaaccaatgaacctgatcggcgtggcaagaggcgaaaacatccccgccgtgatcgccctgaccgaccccgagggctgcccactgagccggtttaaggatagcctgggaaacccaacccacatcctgagaatcggcgagagctataaggagaagcagcggaccatccaggccaagaaggaggtggagcagcggagagccggcggctacagccggaagtacgccagcaaagccaagaatctggcagacgatatggtgagaaacaccgctagagatctgctgtactacgccgtgacccaggatgccatgctgatcttcgccaacctgagccggggcttcggccggcagggcaagcggaccttcatggccgagagacagtacacacggatggaggactggctgaccgccaagctggcctacgagggcctgagcaagacctacctgtccaagacactggcccagtacacctccaagacatgcagcaactgtgggtttaccatcaccagcgccgactacgacagggtgctggagaagctgaagaagacagcaacaggctggatgaccacaattaacggcaaggagctgaaggtggagggccagattacctactacaacagatacaagagacagaacgtagtcaaggacctgtccgtcgagctggatagactgagcgaagaatctgtgaacaacgacatctcctcctggacaaagggcagaagcggagaagctctgagcctcctgaagaaaagattctcccatagacccgtgcaggagaagttcgtgtgcctgaactgcggcttcgagacacacgcagccgagcaagccgccctgaacatcgccagatcctggctgttcctgcggagccaggagtacaagaaataccagacaaacaagacaaccggcaacaccgataagagagccttcgtcgagacctggcagtccttttaccggaagaagcttaaggaggtgtggaaacctgccgtgcggtctggcggatctggcggaggctccacaagctggcccgagagcgtgaccttcgaggacgtggccgtgtacttcacccagaaccagtgggccagcctggaccccgcccagagggccctgtacagggaggtgatgctggagaactacgccaacgtggccagcctggtggccttccccttccccaagcccgccctgatcagccacctggagaggggcgaggccccctggggccccgacccctgggacaccgagatccccaggggcatcagccagggcaccagccccaagaaaaagagaaaagtctaagctgccttctgcggggcttgccttctggccatgcccttcttctctcccttgcacctgtacctcttggtctttgaataaagcctgagtaggaaggctagcaaaaaaaaaaaaaaaaaaaaaaaaaaaaaaaaaaaaaaaaaaaaaaaaaaaaaaaaaaaaaaaaaaaaaaaaaaaaaaaa

SEQ ID NO: 2638 - RNA, 5419 nt, synthetic construct
  source 1..5419: mol_type = other RNA
aggaaataagagagaaaagaagagtaagaagaaatataagagccaccatggcccctaagaagaagcgtaaagtgagccgggtgaacggcagcggcagcggcggcggcatgaaccacgaccaggagttcgacccccctaaggtgtaccctcccgtccccgccgagaagagaaagcccatccgggtcctgagcctgttcgatggcatcgccaccggtctgctggtgctgaaggacctgggcatccaggtggataggtacattgcctccgaggtgtgcgaggactccatcaccgtgggaatggtgcgtcatcagggcaagatcatgtacgtgggcgacgtgcggagcgtgacacagaagcatatccaggagtggggccctttcgacctggtgatcggcggcagcccttgcaatgacctgagcatcgtgaacccagcccggaagggcctgtacgagggaaccggcagactgttcttcgagttttacagactgctgcacgacgcccggcctaaggaaggcgacgaccggcccttcttttggctgttcgagaatgtggtggccatgggagtcagcgacaagcgggatattagccggttcctggagagcaaccccgtgatgatcgatgccaaggaagtgagcgccgcccaccgggccagatacttctggggcaatctgcctggcatgaacagacccctggccagcaccgtgaacgacaagctggagctgcaggagtgcctggagcacggccggatcgccaagttcagcaaggtgagaaccatcaccacccgaagcaacagcatcaaacaaggcaaggaccagcactttcctgtgttcatgaacgagaaggaggacatcctgtggtgtaccgagatggagagagtgttcgggttcccagtccactacacagatgtcagcaacatgtctagactggccagacagagactgctgggaagaagctggtccgtccctgtgatcagacacctgttcgcccctctgaaggagtacttcgcctgcgtgagcagcggcaacagcaacgccaacagccggggccccagcttctctagcggcctggtgccactgtccctgagagggagccacatgggccccatggagatctacaaaaccgtgagcgcctggaagcggcagcctgtgcgcgtgctgagcctgtttcggaatatcgataaagtcctgaaaagcctgggattcctggagagcggctctggctccggcggtggcaccctgaagtacgtggaggatgtgacaaacgtggtcagacgggatgtggagaagtggggccccttcgatctggtgtacggcagcacccaacccctgggcagctcttgtgaccggtgccctggctggtacatgtttcagttccaccggatcctgcagtacgccctgccgagacaggagtcccagcggccattcttttggattttcatggacaacttgctgctgaccgaggatgaccaggaaactaccactcggttcctgcagaccgaagccgtgaccctgcaggacgtgagaggccgggactaccagaacgccatgcgggtgtggtccaacatccctggactgaaaagcaagcacgcacctctgacccctaaagaagaggagtacctgcaggcccaggtgcggagcagaagcaagctggacgcccctaaggtggatctgctggtgaagaattgcctcctgcccctgagagagtacttcaagtatttcagccagaatagtctgcccctgggcggcccaagcagcggcgcccctcctcccagcggcggcagcccagccggctccccaacctctaccgaggagggcacctctgagtccgccacccccgagagcggccctggcacctccaccgagcccagcgagggcagcgcacccggcagccctgccggcagccccacctccacagaggagggaaccagcaccgagcccagcgaaggcagcgccccaggcaccagcaccgagcctagtgagggcggctctggcggcggcagcgcccaggagattaaacggatcaacaagatcagaagaagacttgtgaaagacagcaacaccaagaaggccggcaagacaggccccatgaaaaccctgctggttagagtgatgacacccgatctgagagagcggctggaaaacctgagaaagaagcctgaaaatatcccccagcccatcagcaatacatctagagccaacctgaataagctgctgaccgattacaccgaaatgaagaaggcgatcctgcatgtgtactgggaagagttccagaaggaccctgtgggcctgatgagccgggtggcccagcctgccagcaagaagatcgatcagaacaagctgaaacctgagatggacgagaagggcaacctgaccaccgccggctttgcctgctctcagtgtggccagcccctgttcgtgtacaagctggagcaggtgtctgagaagggcaaggcttacaccaactacttcggacggtgcaatgtggccgagcacgaaaagctgatcctgctggcccagctgaagcccgagaaggatagcgacgaagccgtgacatatagcctgggaaagtttgggcagagggccctggatttctacagcattcatgtgaccaaggagtccacccaccccgtgaagcccctggcccagatcgccggaaacagatacgcctccggacctgtgggaaaggccctgagcgacgcatgtatgggcacaatcgcctccttcctgtctaagtaccaggacatcatcatcgaacaccagaaggtggtgaagggcaaccagaagagactggagagcctgcgggagctggccggcaaggaaaacctggaataccctagcgtgaccctgccacctcagcctcacaccaaggagggcgttgatgcctacaacgaagtgatcgcccgggtgcgaatgtgggtgaacctgaacctgtggcagaagctgaagctaagcagagatgatgccaagcctctgctgagactgaagggattcccttcctttcctctggtcgagagacaggccaacgaagtggactggtgggacatggtgtgtaacgtgaagaagctgatcaacgagaaaaaggaggatggcaaggtgttttggcagaatctggctggctacaagagacaggaagccctgagaccatacctgagcagcgaggaagatcggaagaagggaaagaaattcgctcggtaccagctgggcgacctgctgctgcacctggaaaagaagcacggcgaggactggggaaaggtgtacgacgaggcctgggagcggattgacaagaaagtggaaggcctgagcaagcacatcaagctggaagaggaacggagaagcgaggacgcccagagcaaggccgccctgaccgactggctgcgggctaaggccagcttcgtgatcgagggcctgaaggaggccgacaaggacgagttctgcagatgcgagctgaagctgcagaagtggtacggggacctgcggggaaagcccttcgccatcgaagccgagaacagcatcctggacatcagcggcttcagcaagcagtacaactgtgccttcatctggcagaaggacggcgtgaagaagctgaacctgtacctgatcatcaactacttcaagggcggcaagctgcggttcaagaagatcaaacctgaagccttcgaagccaacagattctacaccgtgatcaacaaaaagagcggcgagatcgtgcccatggaggtgaacttcaacttcgacgaccccaacctgatcatcctgcctctggcctttggcaagagacagggcagagaattcatctggaacgacctgctgtccctggaaaccggcagcctgaagctggccaacggaagagtgatcgagaagacactgtacaacagaagaacccggcaggatgagcctgccctgttcgtggccctgaccttcgagcggcgggaggtcctggactcctccaatatcaaaccaatgaacctgatcggcgtggcaagaggcgaaaacatccccgccgtgatcgccctgaccgaccccgagggctgcccactgagccggtttaaggatagcctgggaaacccaacccacatcctgagaatcggcgagagctataaggagaagcagcggaccatccaggccaagaaggaggtggagcagcggagagccggcggctacagccggaagtacgccagcaaagccaagaatctggcagacgatatggtgagaaacaccgctagagatctgctgtactacgccgtgacccaggatgccatgctgatcttcgccaacctgagccggggcttcggccggcagggcaagcggaccttcatggccgagagacagtacacacggatggaggactggctgaccgccaagctggcctacgagggcctgagcaagacctacctgtccaagacactggcccagtacacctccaagacatgcagcaactgtgggtttaccatcaccagcgccgactacgacagggtgctggagaagctgaagaagacagcaacaggctggatgaccacaattaacggcaaggagctgaaggtggagggccagattacctactacaacagatacaagagacagaacgtagtcaaggacctgtccgtcgagctggatagactgagcgaagaatctgtgaacaacgacatctcctcctggacaaagggcagaagcggagaagctctgagcctcctgaagaaaagattctcccatagacccgtgcaggagaagttcgtgtgcctgaactgcggcttcgagacacacgcagccgagcaagccgccctgaacatcgccagatcctggctgttcctgcggagccaggagtacaagaaataccagacaaacaagacaaccggcaacaccgataagagagccttcgtcgagacctggcagtccttttaccggaagaagcttaaggaggtgtggaaacctgccgtgcggtctggcggatctggcggaggctccacaagcgtgcaggagcccgtgaccttcaaggacgtggccgtggacttcacccaggaggagtggggccagctggacctggtgcagaggaccctgtacagggacgtgatgctggagacctacggccacctgctgagcgtgggcaaccagatcgccaagcccgaggtgatcagcctgctggagcagggcgaggagccctggagcgtggagcagacctgcccccagaggagctgccccgagtggatgaggaacaccagccccaagaaaaagagaaaagtctaagctgccttctgcggggcttgccttctggccatgcccttcttctctcccttgcacctgtacctcttggtctttgaataaagcctgagtaggaaggctagcaaaaaaaaaaaaaaaaaaaaaaaaaaaaaaaaaaaaaaaaaaaaaaaaaaaaaaaaaaaaaaaaaaaaaaaaaaaaaaaa

SEQ ID NO: 2639 - RNA, 5419 nt, synthetic construct
  source 1..5419: mol_type = other RNA
aggaaataagagagaaaagaagagtaagaagaaatataagagccaccatggcccctaagaagaagcgtaaagtgagccgggtgaacggcagcggcagcggcggcggcatgaaccacgaccaggagttcgacccccctaaggtgtaccctcccgtccccgccgagaagagaaagcccatccgggtcctgagcctgttcgatggcatcgccaccggtctgctggtgctgaaggacctgggcatccaggtggataggtacattgcctccgaggtgtgcgaggactccatcaccgtgggaatggtgcgtcatcagggcaagatcatgtacgtgggcgacgtgcggagcgtgacacagaagcatatccaggagtggggccctttcgacctggtgatcggcggcagcccttgcaatgacctgagcatcgtgaacccagcccggaagggcctgtacgagggaaccggcagactgttcttcgagttttacagactgctgcacgacgcccggcctaaggaaggcgacgaccggcccttcttttggctgttcgagaatgtggtggccatgggagtcagcgacaagcgggatattagccggttcctggagagcaaccccgtgatgatcgatgccaaggaagtgagcgccgcccaccgggccagatacttctggggcaatctgcctggcatgaacagacccctggccagcaccgtgaacgacaagctggagctgcaggagtgcctggagcacggccggatcgccaagttcagcaaggtgagaaccatcaccacccgaagcaacagcatcaaacaaggcaaggaccagcactttcctgtgttcatgaacgagaaggaggacatcctgtggtgtaccgagatggagagagtgttcgggttcccagtccactacacagatgtcagcaacatgtctagactggccagacagagactgctgggaagaagctggtccgtccctgtgatcagacacctgttcgcccctctgaaggagtacttcgcctgcgtgagcagcggcaacagcaacgccaacagccggggccccagcttctctagcggcctggtgccactgtccctgagagggagccacatgggccccatggagatctacaaaaccgtgagcgcctggaagcggcagcctgtgcgcgtgctgagcctgtttcggaatatcgataaagtcctgaaaagcctgggattcctggagagcggctctggctccggcggtggcaccctgaagtacgtggaggatgtgacaaacgtggtcagacgggatgtggagaagtggggccccttcgatctggtgtacggcagcacccaacccctgggcagctcttgtgaccggtgccctggctggtacatgtttcagttccaccggatcctgcagtacgccctgccgagacaggagtcccagcggccattcttttggattttcatggacaacttgctgctgaccgaggatgaccaggaaactaccactcggttcctgcagaccgaagccgtgaccctgcaggacgtgagaggccgggactaccagaacgccatgcgggtgtggtccaacatccctggactgaaaagcaagcacgcacctctgacccctaaagaagaggagtacctgcaggcccaggtgcggagcagaagcaagctggacgcccctaaggtggatctgctggtgaagaattgcctcctgcccctgagagagtacttcaagtatttcagccagaatagtctgcccctgggcggcccaagcagcggcgcccctcctcccagcggcggcagcccagccggctccccaacctctaccgaggagggcacctctgagtccgccacccccgagagcggccctggcacctccaccgagcccagcgagggcagcgcacccggcagccctgccggcagccccacctccacagaggagggaaccagcaccgagcccagcgaaggcagcgccccaggcaccagcaccgagcctagtgagggcggctctggcggcggcagcgcccaggagattaaacggatcaacaagatcagaagaagacttgtgaaagacagcaacaccaagaaggccggcaagacaggccccatgaaaaccctgctggttagagtgatgacacccgatctgagagagcggctggaaaacctgagaaagaagcctgaaaatatcccccagcccatcagcaatacatctagagccaacctgaataagctgctgaccgattacaccgaaatgaagaaggcgatcctgcatgtgtactgggaagagttccagaaggaccctgtgggcctgatgagccgggtggcccagcctgccagcaagaagatcgatcagaacaagctgaaacctgagatggacgagaagggcaacctgaccaccgccggctttgcctgctctcagtgtggccagcccctgttcgtgtacaagctggagcaggtgtctgagaagggcaaggcttacaccaactacttcggacggtgcaatgtggccgagcacgaaaagctgatcctgctggcccagctgaagcccgagaaggatagcgacgaagccgtgacatatagcctgggaaagtttgggcagagggccctggatttctacagcattcatgtgaccaaggagtccacccaccccgtgaagcccctggcccagatcgccggaaacagatacgcctccggacctgtgggaaaggccctgagcgacgcatgtatgggcacaatcgcctccttcctgtctaagtaccaggacatcatcatcgaacaccagaaggtggtgaagggcaaccagaagagactggagagcctgcgggagctggccggcaaggaaaacctggaataccctagcgtgaccctgccacctcagcctcacaccaaggagggcgttgatgcctacaacgaagtgatcgcccgggtgcgaatgtgggtgaacctgaacctgtggcagaagctgaagctaagcagagatgatgccaagcctctgctgagactgaagggattcccttcctttcctctggtcgagagacaggccaacgaagtggactggtgggacatggtgtgtaacgtgaagaagctgatcaacgagaaaaaggaggatggcaaggtgttttggcagaatctggctggctacaagagacaggaagccctgagaccatacctgagcagcgaggaagatcggaagaagggaaagaaattcgctcggtaccagctgggcgacctgctgctgcacctggaaaagaagcacggcgaggactggggaaaggtgtacgacgaggcctgggagcggattgacaagaaagtggaaggcctgagcaagcacatcaagctggaagaggaacggagaagcgaggacgcccagagcaaggccgccctgaccgactggctgcgggctaaggccagcttcgtgatcgagggcctgaaggaggccgacaaggacgagttctgcagatgcgagctgaagctgcagaagtggtacggggacctgcggggaaagcccttcgccatcgaagccgagaacagcatcctggacatcagcggcttcagcaagcagtacaactgtgccttcatctggcagaaggacggcgtgaagaagctgaacctgtacctgatcatcaactacttcaagggcggcaagctgcggttcaagaagatcaaacctgaagccttcgaagccaacagattctacaccgtgatcaacaaaaagagcggcgagatcgtgcccatggaggtgaacttcaacttcgacgaccccaacctgatcatcctgcctctggcctttggcaagagacagggcagagaattcatctggaacgacctgctgtccctggaaaccggcagcctgaagctggccaacggaagagtgatcgagaagacactgtacaacagaagaacccggcaggatgagcctgccctgttcgtggccctgaccttcgagcggcgggaggtcctggactcctccaatatcaaaccaatgaacctgatcggcgtggcaagaggcgaaaacatccccgccgtgatcgccctgaccgaccccgagggctgcccactgagccggtttaaggatagcctgggaaacccaacccacatcctgagaatcggcgagagctataaggagaagcagcggaccatccaggccaagaaggaggtggagcagcggagagccggcggctacagccggaagtacgccagcaaagccaagaatctggcagacgatatggtgagaaacaccgctagagatctgctgtactacgccgtgacccaggatgccatgctgatcttcgccaacctgagccggggcttcggccggcagggcaagcggaccttcatggccgagagacagtacacacggatggaggactggctgaccgccaagctggcctacgagggcctgagcaagacctacctgtccaagacactggcccagtacacctccaagacatgcagcaactgtgggtttaccatcaccagcgccgactacgacagggtgctggagaagctgaagaagacagcaacaggctggatgaccacaattaacggcaaggagctgaaggtggagggccagattacctactacaacagatacaagagacagaacgtagtcaaggacctgtccgtcgagctggatagactgagcgaagaatctgtgaacaacgacatctcctcctggacaaagggcagaagcggagaagctctgagcctcctgaagaaaagattctcccatagacccgtgcaggagaagttcgtgtgcctgaactgcggcttcgagacacacgcagccgagcaagccgccctgaacatcgccagatcctggctgttcctgcggagccaggagtacaagaaataccagacaaacaagacaaccggcaacaccgataagagagccttcgtcgagacctggcagtccttttaccggaagaagcttaaggaggtgtggaaacctgccgtgcggtctggcggatctggcggaggctccacaagcatgcccctgggcagcgagctgttcagggacgtggccatcgtgttcagccaggaggagtggcagtggctggcccccgcccagagggacctgtacagggacgtgatgctggagacctacagcaacctggtgagcctgggcctggccatcagcaagcccgacgtgatcagcttcctggagcagggcaaggagccctggatggtggagagggtggtggccggcggcctgtgccccgaggccgagctgaccagccccaagaaaaagagaaaagtctaagctgccttctgcggggcttgccttctggccatgcccttcttctctcccttgcacctgtacctcttggtctttgaataaagcctgagtaggaaggctagcaaaaaaaaaaaaaaaaaaaaaaaaaaaaaaaaaaaaaaaaaaaaaaaaaaaaaaaaaaaaaaaaaaaaaaaaaaaaaaaa

SEQ ID NO: 2640 - RNA, 5419 nt, synthetic construct
  source 1..5419: mol_type = other RNA
aggaaataagagagaaaagaagagtaagaagaaatataagagccaccatggcccctaagaagaagcgtaaagtgagccgggtgaacggcagcggcagcggcggcggcatgaaccacgaccaggagttcgacccccctaaggtgtaccctcccgtccccgccgagaagagaaagcccatccgggtcctgagcctgttcgatggcatcgccaccggtctgctggtgctgaaggacctgggcatccaggtggataggtacattgcctccgaggtgtgcgaggactccatcaccgtgggaatggtgcgtcatcagggcaagatcatgtacgtgggcgacgtgcggagcgtgacacagaagcatatccaggagtggggccctttcgacctggtgatcggcggcagcccttgcaatgacctgagcatcgtgaacccagcccggaagggcctgtacgagggaaccggcagactgttcttcgagttttacagactgctgcacgacgcccggcctaaggaaggcgacgaccggcccttcttttggctgttcgagaatgtggtggccatgggagtcagcgacaagcgggatattagccggttcctggagagcaaccccgtgatgatcgatgccaaggaagtgagcgccgcccaccgggccagatacttctggggcaatctgcctggcatgaacagacccctggccagcaccgtgaacgacaagctggagctgcaggagtgcctggagcacggccggatcgccaagttcagcaaggtgagaaccatcaccacccgaagcaacagcatcaaacaaggcaaggaccagcactttcctgtgttcatgaacgagaaggaggacatcctgtggtgtaccgagatggagagagtgttcgggttcccagtccactacacagatgtcagcaacatgtctagactggccagacagagactgctgggaagaagctggtccgtccctgtgatcagacacctgttcgcccctctgaaggagtacttcgcctgcgtgagcagcggcaacagcaacgccaacagccggggccccagcttctctagcggcctggtgccactgtccctgagagggagccacatgggccccatggagatctacaaaaccgtgagcgcctggaagcggcagcctgtgcgcgtgctgagcctgtttcggaatatcgataaagtcctgaaaagcctgggattcctggagagcggctctggctccggcggtggcaccctgaagtacgtggaggatgtgacaaacgtggtcagacgggatgtggagaagtggggccccttcgatctggtgtacggcagcacccaacccctgggcagctcttgtgaccggtgccctggctggtacatgtttcagttccaccggatcctgcagtacgccctgccgagacaggagtcccagcggccattcttttggattttcatggacaacttgctgctgaccgaggatgaccaggaaactaccactcggttcctgcagaccgaagccgtgaccctgcaggacgtgagaggccgggactaccagaacgccatgcgggtgtggtccaacatccctggactgaaaagcaagcacgcacctctgacccctaaagaagaggagtacctgcaggcccaggtgcggagcagaagcaagctggacgcccctaaggtggatctgctggtgaagaattgcctcctgcccctgagagagtacttcaagtatttcagccagaatagtctgcccctgggcggcccaagcagcggcgcccctcctcccagcggcggcagcccagccggctccccaacctctaccgaggagggcacctctgagtccgccacccccgagagcggccctggcacctccaccgagcccagcgagggcagcgcacccggcagccctgccggcagccccacctccacagaggagggaaccagcaccgagcccagcgaaggcagcgccccaggcaccagcaccgagcctagtgagggcggctctggcggcggcagcgcccaggagattaaacggatcaacaagatcagaagaagacttgtgaaagacagcaacaccaagaaggccggcaagacaggccccatgaaaaccctgctggttagagtgatgacacccgatctgagagagcggctggaaaacctgagaaagaagcctgaaaatatcccccagcccatcagcaatacatctagagccaacctgaataagctgctgaccgattacaccgaaatgaagaaggcgatcctgcatgtgtactgggaagagttccagaaggaccctgtgggcctgatgagccgggtggcccagcctgccagcaagaagatcgatcagaacaagctgaaacctgagatggacgagaagggcaacctgaccaccgccggctttgcctgctctcagtgtggccagcccctgttcgtgtacaagctggagcaggtgtctgagaagggcaaggcttacaccaactacttcggacggtgcaatgtggccgagcacgaaaagctgatcctgctggcccagctgaagcccgagaaggatagcgacgaagccgtgacatatagcctgggaaagtttgggcagagggccctggatttctacagcattcatgtgaccaaggagtccacccaccccgtgaagcccctggcccagatcgccggaaacagatacgcctccggacctgtgggaaaggccctgagcgacgcatgtatgggcacaatcgcctccttcctgtctaagtaccaggacatcatcatcgaacaccagaaggtggtgaagggcaaccagaagagactggagagcctgcgggagctggccggcaaggaaaacctggaataccctagcgtgaccctgccacctcagcctcacaccaaggagggcgttgatgcctacaacgaagtgatcgcccgggtgcgaatgtgggtgaacctgaacctgtggcagaagctgaagctaagcagagatgatgccaagcctctgctgagactgaagggattcccttcctttcctctggtcgagagacaggccaacgaagtggactggtgggacatggtgtgtaacgtgaagaagctgatcaacgagaaaaaggaggatggcaaggtgttttggcagaatctggctggctacaagagacaggaagccctgagaccatacctgagcagcgaggaagatcggaagaagggaaagaaattcgctcggtaccagctgggcgacctgctgctgcacctggaaaagaagcacggcgaggactggggaaaggtgtacgacgaggcctgggagcggattgacaagaaagtggaaggcctgagcaagcacatcaagctggaagaggaacggagaagcgaggacgcccagagcaaggccgccctgaccgactggctgcgggctaaggccagcttcgtgatcgagggcctgaaggaggccgacaaggacgagttctgcagatgcgagctgaagctgcagaagtggtacggggacctgcggggaaagcccttcgccatcgaagccgagaacagcatcctggacatcagcggcttcagcaagcagtacaactgtgccttcatctggcagaaggacggcgtgaagaagctgaacctgtacctgatcatcaactacttcaagggcggcaagctgcggttcaagaagatcaaacctgaagccttcgaagccaacagattctacaccgtgatcaacaaaaagagcggcgagatcgtgcccatggaggtgaacttcaacttcgacgaccccaacctgatcatcctgcctctggcctttggcaagagacagggcagagaattcatctggaacgacctgctgtccctggaaaccggcagcctgaagctggccaacggaagagtgatcgagaagacactgtacaacagaagaacccggcaggatgagcctgccctgttcgtggccctgaccttcgagcggcgggaggtcctggactcctccaatatcaaaccaatgaacctgatcggcgtggcaagaggcgaaaacatccccgccgtgatcgccctgaccgaccccgagggctgcccactgagccggtttaaggatagcctgggaaacccaacccacatcctgagaatcggcgagagctataaggagaagcagcggaccatccaggccaagaaggaggtggagcagcggagagccggcggctacagccggaagtacgccagcaaagccaagaatctggcagacgatatggtgagaaacaccgctagagatctgctgtactacgccgtgacccaggatgccatgctgatcttcgccaacctgagccggggcttcggccggcagggcaagcggaccttcatggccgagagacagtacacacggatggaggactggctgaccgccaagctggcctacgagggcctgagcaagacctacctgtccaagacactggcccagtacacctccaagacatgcagcaactgtgggtttaccatcaccagcgccgactacgacagggtgctggagaagctgaagaagacagcaacaggctggatgaccacaattaacggcaaggagctgaaggtggagggccagattacctactacaacagatacaagagacagaacgtagtcaaggacctgtccgtcgagctggatagactgagcgaagaatctgtgaacaacgacatctcctcctggacaaagggcagaagcggagaagctctgagcctcctgaagaaaagattctcccatagacccgtgcaggagaagttcgtgtgcctgaactgcggcttcgagacacacgcagccgagcaagccgccctgaacatcgccagatcctggctgttcctgcggagccaggagtacaagaaataccagacaaacaagacaaccggcaacaccgataagagagccttcgtcgagacctggcagtccttttaccggaagaagcttaaggaggtgtggaaacctgccgtgcggtctggcggatctggcggaggctccacaagccagccccaggaggccgtgaccttcaaggacgtggaggtgaccttcagccaggacgagtggggctggctggacgccagccagaggaacctgtacagggacgtgatgctggagaactacggcaacgtggccagcctggtgggccccttcaccaagcccgccctgatcagctggctggaggccagggagccctggggcctgaacgtgcagggcgcccaccccaagggcagccccagcgccgcccccaccagccccaagaaaaagagaaaagtctaagctgccttctgcggggcttgccttctggccatgcccttcttctctcccttgcacctgtacctcttggtctttgaataaagcctgagtaggaaggctagcaaaaaaaaaaaaaaaaaaaaaaaaaaaaaaaaaaaaaaaaaaaaaaaaaaaaaaaaaaaaaaaaaaaaaaaaaaaaaaaa

SEQ ID NO: 2641 - RNA, 5419 nt, synthetic construct
  source 1..5419: mol_type = other RNA
aggaaataagagagaaaagaagagtaagaagaaatataagagccaccatggcccctaagaagaagcgtaaagtgagccgggtgaacggcagcggcagcggcggcggcatgaaccacgaccaggagttcgacccccctaaggtgtaccctcccgtccccgccgagaagagaaagcccatccgggtcctgagcctgttcgatggcatcgccaccggtctgctggtgctgaaggacctgggcatccaggtggataggtacattgcctccgaggtgtgcgaggactccatcaccgtgggaatggtgcgtcatcagggcaagatcatgtacgtgggcgacgtgcggagcgtgacacagaagcatatccaggagtggggccctttcgacctggtgatcggcggcagcccttgcaatgacctgagcatcgtgaacccagcccggaagggcctgtacgagggaaccggcagactgttcttcgagttttacagactgctgcacgacgcccggcctaaggaaggcgacgaccggcccttcttttggctgttcgagaatgtggtggccatgggagtcagcgacaagcgggatattagccggttcctggagagcaaccccgtgatgatcgatgccaaggaagtgagcgccgcccaccgggccagatacttctggggcaatctgcctggcatgaacagacccctggccagcaccgtgaacgacaagctggagctgcaggagtgcctggagcacggccggatcgccaagttcagcaaggtgagaaccatcaccacccgaagcaacagcatcaaacaaggcaaggaccagcactttcctgtgttcatgaacgagaaggaggacatcctgtggtgtaccgagatggagagagtgttcgggttcccagtccactacacagatgtcagcaacatgtctagactggccagacagagactgctgggaagaagctggtccgtccctgtgatcagacacctgttcgcccctctgaaggagtacttcgcctgcgtgagcagcggcaacagcaacgccaacagccggggccccagcttctctagcggcctggtgccactgtccctgagagggagccacatgggccccatggagatctacaaaaccgtgagcgcctggaagcggcagcctgtgcgcgtgctgagcctgtttcggaatatcgataaagtcctgaaaagcctgggattcctggagagcggctctggctccggcggtggcaccctgaagtacgtggaggatgtgacaaacgtggtcagacgggatgtggagaagtggggccccttcgatctggtgtacggcagcacccaacccctgggcagctcttgtgaccggtgccctggctggtacatgtttcagttccaccggatcctgcagtacgccctgccgagacaggagtcccagcggccattcttttggattttcatggacaacttgctgctgaccgaggatgaccaggaaactaccactcggttcctgcagaccgaagccgtgaccctgcaggacgtgagaggccgggactaccagaacgccatgcgggtgtggtccaacatccctggactgaaaagcaagcacgcacctctgacccctaaagaagaggagtacctgcaggcccaggtgcggagcagaagcaagctggacgcccctaaggtggatctgctggtgaagaattgcctcctgcccctgagagagtacttcaagtatttcagccagaatagtctgcccctgggcggcccaagcagcggcgcccctcctcccagcggcggcagcccagccggctccccaacctctaccgaggagggcacctctgagtccgccacccccgagagcggccctggcacctccaccgagcccagcgagggcagcgcacccggcagccctgccggcagccccacctccacagaggagggaaccagcaccgagcccagcgaaggcagcgccccaggcaccagcaccgagcctagtgagggcggctctggcggcggcagcgcccaggagattaaacggatcaacaagatcagaagaagacttgtgaaagacagcaacaccaagaaggccggcaagacaggccccatgaaaaccctgctggttagagtgatgacacccgatctgagagagcggctggaaaacctgagaaagaagcctgaaaatatcccccagcccatcagcaatacatctagagccaacctgaataagctgctgaccgattacaccgaaatgaagaaggcgatcctgcatgtgtactgggaagagttccagaaggaccctgtgggcctgatgagccgggtggcccagcctgccagcaagaagatcgatcagaacaagctgaaacctgagatggacgagaagggcaacctgaccaccgccggctttgcctgctctcagtgtggccagcccctgttcgtgtacaagctggagcaggtgtctgagaagggcaaggcttacaccaactacttcggacggtgcaatgtggccgagcacgaaaagctgatcctgctggcccagctgaagcccgagaaggatagcgacgaagccgtgacatatagcctgggaaagtttgggcagagggccctggatttctacagcattcatgtgaccaaggagtccacccaccccgtgaagcccctggcccagatcgccggaaacagatacgcctccggacctgtgggaaaggccctgagcgacgcatgtatgggcacaatcgcctccttcctgtctaagtaccaggacatcatcatcgaacaccagaaggtggtgaagggcaaccagaagagactggagagcctgcgggagctggccggcaaggaaaacctggaataccctagcgtgaccctgccacctcagcctcacaccaaggagggcgttgatgcctacaacgaagtgatcgcccgggtgcgaatgtgggtgaacctgaacctgtggcagaagctgaagctaagcagagatgatgccaagcctctgctgagactgaagggattcccttcctttcctctggtcgagagacaggccaacgaagtggactggtgggacatggtgtgtaacgtgaagaagctgatcaacgagaaaaaggaggatggcaaggtgttttggcagaatctggctggctacaagagacaggaagccctgagaccatacctgagcagcgaggaagatcggaagaagggaaagaaattcgctcggtaccagctgggcgacctgctgctgcacctggaaaagaagcacggcgaggactggggaaaggtgtacgacgaggcctgggagcggattgacaagaaagtggaaggcctgagcaagcacatcaagctggaagaggaacggagaagcgaggacgcccagagcaaggccgccctgaccgactggctgcgggctaaggccagcttcgtgatcgagggcctgaaggaggccgacaaggacgagttctgcagatgcgagctgaagctgcagaagtggtacggggacctgcggggaaagcccttcgccatcgaagccgagaacagcatcctggacatcagcggcttcagcaagcagtacaactgtgccttcatctggcagaaggacggcgtgaagaagctgaacctgtacctgatcatcaactacttcaagggcggcaagctgcggttcaagaagatcaaacctgaagccttcgaagccaacagattctacaccgtgatcaacaaaaagagcggcgagatcgtgcccatggaggtgaacttcaacttcgacgaccccaacctgatcatcctgcctctggcctttggcaagagacagggcagagaattcatctggaacgacctgctgtccctggaaaccggcagcctgaagctggccaacggaagagtgatcgagaagacactgtacaacagaagaacccggcaggatgagcctgccctgttcgtggccctgaccttcgagcggcgggaggtcctggactcctccaatatcaaaccaatgaacctgatcggcgtggcaagaggcgaaaacatccccgccgtgatcgccctgaccgaccccgagggctgcccactgagccggtttaaggatagcctgggaaacccaacccacatcctgagaatcggcgagagctataaggagaagcagcggaccatccaggccaagaaggaggtggagcagcggagagccggcggctacagccggaagtacgccagcaaagccaagaatctggcagacgatatggtgagaaacaccgctagagatctgctgtactacgccgtgacccaggatgccatgctgatcttcgccaacctgagccggggcttcggccggcagggcaagcggaccttcatggccgagagacagtacacacggatggaggactggctgaccgccaagctggcctacgagggcctgagcaagacctacctgtccaagacactggcccagtacacctccaagacatgcagcaactgtgggtttaccatcaccagcgccgactacgacagggtgctggagaagctgaagaagacagcaacaggctggatgaccacaattaacggcaaggagctgaaggtggagggccagattacctactacaacagatacaagagacagaacgtagtcaaggacctgtccgtcgagctggatagactgagcgaagaatctgtgaacaacgacatctcctcctggacaaagggcagaagcggagaagctctgagcctcctgaagaaaagattctcccatagacccgtgcaggagaagttcgtgtgcctgaactgcggcttcgagacacacgcagccgagcaagccgccctgaacatcgccagatcctggctgttcctgcggagccaggagtacaagaaataccagacaaacaagacaaccggcaacaccgataagagagccttcgtcgagacctggcagtccttttaccggaagaagcttaaggaggtgtggaaacctgccgtgcggtctggcggatctggcggaggctccacaagcgcccacggcagcgtgatgttcagcgacgtgagcatcgacttcagccaggaggagtgggactacctggacctggagcagagggacctgtacagggacgtgatgctggagaactacagcaacctggtgagcctgggctgcttcgtgagcaagcccgacgtgatcttcctgctggagcagggcaaggagccctggaaggtggtgaggaagggcaggaggaggtaccccgacctggagaccaactacaccagccccaagaaaaagagaaaagtctaagctgccttctgcggggcttgccttctggccatgcccttcttctctcccttgcacctgtacctcttggtctttgaataaagcctgagtaggaaggctagcaaaaaaaaaaaaaaaaaaaaaaaaaaaaaaaaaaaaaaaaaaaaaaaaaaaaaaaaaaaaaaaaaaaaaaaaaaaaaaaa

SEQ ID NO: 2642 - RNA, 5419 nt, synthetic construct
  source 1..5419: mol_type = other RNA
aggaaataagagagaaaagaagagtaagaagaaatataagagccaccatggcccctaagaagaagcgtaaagtgagccgggtgaacggcagcggcagcggcggcggcatgaaccacgaccaggagttcgacccccctaaggtgtaccctcccgtccccgccgagaagagaaagcccatccgggtcctgagcctgttcgatggcatcgccaccggtctgctggtgctgaaggacctgggcatccaggtggataggtacattgcctccgaggtgtgcgaggactccatcaccgtgggaatggtgcgtcatcagggcaagatcatgtacgtgggcgacgtgcggagcgtgacacagaagcatatccaggagtggggccctttcgacctggtgatcggcggcagcccttgcaatgacctgagcatcgtgaacccagcccggaagggcctgtacgagggaaccggcagactgttcttcgagttttacagactgctgcacgacgcccggcctaaggaaggcgacgaccggcccttcttttggctgttcgagaatgtggtggccatgggagtcagcgacaagcgggatattagccggttcctggagagcaaccccgtgatgatcgatgccaaggaagtgagcgccgcccaccgggccagatacttctggggcaatctgcctggcatgaacagacccctggccagcaccgtgaacgacaagctggagctgcaggagtgcctggagcacggccggatcgccaagttcagcaaggtgagaaccatcaccacccgaagcaacagcatcaaacaaggcaaggaccagcactttcctgtgttcatgaacgagaaggaggacatcctgtggtgtaccgagatggagagagtgttcgggttcccagtccactacacagatgtcagcaacatgtctagactggccagacagagactgctgggaagaagctggtccgtccctgtgatcagacacctgttcgcccctctgaaggagtacttcgcctgcgtgagcagcggcaacagcaacgccaacagccggggccccagcttctctagcggcctggtgccactgtccctgagagggagccacatgggccccatggagatctacaaaaccgtgagcgcctggaagcggcagcctgtgcgcgtgctgagcctgtttcggaatatcgataaagtcctgaaaagcctgggattcctggagagcggctctggctccggcggtggcaccctgaagtacgtggaggatgtgacaaacgtggtcagacgggatgtggagaagtggggccccttcgatctggtgtacggcagcacccaacccctgggcagctcttgtgaccggtgccctggctggtacatgtttcagttccaccggatcctgcagtacgccctgccgagacaggagtcccagcggccattcttttggattttcatggacaacttgctgctgaccgaggatgaccaggaaactaccactcggttcctgcagaccgaagccgtgaccctgcaggacgtgagaggccgggactaccagaacgccatgcgggtgtggtccaacatccctggactgaaaagcaagcacgcacctctgacccctaaagaagaggagtacctgcaggcccaggtgcggagcagaagcaagctggacgcccctaaggtggatctgctggtgaagaattgcctcctgcccctgagagagtacttcaagtatttcagccagaatagtctgcccctgggcggcccaagcagcggcgcccctcctcccagcggcggcagcccagccggctccccaacctctaccgaggagggcacctctgagtccgccacccccgagagcggccctggcacctccaccgagcccagcgagggcagcgcacccggcagccctgccggcagccccacctccacagaggagggaaccagcaccgagcccagcgaaggcagcgccccaggcaccagcaccgagcctagtgagggcggctctggcggcggcagcgcccaggagattaaacggatcaacaagatcagaagaagacttgtgaaagacagcaacaccaagaaggccggcaagacaggccccatgaaaaccctgctggttagagtgatgacacccgatctgagagagcggctggaaaacctgagaaagaagcctgaaaatatcccccagcccatcagcaatacatctagagccaacctgaataagctgctgaccgattacaccgaaatgaagaaggcgatcctgcatgtgtactgggaagagttccagaaggaccctgtgggcctgatgagccgggtggcccagcctgccagcaagaagatcgatcagaacaagctgaaacctgagatggacgagaagggcaacctgaccaccgccggctttgcctgctctcagtgtggccagcccctgttcgtgtacaagctggagcaggtgtctgagaagggcaaggcttacaccaactacttcggacggtgcaatgtggccgagcacgaaaagctgatcctgctggcccagctgaagcccgagaaggatagcgacgaagccgtgacatatagcctgggaaagtttgggcagagggccctggatttctacagcattcatgtgaccaaggagtccacccaccccgtgaagcccctggcccagatcgccggaaacagatacgcctccggacctgtgggaaaggccctgagcgacgcatgtatgggcacaatcgcctccttcctgtctaagtaccaggacatcatcatcgaacaccagaaggtggtgaagggcaaccagaagagactggagagcctgcgggagctggccggcaaggaaaacctggaataccctagcgtgaccctgccacctcagcctcacaccaaggagggcgttgatgcctacaacgaagtgatcgcccgggtgcgaatgtgggtgaacctgaacctgtggcagaagctgaagctaagcagagatgatgccaagcctctgctgagactgaagggattcccttcctttcctctggtcgagagacaggccaacgaagtggactggtgggacatggtgtgtaacgtgaagaagctgatcaacgagaaaaaggaggatggcaaggtgttttggcagaatctggctggctacaagagacaggaagccctgagaccatacctgagcagcgaggaagatcggaagaagggaaagaaattcgctcggtaccagctgggcgacctgctgctgcacctggaaaagaagcacggcgaggactggggaaaggtgtacgacgaggcctgggagcggattgacaagaaagtggaaggcctgagcaagcacatcaagctggaagaggaacggagaagcgaggacgcccagagcaaggccgccctgaccgactggctgcgggctaaggccagcttcgtgatcgagggcctgaaggaggccgacaaggacgagttctgcagatgcgagctgaagctgcagaagtggtacggggacctgcggggaaagcccttcgccatcgaagccgagaacagcatcctggacatcagcggcttcagcaagcagtacaactgtgccttcatctggcagaaggacggcgtgaagaagctgaacctgtacctgatcatcaactacttcaagggcggcaagctgcggttcaagaagatcaaacctgaagccttcgaagccaacagattctacaccgtgatcaacaaaaagagcggcgagatcgtgcccatggaggtgaacttcaacttcgacgaccccaacctgatcatcctgcctctggcctttggcaagagacagggcagagaattcatctggaacgacctgctgtccctggaaaccggcagcctgaagctggccaacggaagagtgatcgagaagacactgtacaacagaagaacccggcaggatgagcctgccctgttcgtggccctgaccttcgagcggcgggaggtcctggactcctccaatatcaaaccaatgaacctgatcggcgtggcaagaggcgaaaacatccccgccgtgatcgccctgaccgaccccgagggctgcccactgagccggtttaaggatagcctgggaaacccaacccacatcctgagaatcggcgagagctataaggagaagcagcggaccatccaggccaagaaggaggtggagcagcggagagccggcggctacagccggaagtacgccagcaaagccaagaatctggcagacgatatggtgagaaacaccgctagagatctgctgtactacgccgtgacccaggatgccatgctgatcttcgccaacctgagccggggcttcggccggcagggcaagcggaccttcatggccgagagacagtacacacggatggaggactggctgaccgccaagctggcctacgagggcctgagcaagacctacctgtccaagacactggcccagtacacctccaagacatgcagcaactgtgggtttaccatcaccagcgccgactacgacagggtgctggagaagctgaagaagacagcaacaggctggatgaccacaattaacggcaaggagctgaaggtggagggccagattacctactacaacagatacaagagacagaacgtagtcaaggacctgtccgtcgagctggatagactgagcgaagaatctgtgaacaacgacatctcctcctggacaaagggcagaagcggagaagctctgagcctcctgaagaaaagattctcccatagacccgtgcaggagaagttcgtgtgcctgaactgcggcttcgagacacacgcagccgagcaagccgccctgaacatcgccagatcctggctgttcctgcggagccaggagtacaagaaataccagacaaacaagacaaccggcaacaccgataagagagccttcgtcgagacctggcagtccttttaccggaagaagcttaaggaggtgtggaaacctgccgtgcggtctggcggatctggcggaggctccacaagcgtgcaggagcccgtgaccttcaaggacgtggccgtggacttcacccaggaggagtggggccagctggacctggtgcagaggaccctgtacagggacgtgatgctggagacctacggccacctgctgagcgtgggcaaccagatcgccaagcccgaggtgatcagcctgctggagcagggcgaggagccctggagcctggagcagacctgcccccagagggcctgccccgagtggatgaggaacaccagccccaagaaaaagagaaaagtctaagctgccttctgcggggcttgccttctggccatgcccttcttctctcccttgcacctgtacctcttggtctttgaataaagcctgagtaggaaggctagcaaaaaaaaaaaaaaaaaaaaaaaaaaaaaaaaaaaaaaaaaaaaaaaaaaaaaaaaaaaaaaaaaaaaaaaaaaaaaaaa

SEQ ID NO: 2643 - RNA, 5419 nt, synthetic construct
  source 1..5419: mol_type = other RNA
aggaaataagagagaaaagaagagtaagaagaaatataagagccaccatggcccctaagaagaagcgtaaagtgagccgggtgaacggcagcggcagcggcggcggcatgaaccacgaccaggagttcgacccccctaaggtgtaccctcccgtccccgccgagaagagaaagcccatccgggtcctgagcctgttcgatggcatcgccaccggtctgctggtgctgaaggacctgggcatccaggtggataggtacattgcctccgaggtgtgcgaggactccatcaccgtgggaatggtgcgtcatcagggcaagatcatgtacgtgggcgacgtgcggagcgtgacacagaagcatatccaggagtggggccctttcgacctggtgatcggcggcagcccttgcaatgacctgagcatcgtgaacccagcccggaagggcctgtacgagggaaccggcagactgttcttcgagttttacagactgctgcacgacgcccggcctaaggaaggcgacgaccggcccttcttttggctgttcgagaatgtggtggccatgggagtcagcgacaagcgggatattagccggttcctggagagcaaccccgtgatgatcgatgccaaggaagtgagcgccgcccaccgggccagatacttctggggcaatctgcctggcatgaacagacccctggccagcaccgtgaacgacaagctggagctgcaggagtgcctggagcacggccggatcgccaagttcagcaaggtgagaaccatcaccacccgaagcaacagcatcaaacaaggcaaggaccagcactttcctgtgttcatgaacgagaaggaggacatcctgtggtgtaccgagatggagagagtgttcgggttcccagtccactacacagatgtcagcaacatgtctagactggccagacagagactgctgggaagaagctggtccgtccctgtgatcagacacctgttcgcccctctgaaggagtacttcgcctgcgtgagcagcggcaacagcaacgccaacagccggggccccagcttctctagcggcctggtgccactgtccctgagagggagccacatgggccccatggagatctacaaaaccgtgagcgcctggaagcggcagcctgtgcgcgtgctgagcctgtttcggaatatcgataaagtcctgaaaagcctgggattcctggagagcggctctggctccggcggtggcaccctgaagtacgtggaggatgtgacaaacgtggtcagacgggatgtggagaagtggggccccttcgatctggtgtacggcagcacccaacccctgggcagctcttgtgaccggtgccctggctggtacatgtttcagttccaccggatcctgcagtacgccctgccgagacaggagtcccagcggccattcttttggattttcatggacaacttgctgctgaccgaggatgaccaggaaactaccactcggttcctgcagaccgaagccgtgaccctgcaggacgtgagaggccgggactaccagaacgccatgcgggtgtggtccaacatccctggactgaaaagcaagcacgcacctctgacccctaaagaagaggagtacctgcaggcccaggtgcggagcagaagcaagctggacgcccctaaggtggatctgctggtgaagaattgcctcctgcccctgagagagtacttcaagtatttcagccagaatagtctgcccctgggcggcccaagcagcggcgcccctcctcccagcggcggcagcccagccggctccccaacctctaccgaggagggcacctctgagtccgccacccccgagagcggccctggcacctccaccgagcccagcgagggcagcgcacccggcagccctgccggcagccccacctccacagaggagggaaccagcaccgagcccagcgaaggcagcgccccaggcaccagcaccgagcctagtgagggcggctctggcggcggcagcgcccaggagattaaacggatcaacaagatcagaagaagacttgtgaaagacagcaacaccaagaaggccggcaagacaggccccatgaaaaccctgctggttagagtgatgacacccgatctgagagagcggctggaaaacctgagaaagaagcctgaaaatatcccccagcccatcagcaatacatctagagccaacctgaataagctgctgaccgattacaccgaaatgaagaaggcgatcctgcatgtgtactgggaagagttccagaaggaccctgtgggcctgatgagccgggtggcccagcctgccagcaagaagatcgatcagaacaagctgaaacctgagatggacgagaagggcaacctgaccaccgccggctttgcctgctctcagtgtggccagcccctgttcgtgtacaagctggagcaggtgtctgagaagggcaaggcttacaccaactacttcggacggtgcaatgtggccgagcacgaaaagctgatcctgctggcccagctgaagcccgagaaggatagcgacgaagccgtgacatatagcctgggaaagtttgggcagagggccctggatttctacagcattcatgtgaccaaggagtccacccaccccgtgaagcccctggcccagatcgccggaaacagatacgcctccggacctgtgggaaaggccctgagcgacgcatgtatgggcacaatcgcctccttcctgtctaagtaccaggacatcatcatcgaacaccagaaggtggtgaagggcaaccagaagagactggagagcctgcgggagctggccggcaaggaaaacctggaataccctagcgtgaccctgccacctcagcctcacaccaaggagggcgttgatgcctacaacgaagtgatcgcccgggtgcgaatgtgggtgaacctgaacctgtggcagaagctgaagctaagcagagatgatgccaagcctctgctgagactgaagggattcccttcctttcctctggtcgagagacaggccaacgaagtggactggtgggacatggtgtgtaacgtgaagaagctgatcaacgagaaaaaggaggatggcaaggtgttttggcagaatctggctggctacaagagacaggaagccctgagaccatacctgagcagcgaggaagatcggaagaagggaaagaaattcgctcggtaccagctgggcgacctgctgctgcacctggaaaagaagcacggcgaggactggggaaaggtgtacgacgaggcctgggagcggattgacaagaaagtggaaggcctgagcaagcacatcaagctggaagaggaacggagaagcgaggacgcccagagcaaggccgccctgaccgactggctgcgggctaaggccagcttcgtgatcgagggcctgaaggaggccgacaaggacgagttctgcagatgcgagctgaagctgcagaagtggtacggggacctgcggggaaagcccttcgccatcgaagccgagaacagcatcctggacatcagcggcttcagcaagcagtacaactgtgccttcatctggcagaaggacggcgtgaagaagctgaacctgtacctgatcatcaactacttcaagggcggcaagctgcggttcaagaagatcaaacctgaagccttcgaagccaacagattctacaccgtgatcaacaaaaagagcggcgagatcgtgcccatggaggtgaacttcaacttcgacgaccccaacctgatcatcctgcctctggcctttggcaagagacagggcagagaattcatctggaacgacctgctgtccctggaaaccggcagcctgaagctggccaacggaagagtgatcgagaagacactgtacaacagaagaacccggcaggatgagcctgccctgttcgtggccctgaccttcgagcggcgggaggtcctggactcctccaatatcaaaccaatgaacctgatcggcgtggcaagaggcgaaaacatccccgccgtgatcgccctgaccgaccccgagggctgcccactgagccggtttaaggatagcctgggaaacccaacccacatcctgagaatcggcgagagctataaggagaagcagcggaccatccaggccaagaaggaggtggagcagcggagagccggcggctacagccggaagtacgccagcaaagccaagaatctggcagacgatatggtgagaaacaccgctagagatctgctgtactacgccgtgacccaggatgccatgctgatcttcgccaacctgagccggggcttcggccggcagggcaagcggaccttcatggccgagagacagtacacacggatggaggactggctgaccgccaagctggcctacgagggcctgagcaagacctacctgtccaagacactggcccagtacacctccaagacatgcagcaactgtgggtttaccatcaccagcgccgactacgacagggtgctggagaagctgaagaagacagcaacaggctggatgaccacaattaacggcaaggagctgaaggtggagggccagattacctactacaacagatacaagagacagaacgtagtcaaggacctgtccgtcgagctggatagactgagcgaagaatctgtgaacaacgacatctcctcctggacaaagggcagaagcggagaagctctgagcctcctgaagaaaagattctcccatagacccgtgcaggagaagttcgtgtgcctgaactgcggcttcgagacacacgcagccgagcaagccgccctgaacatcgccagatcctggctgttcctgcggagccaggagtacaagaaataccagacaaacaagacaaccggcaacaccgataagagagccttcgtcgagacctggcagtccttttaccggaagaagcttaaggaggtgtggaaacctgccgtgcggtctggcggatctggcggaggctccacaagcttccaggagcccgtgaccttcgaggacgtggccgtgtacttcacccagaacgagtgggccagcctgcaccccatgcagagggccctgtacagggaggtgatgctggagaactacgccaacgtgaccagcctgagcgccttccccttcagcaagcccgacctgatcttccagctggagcagggcgaggccgcctggggccccgacccctggaccctggccggcggcgaggccctgaggggcatgaccagccccaagaaaaagagaaaagtctaagctgccttctgcggggcttgccttctggccatgcccttcttctctcccttgcacctgtacctcttggtctttgaataaagcctgagtaggaaggctagcaaaaaaaaaaaaaaaaaaaaaaaaaaaaaaaaaaaaaaaaaaaaaaaaaaaaaaaaaaaaaaaaaaaaaaaaaaaaaaaa

SEQ ID NO: 2644 - RNA, 5419 nt, synthetic construct
  source 1..5419: mol_type = other RNA
aggaaataagagagaaaagaagagtaagaagaaatataagagccaccatggcccctaagaagaagcgtaaagtgagccgggtgaacggcagcggcagcggcggcggcatgaaccacgaccaggagttcgacccccctaaggtgtaccctcccgtccccgccgagaagagaaagcccatccgggtcctgagcctgttcgatggcatcgccaccggtctgctggtgctgaaggacctgggcatccaggtggataggtacattgcctccgaggtgtgcgaggactccatcaccgtgggaatggtgcgtcatcagggcaagatcatgtacgtgggcgacgtgcggagcgtgacacagaagcatatccaggagtggggccctttcgacctggtgatcggcggcagcccttgcaatgacctgagcatcgtgaacccagcccggaagggcctgtacgagggaaccggcagactgttcttcgagttttacagactgctgcacgacgcccggcctaaggaaggcgacgaccggcccttcttttggctgttcgagaatgtggtggccatgggagtcagcgacaagcgggatattagccggttcctggagagcaaccccgtgatgatcgatgccaaggaagtgagcgccgcccaccgggccagatacttctggggcaatctgcctggcatgaacagacccctggccagcaccgtgaacgacaagctggagctgcaggagtgcctggagcacggccggatcgccaagttcagcaaggtgagaaccatcaccacccgaagcaacagcatcaaacaaggcaaggaccagcactttcctgtgttcatgaacgagaaggaggacatcctgtggtgtaccgagatggagagagtgttcgggttcccagtccactacacagatgtcagcaacatgtctagactggccagacagagactgctgggaagaagctggtccgtccctgtgatcagacacctgttcgcccctctgaaggagtacttcgcctgcgtgagcagcggcaacagcaacgccaacagccggggccccagcttctctagcggcctggtgccactgtccctgagagggagccacatgggccccatggagatctacaaaaccgtgagcgcctggaagcggcagcctgtgcgcgtgctgagcctgtttcggaatatcgataaagtcctgaaaagcctgggattcctggagagcggctctggctccggcggtggcaccctgaagtacgtggaggatgtgacaaacgtggtcagacgggatgtggagaagtggggccccttcgatctggtgtacggcagcacccaacccctgggcagctcttgtgaccggtgccctggctggtacatgtttcagttccaccggatcctgcagtacgccctgccgagacaggagtcccagcggccattcttttggattttcatggacaacttgctgctgaccgaggatgaccaggaaactaccactcggttcctgcagaccgaagccgtgaccctgcaggacgtgagaggccgggactaccagaacgccatgcgggtgtggtccaacatccctggactgaaaagcaagcacgcacctctgacccctaaagaagaggagtacctgcaggcccaggtgcggagcagaagcaagctggacgcccctaaggtggatctgctggtgaagaattgcctcctgcccctgagagagtacttcaagtatttcagccagaatagtctgcccctgggcggcccaagcagcggcgcccctcctcccagcggcggcagcccagccggctccccaacctctaccgaggagggcacctctgagtccgccacccccgagagcggccctggcacctccaccgagcccagcgagggcagcgcacccggcagccctgccggcagccccacctccacagaggagggaaccagcaccgagcccagcgaaggcagcgccccaggcaccagcaccgagcctagtgagggcggctctggcggcggcagcgcccaggagattaaacggatcaacaagatcagaagaagacttgtgaaagacagcaacaccaagaaggccggcaagacaggccccatgaaaaccctgctggttagagtgatgacacccgatctgagagagcggctggaaaacctgagaaagaagcctgaaaatatcccccagcccatcagcaatacatctagagccaacctgaataagctgctgaccgattacaccgaaatgaagaaggcgatcctgcatgtgtactgggaagagttccagaaggaccctgtgggcctgatgagccgggtggcccagcctgccagcaagaagatcgatcagaacaagctgaaacctgagatggacgagaagggcaacctgaccaccgccggctttgcctgctctcagtgtggccagcccctgttcgtgtacaagctggagcaggtgtctgagaagggcaaggcttacaccaactacttcggacggtgcaatgtggccgagcacgaaaagctgatcctgctggcccagctgaagcccgagaaggatagcgacgaagccgtgacatatagcctgggaaagtttgggcagagggccctggatttctacagcattcatgtgaccaaggagtccacccaccccgtgaagcccctggcccagatcgccggaaacagatacgcctccggacctgtgggaaaggccctgagcgacgcatgtatgggcacaatcgcctccttcctgtctaagtaccaggacatcatcatcgaacaccagaaggtggtgaagggcaaccagaagagactggagagcctgcgggagctggccggcaaggaaaacctggaataccctagcgtgaccctgccacctcagcctcacaccaaggagggcgttgatgcctacaacgaagtgatcgcccgggtgcgaatgtgggtgaacctgaacctgtggcagaagctgaagctaagcagagatgatgccaagcctctgctgagactgaagggattcccttcctttcctctggtcgagagacaggccaacgaagtggactggtgggacatggtgtgtaacgtgaagaagctgatcaacgagaaaaaggaggatggcaaggtgttttggcagaatctggctggctacaagagacaggaagccctgagaccatacctgagcagcgaggaagatcggaagaagggaaagaaattcgctcggtaccagctgggcgacctgctgctgcacctggaaaagaagcacggcgaggactggggaaaggtgtacgacgaggcctgggagcggattgacaagaaagtggaaggcctgagcaagcacatcaagctggaagaggaacggagaagcgaggacgcccagagcaaggccgccctgaccgactggctgcgggctaaggccagcttcgtgatcgagggcctgaaggaggccgacaaggacgagttctgcagatgcgagctgaagctgcagaagtggtacggggacctgcggggaaagcccttcgccatcgaagccgagaacagcatcctggacatcagcggcttcagcaagcagtacaactgtgccttcatctggcagaaggacggcgtgaagaagctgaacctgtacctgatcatcaactacttcaagggcggcaagctgcggttcaagaagatcaaacctgaagccttcgaagccaacagattctacaccgtgatcaacaaaaagagcggcgagatcgtgcccatggaggtgaacttcaacttcgacgaccccaacctgatcatcctgcctctggcctttggcaagagacagggcagagaattcatctggaacgacctgctgtccctggaaaccggcagcctgaagctggccaacggaagagtgatcgagaagacactgtacaacagaagaacccggcaggatgagcctgccctgttcgtggccctgaccttcgagcggcgggaggtcctggactcctccaatatcaaaccaatgaacctgatcggcgtggcaagaggcgaaaacatccccgccgtgatcgccctgaccgaccccgagggctgcccactgagccggtttaaggatagcctgggaaacccaacccacatcctgagaatcggcgagagctataaggagaagcagcggaccatccaggccaagaaggaggtggagcagcggagagccggcggctacagccggaagtacgccagcaaagccaagaatctggcagacgatatggtgagaaacaccgctagagatctgctgtactacgccgtgacccaggatgccatgctgatcttcgccaacctgagccggggcttcggccggcagggcaagcggaccttcatggccgagagacagtacacacggatggaggactggctgaccgccaagctggcctacgagggcctgagcaagacctacctgtccaagacactggcccagtacacctccaagacatgcagcaactgtgggtttaccatcaccagcgccgactacgacagggtgctggagaagctgaagaagacagcaacaggctggatgaccacaattaacggcaaggagctgaaggtggagggccagattacctactacaacagatacaagagacagaacgtagtcaaggacctgtccgtcgagctggatagactgagcgaagaatctgtgaacaacgacatctcctcctggacaaagggcagaagcggagaagctctgagcctcctgaagaaaagattctcccatagacccgtgcaggagaagttcgtgtgcctgaactgcggcttcgagacacacgcagccgagcaagccgccctgaacatcgccagatcctggctgttcctgcggagccaggagtacaagaaataccagacaaacaagacaaccggcaacaccgataagagagccttcgtcgagacctggcagtccttttaccggaagaagcttaaggaggtgtggaaacctgccgtgcggtctggcggatctggcggaggctccacaagccagccccagggcaccatgaccttcaaggacgtggaggtgaccttcagccaggacgagtggggcctgctggacgccagccagaggaacctgtacagggacgtgatgctggagaactacggcaacatggccagcgtggtgggccccttcaccaagcccgccctgatcagctggctggaggccagggagccctggggcctgaacgtgcagggcgtgcagctgaagggcaaccccggcgccgcccccaccagccccaagaaaaagagaaaagtctaagctgccttctgcggggcttgccttctggccatgcccttcttctctcccttgcacctgtacctcttggtctttgaataaagcctgagtaggaaggctagcaaaaaaaaaaaaaaaaaaaaaaaaaaaaaaaaaaaaaaaaaaaaaaaaaaaaaaaaaaaaaaaaaaaaaaaaaaaaaaaa

SEQ ID NO: 2645 - RNA, 5419 nt, synthetic construct
  source 1..5419: mol_type = other RNA
aggaaataagagagaaaagaagagtaagaagaaatataagagccaccatggcccctaagaagaagcgtaaagtgagccgggtgaacggcagcggcagcggcggcggcatgaaccacgaccaggagttcgacccccctaaggtgtaccctcccgtccccgccgagaagagaaagcccatccgggtcctgagcctgttcgatggcatcgccaccggtctgctggtgctgaaggacctgggcatccaggtggataggtacattgcctccgaggtgtgcgaggactccatcaccgtgggaatggtgcgtcatcagggcaagatcatgtacgtgggcgacgtgcggagcgtgacacagaagcatatccaggagtggggccctttcgacctggtgatcggcggcagcccttgcaatgacctgagcatcgtgaacccagcccggaagggcctgtacgagggaaccggcagactgttcttcgagttttacagactgctgcacgacgcccggcctaaggaaggcgacgaccggcccttcttttggctgttcgagaatgtggtggccatgggagtcagcgacaagcgggatattagccggttcctggagagcaaccccgtgatgatcgatgccaaggaagtgagcgccgcccaccgggccagatacttctggggcaatctgcctggcatgaacagacccctggccagcaccgtgaacgacaagctggagctgcaggagtgcctggagcacggccggatcgccaagttcagcaaggtgagaaccatcaccacccgaagcaacagcatcaaacaaggcaaggaccagcactttcctgtgttcatgaacgagaaggaggacatcctgtggtgtaccgagatggagagagtgttcgggttcccagtccactacacagatgtcagcaacatgtctagactggccagacagagactgctgggaagaagctggtccgtccctgtgatcagacacctgttcgcccctctgaaggagtacttcgcctgcgtgagcagcggcaacagcaacgccaacagccggggccccagcttctctagcggcctggtgccactgtccctgagagggagccacatgggccccatggagatctacaaaaccgtgagcgcctggaagcggcagcctgtgcgcgtgctgagcctgtttcggaatatcgataaagtcctgaaaagcctgggattcctggagagcggctctggctccggcggtggcaccctgaagtacgtggaggatgtgacaaacgtggtcagacgggatgtggagaagtggggccccttcgatctggtgtacggcagcacccaacccctgggcagctcttgtgaccggtgccctggctggtacatgtttcagttccaccggatcctgcagtacgccctgccgagacaggagtcccagcggccattcttttggattttcatggacaacttgctgctgaccgaggatgaccaggaaactaccactcggttcctgcagaccgaagccgtgaccctgcaggacgtgagaggccgggactaccagaacgccatgcgggtgtggtccaacatccctggactgaaaagcaagcacgcacctctgacccctaaagaagaggagtacctgcaggcccaggtgcggagcagaagcaagctggacgcccctaaggtggatctgctggtgaagaattgcctcctgcccctgagagagtacttcaagtatttcagccagaatagtctgcccctgggcggcccaagcagcggcgcccctcctcccagcggcggcagcccagccggctccccaacctctaccgaggagggcacctctgagtccgccacccccgagagcggccctggcacctccaccgagcccagcgagggcagcgcacccggcagccctgccggcagccccacctccacagaggagggaaccagcaccgagcccagcgaaggcagcgccccaggcaccagcaccgagcctagtgagggcggctctggcggcggcagcgcccaggagattaaacggatcaacaagatcagaagaagacttgtgaaagacagcaacaccaagaaggccggcaagacaggccccatgaaaaccctgctggttagagtgatgacacccgatctgagagagcggctggaaaacctgagaaagaagcctgaaaatatcccccagcccatcagcaatacatctagagccaacctgaataagctgctgaccgattacaccgaaatgaagaaggcgatcctgcatgtgtactgggaagagttccagaaggaccctgtgggcctgatgagccgggtggcccagcctgccagcaagaagatcgatcagaacaagctgaaacctgagatggacgagaagggcaacctgaccaccgccggctttgcctgctctcagtgtggccagcccctgttcgtgtacaagctggagcaggtgtctgagaagggcaaggcttacaccaactacttcggacggtgcaatgtggccgagcacgaaaagctgatcctgctggcccagctgaagcccgagaaggatagcgacgaagccgtgacatatagcctgggaaagtttgggcagagggccctggatttctacagcattcatgtgaccaaggagtccacccaccccgtgaagcccctggcccagatcgccggaaacagatacgcctccggacctgtgggaaaggccctgagcgacgcatgtatgggcacaatcgcctccttcctgtctaagtaccaggacatcatcatcgaacaccagaaggtggtgaagggcaaccagaagagactggagagcctgcgggagctggccggcaaggaaaacctggaataccctagcgtgaccctgccacctcagcctcacaccaaggagggcgttgatgcctacaacgaagtgatcgcccgggtgcgaatgtgggtgaacctgaacctgtggcagaagctgaagctaagcagagatgatgccaagcctctgctgagactgaagggattcccttcctttcctctggtcgagagacaggccaacgaagtggactggtgggacatggtgtgtaacgtgaagaagctgatcaacgagaaaaaggaggatggcaaggtgttttggcagaatctggctggctacaagagacaggaagccctgagaccatacctgagcagcgaggaagatcggaagaagggaaagaaattcgctcggtaccagctgggcgacctgctgctgcacctggaaaagaagcacggcgaggactggggaaaggtgtacgacgaggcctgggagcggattgacaagaaagtggaaggcctgagcaagcacatcaagctggaagaggaacggagaagcgaggacgcccagagcaaggccgccctgaccgactggctgcgggctaaggccagcttcgtgatcgagggcctgaaggaggccgacaaggacgagttctgcagatgcgagctgaagctgcagaagtggtacggggacctgcggggaaagcccttcgccatcgaagccgagaacagcatcctggacatcagcggcttcagcaagcagtacaactgtgccttcatctggcagaaggacggcgtgaagaagctgaacctgtacctgatcatcaactacttcaagggcggcaagctgcggttcaagaagatcaaacctgaagccttcgaagccaacagattctacaccgtgatcaacaaaaagagcggcgagatcgtgcccatggaggtgaacttcaacttcgacgaccccaacctgatcatcctgcctctggcctttggcaagagacagggcagagaattcatctggaacgacctgctgtccctggaaaccggcagcctgaagctggccaacggaagagtgatcgagaagacactgtacaacagaagaacccggcaggatgagcctgccctgttcgtggccctgaccttcgagcggcgggaggtcctggactcctccaatatcaaaccaatgaacctgatcggcgtggcaagaggcgaaaacatccccgccgtgatcgccctgaccgaccccgagggctgcccactgagccggtttaaggatagcctgggaaacccaacccacatcctgagaatcggcgagagctataaggagaagcagcggaccatccaggccaagaaggaggtggagcagcggagagccggcggctacagccggaagtacgccagcaaagccaagaatctggcagacgatatggtgagaaacaccgctagagatctgctgtactacgccgtgacccaggatgccatgctgatcttcgccaacctgagccggggcttcggccggcagggcaagcggaccttcatggccgagagacagtacacacggatggaggactggctgaccgccaagctggcctacgagggcctgagcaagacctacctgtccaagacactggcccagtacacctccaagacatgcagcaactgtgggtttaccatcaccagcgccgactacgacagggtgctggagaagctgaagaagacagcaacaggctggatgaccacaattaacggcaaggagctgaaggtggagggccagattacctactacaacagatacaagagacagaacgtagtcaaggacctgtccgtcgagctggatagactgagcgaagaatctgtgaacaacgacatctcctcctggacaaagggcagaagcggagaagctctgagcctcctgaagaaaagattctcccatagacccgtgcaggagaagttcgtgtgcctgaactgcggcttcgagacacacgcagccgagcaagccgccctgaacatcgccagatcctggctgttcctgcggagccaggagtacaagaaataccagacaaacaagacaaccggcaacaccgataagagagccttcgtcgagacctggcagtccttttaccggaagaagcttaaggaggtgtggaaacctgccgtgcggtctggcggatctggcggaggctccacaagcagccagggcaggctgaggttccaggacgtggccatcgacttcaccctggaggagtgggagtgcctggacctgggccagagggagctgtacagggacgtgatgctggagaactacggcaacctggccagcctgggcctgatcgtgtgcaagcccgacctggtgaccttcctggagaagatgagggacccccaggacgtgaggggcatcgagaccaccgccatccaccccgacctggccagcttcaccagccccaagaaaaagagaaaagtctaagctgccttctgcggggcttgccttctggccatgcccttcttctctcccttgcacctgtacctcttggtctttgaataaagcctgagtaggaaggctagcaaaaaaaaaaaaaaaaaaaaaaaaaaaaaaaaaaaaaaaaaaaaaaaaaaaaaaaaaaaaaaaaaaaaaaaaaaaaaaaa

SEQ ID NO: 2646 - RNA, 5419 nt, synthetic construct
  source 1..5419: mol_type = other RNA
aggaaataagagagaaaagaagagtaagaagaaatataagagccaccatggcccctaagaagaagcgtaaagtgagccgggtgaacggcagcggcagcggcggcggcatgaaccacgaccaggagttcgacccccctaaggtgtaccctcccgtccccgccgagaagagaaagcccatccgggtcctgagcctgttcgatggcatcgccaccggtctgctggtgctgaaggacctgggcatccaggtggataggtacattgcctccgaggtgtgcgaggactccatcaccgtgggaatggtgcgtcatcagggcaagatcatgtacgtgggcgacgtgcggagcgtgacacagaagcatatccaggagtggggccctttcgacctggtgatcggcggcagcccttgcaatgacctgagcatcgtgaacccagcccggaagggcctgtacgagggaaccggcagactgttcttcgagttttacagactgctgcacgacgcccggcctaaggaaggcgacgaccggcccttcttttggctgttcgagaatgtggtggccatgggagtcagcgacaagcgggatattagccggttcctggagagcaaccccgtgatgatcgatgccaaggaagtgagcgccgcccaccgggccagatacttctggggcaatctgcctggcatgaacagacccctggccagcaccgtgaacgacaagctggagctgcaggagtgcctggagcacggccggatcgccaagttcagcaaggtgagaaccatcaccacccgaagcaacagcatcaaacaaggcaaggaccagcactttcctgtgttcatgaacgagaaggaggacatcctgtggtgtaccgagatggagagagtgttcgggttcccagtccactacacagatgtcagcaacatgtctagactggccagacagagactgctgggaagaagctggtccgtccctgtgatcagacacctgttcgcccctctgaaggagtacttcgcctgcgtgagcagcggcaacagcaacgccaacagccggggccccagcttctctagcggcctggtgccactgtccctgagagggagccacatgggccccatggagatctacaaaaccgtgagcgcctggaagcggcagcctgtgcgcgtgctgagcctgtttcggaatatcgataaagtcctgaaaagcctgggattcctggagagcggctctggctccggcggtggcaccctgaagtacgtggaggatgtgacaaacgtggtcagacgggatgtggagaagtggggccccttcgatctggtgtacggcagcacccaacccctgggcagctcttgtgaccggtgccctggctggtacatgtttcagttccaccggatcctgcagtacgccctgccgagacaggagtcccagcggccattcttttggattttcatggacaacttgctgctgaccgaggatgaccaggaaactaccactcggttcctgcagaccgaagccgtgaccctgcaggacgtgagaggccgggactaccagaacgccatgcgggtgtggtccaacatccctggactgaaaagcaagcacgcacctctgacccctaaagaagaggagtacctgcaggcccaggtgcggagcagaagcaagctggacgcccctaaggtggatctgctggtgaagaattgcctcctgcccctgagagagtacttcaagtatttcagccagaatagtctgcccctgggcggcccaagcagcggcgcccctcctcccagcggcggcagcccagccggctccccaacctctaccgaggagggcacctctgagtccgccacccccgagagcggccctggcacctccaccgagcccagcgagggcagcgcacccggcagccctgccggcagccccacctccacagaggagggaaccagcaccgagcccagcgaaggcagcgccccaggcaccagcaccgagcctagtgagggcggctctggcggcggcagcgcccaggagattaaacggatcaacaagatcagaagaagacttgtgaaagacagcaacaccaagaaggccggcaagacaggccccatgaaaaccctgctggttagagtgatgacacccgatctgagagagcggctggaaaacctgagaaagaagcctgaaaatatcccccagcccatcagcaatacatctagagccaacctgaataagctgctgaccgattacaccgaaatgaagaaggcgatcctgcatgtgtactgggaagagttccagaaggaccctgtgggcctgatgagccgggtggcccagcctgccagcaagaagatcgatcagaacaagctgaaacctgagatggacgagaagggcaacctgaccaccgccggctttgcctgctctcagtgtggccagcccctgttcgtgtacaagctggagcaggtgtctgagaagggcaaggcttacaccaactacttcggacggtgcaatgtggccgagcacgaaaagctgatcctgctggcccagctgaagcccgagaaggatagcgacgaagccgtgacatatagcctgggaaagtttgggcagagggccctggatttctacagcattcatgtgaccaaggagtccacccaccccgtgaagcccctggcccagatcgccggaaacagatacgcctccggacctgtgggaaaggccctgagcgacgcatgtatgggcacaatcgcctccttcctgtctaagtaccaggacatcatcatcgaacaccagaaggtggtgaagggcaaccagaagagactggagagcctgcgggagctggccggcaaggaaaacctggaataccctagcgtgaccctgccacctcagcctcacaccaaggagggcgttgatgcctacaacgaagtgatcgcccgggtgcgaatgtgggtgaacctgaacctgtggcagaagctgaagctaagcagagatgatgccaagcctctgctgagactgaagggattcccttcctttcctctggtcgagagacaggccaacgaagtggactggtgggacatggtgtgtaacgtgaagaagctgatcaacgagaaaaaggaggatggcaaggtgttttggcagaatctggctggctacaagagacaggaagccctgagaccatacctgagcagcgaggaagatcggaagaagggaaagaaattcgctcggtaccagctgggcgacctgctgctgcacctggaaaagaagcacggcgaggactggggaaaggtgtacgacgaggcctgggagcggattgacaagaaagtggaaggcctgagcaagcacatcaagctggaagaggaacggagaagcgaggacgcccagagcaaggccgccctgaccgactggctgcgggctaaggccagcttcgtgatcgagggcctgaaggaggccgacaaggacgagttctgcagatgcgagctgaagctgcagaagtggtacggggacctgcggggaaagcccttcgccatcgaagccgagaacagcatcctggacatcagcggcttcagcaagcagtacaactgtgccttcatctggcagaaggacggcgtgaagaagctgaacctgtacctgatcatcaactacttcaagggcggcaagctgcggttcaagaagatcaaacctgaagccttcgaagccaacagattctacaccgtgatcaacaaaaagagcggcgagatcgtgcccatggaggtgaacttcaacttcgacgaccccaacctgatcatcctgcctctggcctttggcaagagacagggcagagaattcatctggaacgacctgctgtccctggaaaccggcagcctgaagctggccaacggaagagtgatcgagaagacactgtacaacagaagaacccggcaggatgagcctgccctgttcgtggccctgaccttcgagcggcgggaggtcctggactcctccaatatcaaaccaatgaacctgatcggcgtggcaagaggcgaaaacatccccgccgtgatcgccctgaccgaccccgagggctgcccactgagccggtttaaggatagcctgggaaacccaacccacatcctgagaatcggcgagagctataaggagaagcagcggaccatccaggccaagaaggaggtggagcagcggagagccggcggctacagccggaagtacgccagcaaagccaagaatctggcagacgatatggtgagaaacaccgctagagatctgctgtactacgccgtgacccaggatgccatgctgatcttcgccaacctgagccggggcttcggccggcagggcaagcggaccttcatggccgagagacagtacacacggatggaggactggctgaccgccaagctggcctacgagggcctgagcaagacctacctgtccaagacactggcccagtacacctccaagacatgcagcaactgtgggtttaccatcaccagcgccgactacgacagggtgctggagaagctgaagaagacagcaacaggctggatgaccacaattaacggcaaggagctgaaggtggagggccagattacctactacaacagatacaagagacagaacgtagtcaaggacctgtccgtcgagctggatagactgagcgaagaatctgtgaacaacgacatctcctcctggacaaagggcagaagcggagaagctctgagcctcctgaagaaaagattctcccatagacccgtgcaggagaagttcgtgtgcctgaactgcggcttcgagacacacgcagccgagcaagccgccctgaacatcgccagatcctggctgttcctgcggagccaggagtacaagaaataccagacaaacaagacaaccggcaacaccgataagagagccttcgtcgagacctggcagtccttttaccggaagaagcttaaggaggtgtggaaacctgccgtgcggtctggcggatctggcggaggctccacaagcgcccaggaccccgtgaccttcgacgacatcagcgtgtacttcagcagggacgagtgggccctgctggacgccggccagaagcagctgtacagggaggtgatggccgagaactacagggccctggtgagcgtgggctacgtgatggaggagcccggcctggtgagccacatcgagcacgagcagcagggcagccccatcaggagcaggagcagcctgcacgccggcaggcactgcggcttcatcaccagccccaagaaaaagagaaaagtctaagctgccttctgcggggcttgccttctggccatgcccttcttctctcccttgcacctgtacctcttggtctttgaataaagcctgagtaggaaggctagcaaaaaaaaaaaaaaaaaaaaaaaaaaaaaaaaaaaaaaaaaaaaaaaaaaaaaaaaaaaaaaaaaaaaaaaaaaaaaaaa

SEQ ID NO: 2647 - RNA, 5419 nt, synthetic construct
  source 1..5419: mol_type = other RNA
aggaaataagagagaaaagaagagtaagaagaaatataagagccaccatggcccctaagaagaagcgtaaagtgagccgggtgaacggcagcggcagcggcggcggcatgaaccacgaccaggagttcgacccccctaaggtgtaccctcccgtccccgccgagaagagaaagcccatccgggtcctgagcctgttcgatggcatcgccaccggtctgctggtgctgaaggacctgggcatccaggtggataggtacattgcctccgaggtgtgcgaggactccatcaccgtgggaatggtgcgtcatcagggcaagatcatgtacgtgggcgacgtgcggagcgtgacacagaagcatatccaggagtggggccctttcgacctggtgatcggcggcagcccttgcaatgacctgagcatcgtgaacccagcccggaagggcctgtacgagggaaccggcagactgttcttcgagttttacagactgctgcacgacgcccggcctaaggaaggcgacgaccggcccttcttttggctgttcgagaatgtggtggccatgggagtcagcgacaagcgggatattagccggttcctggagagcaaccccgtgatgatcgatgccaaggaagtgagcgccgcccaccgggccagatacttctggggcaatctgcctggcatgaacagacccctggccagcaccgtgaacgacaagctggagctgcaggagtgcctggagcacggccggatcgccaagttcagcaaggtgagaaccatcaccacccgaagcaacagcatcaaacaaggcaaggaccagcactttcctgtgttcatgaacgagaaggaggacatcctgtggtgtaccgagatggagagagtgttcgggttcccagtccactacacagatgtcagcaacatgtctagactggccagacagagactgctgggaagaagctggtccgtccctgtgatcagacacctgttcgcccctctgaaggagtacttcgcctgcgtgagcagcggcaacagcaacgccaacagccggggccccagcttctctagcggcctggtgccactgtccctgagagggagccacatgggccccatggagatctacaaaaccgtgagcgcctggaagcggcagcctgtgcgcgtgctgagcctgtttcggaatatcgataaagtcctgaaaagcctgggattcctggagagcggctctggctccggcggtggcaccctgaagtacgtggaggatgtgacaaacgtggtcagacgggatgtggagaagtggggccccttcgatctggtgtacggcagcacccaacccctgggcagctcttgtgaccggtgccctggctggtacatgtttcagttccaccggatcctgcagtacgccctgccgagacaggagtcccagcggccattcttttggattttcatggacaacttgctgctgaccgaggatgaccaggaaactaccactcggttcctgcagaccgaagccgtgaccctgcaggacgtgagaggccgggactaccagaacgccatgcgggtgtggtccaacatccctggactgaaaagcaagcacgcacctctgacccctaaagaagaggagtacctgcaggcccaggtgcggagcagaagcaagctggacgcccctaaggtggatctgctggtgaagaattgcctcctgcccctgagagagtacttcaagtatttcagccagaatagtctgcccctgggcggcccaagcagcggcgcccctcctcccagcggcggcagcccagccggctccccaacctctaccgaggagggcacctctgagtccgccacccccgagagcggccctggcacctccaccgagcccagcgagggcagcgcacccggcagccctgccggcagccccacctccacagaggagggaaccagcaccgagcccagcgaaggcagcgccccaggcaccagcaccgagcctagtgagggcggctctggcggcggcagcgcccaggagattaaacggatcaacaagatcagaagaagacttgtgaaagacagcaacaccaagaaggccggcaagacaggccccatgaaaaccctgctggttagagtgatgacacccgatctgagagagcggctggaaaacctgagaaagaagcctgaaaatatcccccagcccatcagcaatacatctagagccaacctgaataagctgctgaccgattacaccgaaatgaagaaggcgatcctgcatgtgtactgggaagagttccagaaggaccctgtgggcctgatgagccgggtggcccagcctgccagcaagaagatcgatcagaacaagctgaaacctgagatggacgagaagggcaacctgaccaccgccggctttgcctgctctcagtgtggccagcccctgttcgtgtacaagctggagcaggtgtctgagaagggcaaggcttacaccaactacttcggacggtgcaatgtggccgagcacgaaaagctgatcctgctggcccagctgaagcccgagaaggatagcgacgaagccgtgacatatagcctgggaaagtttgggcagagggccctggatttctacagcattcatgtgaccaaggagtccacccaccccgtgaagcccctggcccagatcgccggaaacagatacgcctccggacctgtgggaaaggccctgagcgacgcatgtatgggcacaatcgcctccttcctgtctaagtaccaggacatcatcatcgaacaccagaaggtggtgaagggcaaccagaagagactggagagcctgcgggagctggccggcaaggaaaacctggaataccctagcgtgaccctgccacctcagcctcacaccaaggagggcgttgatgcctacaacgaagtgatcgcccgggtgcgaatgtgggtgaacctgaacctgtggcagaagctgaagctaagcagagatgatgccaagcctctgctgagactgaagggattcccttcctttcctctggtcgagagacaggccaacgaagtggactggtgggacatggtgtgtaacgtgaagaagctgatcaacgagaaaaaggaggatggcaaggtgttttggcagaatctggctggctacaagagacaggaagccctgagaccatacctgagcagcgaggaagatcggaagaagggaaagaaattcgctcggtaccagctgggcgacctgctgctgcacctggaaaagaagcacggcgaggactggggaaaggtgtacgacgaggcctgggagcggattgacaagaaagtggaaggcctgagcaagcacatcaagctggaagaggaacggagaagcgaggacgcccagagcaaggccgccctgaccgactggctgcgggctaaggccagcttcgtgatcgagggcctgaaggaggccgacaaggacgagttctgcagatgcgagctgaagctgcagaagtggtacggggacctgcggggaaagcccttcgccatcgaagccgagaacagcatcctggacatcagcggcttcagcaagcagtacaactgtgccttcatctggcagaaggacggcgtgaagaagctgaacctgtacctgatcatcaactacttcaagggcggcaagctgcggttcaagaagatcaaacctgaagccttcgaagccaacagattctacaccgtgatcaacaaaaagagcggcgagatcgtgcccatggaggtgaacttcaacttcgacgaccccaacctgatcatcctgcctctggcctttggcaagagacagggcagagaattcatctggaacgacctgctgtccctggaaaccggcagcctgaagctggccaacggaagagtgatcgagaagacactgtacaacagaagaacccggcaggatgagcctgccctgttcgtggccctgaccttcgagcggcgggaggtcctggactcctccaatatcaaaccaatgaacctgatcggcgtggcaagaggcgaaaacatccccgccgtgatcgccctgaccgaccccgagggctgcccactgagccggtttaaggatagcctgggaaacccaacccacatcctgagaatcggcgagagctataaggagaagcagcggaccatccaggccaagaaggaggtggagcagcggagagccggcggctacagccggaagtacgccagcaaagccaagaatctggcagacgatatggtgagaaacaccgctagagatctgctgtactacgccgtgacccaggatgccatgctgatcttcgccaacctgagccggggcttcggccggcagggcaagcggaccttcatggccgagagacagtacacacggatggaggactggctgaccgccaagctggcctacgagggcctgagcaagacctacctgtccaagacactggcccagtacacctccaagacatgcagcaactgtgggtttaccatcaccagcgccgactacgacagggtgctggagaagctgaagaagacagcaacaggctggatgaccacaattaacggcaaggagctgaaggtggagggccagattacctactacaacagatacaagagacagaacgtagtcaaggacctgtccgtcgagctggatagactgagcgaagaatctgtgaacaacgacatctcctcctggacaaagggcagaagcggagaagctctgagcctcctgaagaaaagattctcccatagacccgtgcaggagaagttcgtgtgcctgaactgcggcttcgagacacacgcagccgagcaagccgccctgaacatcgccagatcctggctgttcctgcggagccaggagtacaagaaataccagacaaacaagacaaccggcaacaccgataagagagccttcgtcgagacctggcagtccttttaccggaagaagcttaaggaggtgtggaaacctgccgtgcggtctggcggatctggcggaggctccacaagcatggccttcgaggacgtggccgtgtacttcagccaggaggagtggggcctgctggacaccgcccagagggccctgtacaggcacgtgatgctggagaacttcaccctggtgaccagcctgggcctgagcaccagcaggccccacgtggtgatccagctggagaggggcgaggagccctgggtgcccagcggcaaggacatgaccctggccaggaacacctacaggaggctgaacgccggcgagaccagccccaagaaaaagagaaaagtctaagctgccttctgcggggcttgccttctggccatgcccttcttctctcccttgcacctgtacctcttggtctttgaataaagcctgagtaggaaggctagcaaaaaaaaaaaaaaaaaaaaaaaaaaaaaaaaaaaaaaaaaaaaaaaaaaaaaaaaaaaaaaaaaaaaaaaaaaaaaaaa

SEQ ID NO: 2648 - RNA, 5419 nt, synthetic construct
  source 1..5419: mol_type = other RNA
aggaaataagagagaaaagaagagtaagaagaaatataagagccaccatggcccctaagaagaagcgtaaagtgagccgggtgaacggcagcggcagcggcggcggcatgaaccacgaccaggagttcgacccccctaaggtgtaccctcccgtccccgccgagaagagaaagcccatccgggtcctgagcctgttcgatggcatcgccaccggtctgctggtgctgaaggacctgggcatccaggtggataggtacattgcctccgaggtgtgcgaggactccatcaccgtgggaatggtgcgtcatcagggcaagatcatgtacgtgggcgacgtgcggagcgtgacacagaagcatatccaggagtggggccctttcgacctggtgatcggcggcagcccttgcaatgacctgagcatcgtgaacccagcccggaagggcctgtacgagggaaccggcagactgttcttcgagttttacagactgctgcacgacgcccggcctaaggaaggcgacgaccggcccttcttttggctgttcgagaatgtggtggccatgggagtcagcgacaagcgggatattagccggttcctggagagcaaccccgtgatgatcgatgccaaggaagtgagcgccgcccaccgggccagatacttctggggcaatctgcctggcatgaacagacccctggccagcaccgtgaacgacaagctggagctgcaggagtgcctggagcacggccggatcgccaagttcagcaaggtgagaaccatcaccacccgaagcaacagcatcaaacaaggcaaggaccagcactttcctgtgttcatgaacgagaaggaggacatcctgtggtgtaccgagatggagagagtgttcgggttcccagtccactacacagatgtcagcaacatgtctagactggccagacagagactgctgggaagaagctggtccgtccctgtgatcagacacctgttcgcccctctgaaggagtacttcgcctgcgtgagcagcggcaacagcaacgccaacagccggggccccagcttctctagcggcctggtgccactgtccctgagagggagccacatgggccccatggagatctacaaaaccgtgagcgcctggaagcggcagcctgtgcgcgtgctgagcctgtttcggaatatcgataaagtcctgaaaagcctgggattcctggagagcggctctggctccggcggtggcaccctgaagtacgtggaggatgtgacaaacgtggtcagacgggatgtggagaagtggggccccttcgatctggtgtacggcagcacccaacccctgggcagctcttgtgaccggtgccctggctggtacatgtttcagttccaccggatcctgcagtacgccctgccgagacaggagtcccagcggccattcttttggattttcatggacaacttgctgctgaccgaggatgaccaggaaactaccactcggttcctgcagaccgaagccgtgaccctgcaggacgtgagaggccgggactaccagaacgccatgcgggtgtggtccaacatccctggactgaaaagcaagcacgcacctctgacccctaaagaagaggagtacctgcaggcccaggtgcggagcagaagcaagctggacgcccctaaggtggatctgctggtgaagaattgcctcctgcccctgagagagtacttcaagtatttcagccagaatagtctgcccctgggcggcccaagcagcggcgcccctcctcccagcggcggcagcccagccggctccccaacctctaccgaggagggcacctctgagtccgccacccccgagagcggccctggcacctccaccgagcccagcgagggcagcgcacccggcagccctgccggcagccccacctccacagaggagggaaccagcaccgagcccagcgaaggcagcgccccaggcaccagcaccgagcctagtgagggcggctctggcggcggcagcgcccaggagattaaacggatcaacaagatcagaagaagacttgtgaaagacagcaacaccaagaaggccggcaagacaggccccatgaaaaccctgctggttagagtgatgacacccgatctgagagagcggctggaaaacctgagaaagaagcctgaaaatatcccccagcccatcagcaatacatctagagccaacctgaataagctgctgaccgattacaccgaaatgaagaaggcgatcctgcatgtgtactgggaagagttccagaaggaccctgtgggcctgatgagccgggtggcccagcctgccagcaagaagatcgatcagaacaagctgaaacctgagatggacgagaagggcaacctgaccaccgccggctttgcctgctctcagtgtggccagcccctgttcgtgtacaagctggagcaggtgtctgagaagggcaaggcttacaccaactacttcggacggtgcaatgtggccgagcacgaaaagctgatcctgctggcccagctgaagcccgagaaggatagcgacgaagccgtgacatatagcctgggaaagtttgggcagagggccctggatttctacagcattcatgtgaccaaggagtccacccaccccgtgaagcccctggcccagatcgccggaaacagatacgcctccggacctgtgggaaaggccctgagcgacgcatgtatgggcacaatcgcctccttcctgtctaagtaccaggacatcatcatcgaacaccagaaggtggtgaagggcaaccagaagagactggagagcctgcgggagctggccggcaaggaaaacctggaataccctagcgtgaccctgccacctcagcctcacaccaaggagggcgttgatgcctacaacgaagtgatcgcccgggtgcgaatgtgggtgaacctgaacctgtggcagaagctgaagctaagcagagatgatgccaagcctctgctgagactgaagggattcccttcctttcctctggtcgagagacaggccaacgaagtggactggtgggacatggtgtgtaacgtgaagaagctgatcaacgagaaaaaggaggatggcaaggtgttttggcagaatctggctggctacaagagacaggaagccctgagaccatacctgagcagcgaggaagatcggaagaagggaaagaaattcgctcggtaccagctgggcgacctgctgctgcacctggaaaagaagcacggcgaggactggggaaaggtgtacgacgaggcctgggagcggattgacaagaaagtggaaggcctgagcaagcacatcaagctggaagaggaacggagaagcgaggacgcccagagcaaggccgccctgaccgactggctgcgggctaaggccagcttcgtgatcgagggcctgaaggaggccgacaaggacgagttctgcagatgcgagctgaagctgcagaagtggtacggggacctgcggggaaagcccttcgccatcgaagccgagaacagcatcctggacatcagcggcttcagcaagcagtacaactgtgccttcatctggcagaaggacggcgtgaagaagctgaacctgtacctgatcatcaactacttcaagggcggcaagctgcggttcaagaagatcaaacctgaagccttcgaagccaacagattctacaccgtgatcaacaaaaagagcggcgagatcgtgcccatggaggtgaacttcaacttcgacgaccccaacctgatcatcctgcctctggcctttggcaagagacagggcagagaattcatctggaacgacctgctgtccctggaaaccggcagcctgaagctggccaacggaagagtgatcgagaagacactgtacaacagaagaacccggcaggatgagcctgccctgttcgtggccctgaccttcgagcggcgggaggtcctggactcctccaatatcaaaccaatgaacctgatcggcgtggcaagaggcgaaaacatccccgccgtgatcgccctgaccgaccccgagggctgcccactgagccggtttaaggatagcctgggaaacccaacccacatcctgagaatcggcgagagctataaggagaagcagcggaccatccaggccaagaaggaggtggagcagcggagagccggcggctacagccggaagtacgccagcaaagccaagaatctggcagacgatatggtgagaaacaccgctagagatctgctgtactacgccgtgacccaggatgccatgctgatcttcgccaacctgagccggggcttcggccggcagggcaagcggaccttcatggccgagagacagtacacacggatggaggactggctgaccgccaagctggcctacgagggcctgagcaagacctacctgtccaagacactggcccagtacacctccaagacatgcagcaactgtgggtttaccatcaccagcgccgactacgacagggtgctggagaagctgaagaagacagcaacaggctggatgaccacaattaacggcaaggagctgaaggtggagggccagattacctactacaacagatacaagagacagaacgtagtcaaggacctgtccgtcgagctggatagactgagcgaagaatctgtgaacaacgacatctcctcctggacaaagggcagaagcggagaagctctgagcctcctgaagaaaagattctcccatagacccgtgcaggagaagttcgtgtgcctgaactgcggcttcgagacacacgcagccgagcaagccgccctgaacatcgccagatcctggctgttcctgcggagccaggagtacaagaaataccagacaaacaagacaaccggcaacaccgataagagagccttcgtcgagacctggcagtccttttaccggaagaagcttaaggaggtgtggaaacctgccgtgcggtctggcggatctggcggaggctccacaagcatggtgaccttcgaggacgtggccgtgcacttcaccaagaccgagtggaccggcctgagccccgcccagagggccctgtacaggagcgtgatgctggagaacttcggcaacctgaccgccctgggctaccccgtgcccaagcccgccctgatcagcctgctggagggcggcgacatggactggggcctggaggcccaggacgacccccccgccgagaggaccaagaacgtgtgcaaggtgatcaccagccccaagaaaaagagaaaagtctaagctgccttctgcggggcttgccttctggccatgcccttcttctctcccttgcacctgtacctcttggtctttgaataaagcctgagtaggaaggctagcaaaaaaaaaaaaaaaaaaaaaaaaaaaaaaaaaaaaaaaaaaaaaaaaaaaaaaaaaaaaaaaaaaaaaaaaaaaaaaaa

SEQ ID NO: 2649 - RNA, 5419 nt, synthetic construct
  source 1..5419: mol_type = other RNA
aggaaataagagagaaaagaagagtaagaagaaatataagagccaccatggcccctaagaagaagcgtaaagtgagccgggtgaacggcagcggcagcggcggcggcatgaaccacgaccaggagttcgacccccctaaggtgtaccctcccgtccccgccgagaagagaaagcccatccgggtcctgagcctgttcgatggcatcgccaccggtctgctggtgctgaaggacctgggcatccaggtggataggtacattgcctccgaggtgtgcgaggactccatcaccgtgggaatggtgcgtcatcagggcaagatcatgtacgtgggcgacgtgcggagcgtgacacagaagcatatccaggagtggggccctttcgacctggtgatcggcggcagcccttgcaatgacctgagcatcgtgaacccagcccggaagggcctgtacgagggaaccggcagactgttcttcgagttttacagactgctgcacgacgcccggcctaaggaaggcgacgaccggcccttcttttggctgttcgagaatgtggtggccatgggagtcagcgacaagcgggatattagccggttcctggagagcaaccccgtgatgatcgatgccaaggaagtgagcgccgcccaccgggccagatacttctggggcaatctgcctggcatgaacagacccctggccagcaccgtgaacgacaagctggagctgcaggagtgcctggagcacggccggatcgccaagttcagcaaggtgagaaccatcaccacccgaagcaacagcatcaaacaaggcaaggaccagcactttcctgtgttcatgaacgagaaggaggacatcctgtggtgtaccgagatggagagagtgttcgggttcccagtccactacacagatgtcagcaacatgtctagactggccagacagagactgctgggaagaagctggtccgtccctgtgatcagacacctgttcgcccctctgaaggagtacttcgcctgcgtgagcagcggcaacagcaacgccaacagccggggccccagcttctctagcggcctggtgccactgtccctgagagggagccacatgggccccatggagatctacaaaaccgtgagcgcctggaagcggcagcctgtgcgcgtgctgagcctgtttcggaatatcgataaagtcctgaaaagcctgggattcctggagagcggctctggctccggcggtggcaccctgaagtacgtggaggatgtgacaaacgtggtcagacgggatgtggagaagtggggccccttcgatctggtgtacggcagcacccaacccctgggcagctcttgtgaccggtgccctggctggtacatgtttcagttccaccggatcctgcagtacgccctgccgagacaggagtcccagcggccattcttttggattttcatggacaacttgctgctgaccgaggatgaccaggaaactaccactcggttcctgcagaccgaagccgtgaccctgcaggacgtgagaggccgggactaccagaacgccatgcgggtgtggtccaacatccctggactgaaaagcaagcacgcacctctgacccctaaagaagaggagtacctgcaggcccaggtgcggagcagaagcaagctggacgcccctaaggtggatctgctggtgaagaattgcctcctgcccctgagagagtacttcaagtatttcagccagaatagtctgcccctgggcggcccaagcagcggcgcccctcctcccagcggcggcagcccagccggctccccaacctctaccgaggagggcacctctgagtccgccacccccgagagcggccctggcacctccaccgagcccagcgagggcagcgcacccggcagccctgccggcagccccacctccacagaggagggaaccagcaccgagcccagcgaaggcagcgccccaggcaccagcaccgagcctagtgagggcggctctggcggcggcagcgcccaggagattaaacggatcaacaagatcagaagaagacttgtgaaagacagcaacaccaagaaggccggcaagacaggccccatgaaaaccctgctggttagagtgatgacacccgatctgagagagcggctggaaaacctgagaaagaagcctgaaaatatcccccagcccatcagcaatacatctagagccaacctgaataagctgctgaccgattacaccgaaatgaagaaggcgatcctgcatgtgtactgggaagagttccagaaggaccctgtgggcctgatgagccgggtggcccagcctgccagcaagaagatcgatcagaacaagctgaaacctgagatggacgagaagggcaacctgaccaccgccggctttgcctgctctcagtgtggccagcccctgttcgtgtacaagctggagcaggtgtctgagaagggcaaggcttacaccaactacttcggacggtgcaatgtggccgagcacgaaaagctgatcctgctggcccagctgaagcccgagaaggatagcgacgaagccgtgacatatagcctgggaaagtttgggcagagggccctggatttctacagcattcatgtgaccaaggagtccacccaccccgtgaagcccctggcccagatcgccggaaacagatacgcctccggacctgtgggaaaggccctgagcgacgcatgtatgggcacaatcgcctccttcctgtctaagtaccaggacatcatcatcgaacaccagaaggtggtgaagggcaaccagaagagactggagagcctgcgggagctggccggcaaggaaaacctggaataccctagcgtgaccctgccacctcagcctcacaccaaggagggcgttgatgcctacaacgaagtgatcgcccgggtgcgaatgtgggtgaacctgaacctgtggcagaagctgaagctaagcagagatgatgccaagcctctgctgagactgaagggattcccttcctttcctctggtcgagagacaggccaacgaagtggactggtgggacatggtgtgtaacgtgaagaagctgatcaacgagaaaaaggaggatggcaaggtgttttggcagaatctggctggctacaagagacaggaagccctgagaccatacctgagcagcgaggaagatcggaagaagggaaagaaattcgctcggtaccagctgggcgacctgctgctgcacctggaaaagaagcacggcgaggactggggaaaggtgtacgacgaggcctgggagcggattgacaagaaagtggaaggcctgagcaagcacatcaagctggaagaggaacggagaagcgaggacgcccagagcaaggccgccctgaccgactggctgcgggctaaggccagcttcgtgatcgagggcctgaaggaggccgacaaggacgagttctgcagatgcgagctgaagctgcagaagtggtacggggacctgcggggaaagcccttcgccatcgaagccgagaacagcatcctggacatcagcggcttcagcaagcagtacaactgtgccttcatctggcagaaggacggcgtgaagaagctgaacctgtacctgatcatcaactacttcaagggcggcaagctgcggttcaagaagatcaaacctgaagccttcgaagccaacagattctacaccgtgatcaacaaaaagagcggcgagatcgtgcccatggaggtgaacttcaacttcgacgaccccaacctgatcatcctgcctctggcctttggcaagagacagggcagagaattcatctggaacgacctgctgtccctggaaaccggcagcctgaagctggccaacggaagagtgatcgagaagacactgtacaacagaagaacccggcaggatgagcctgccctgttcgtggccctgaccttcgagcggcgggaggtcctggactcctccaatatcaaaccaatgaacctgatcggcgtggcaagaggcgaaaacatccccgccgtgatcgccctgaccgaccccgagggctgcccactgagccggtttaaggatagcctgggaaacccaacccacatcctgagaatcggcgagagctataaggagaagcagcggaccatccaggccaagaaggaggtggagcagcggagagccggcggctacagccggaagtacgccagcaaagccaagaatctggcagacgatatggtgagaaacaccgctagagatctgctgtactacgccgtgacccaggatgccatgctgatcttcgccaacctgagccggggcttcggccggcagggcaagcggaccttcatggccgagagacagtacacacggatggaggactggctgaccgccaagctggcctacgagggcctgagcaagacctacctgtccaagacactggcccagtacacctccaagacatgcagcaactgtgggtttaccatcaccagcgccgactacgacagggtgctggagaagctgaagaagacagcaacaggctggatgaccacaattaacggcaaggagctgaaggtggagggccagattacctactacaacagatacaagagacagaacgtagtcaaggacctgtccgtcgagctggatagactgagcgaagaatctgtgaacaacgacatctcctcctggacaaagggcagaagcggagaagctctgagcctcctgaagaaaagattctcccatagacccgtgcaggagaagttcgtgtgcctgaactgcggcttcgagacacacgcagccgagcaagccgccctgaacatcgccagatcctggctgttcctgcggagccaggagtacaagaaataccagacaaacaagacaaccggcaacaccgataagagagccttcgtcgagacctggcagtccttttaccggaagaagcttaaggaggtgtggaaacctgccgtgcggtctggcggatctggcggaggctccacaagcatggccttcgaggacgtggccgtgtacttcagccaggaggagtggggcctgctggacaccgcccagagggccctgtacaggcacgtgatgctggacaacttcaccctggtgaccagcctgggcctgagcaccagcaggccccacgtggtgatccagctggagaggggcgaggagccctgggtgcccagcggcaaggacatgaccctggccaggaacacctacaggaggctgaacgccggcgagaccagccccaagaaaaagagaaaagtctaagctgccttctgcggggcttgccttctggccatgcccttcttctctcccttgcacctgtacctcttggtctttgaataaagcctgagtaggaaggctagcaaaaaaaaaaaaaaaaaaaaaaaaaaaaaaaaaaaaaaaaaaaaaaaaaaaaaaaaaaaaaaaaaaaaaaaaaaaaaaaa

SEQ ID NO: 2650 - RNA, 5419 nt, synthetic construct
  source 1..5419: mol_type = other RNA
aggaaataagagagaaaagaagagtaagaagaaatataagagccaccatggcccctaagaagaagcgtaaagtgagccgggtgaacggcagcggcagcggcggcggcatgaaccacgaccaggagttcgacccccctaaggtgtaccctcccgtccccgccgagaagagaaagcccatccgggtcctgagcctgttcgatggcatcgccaccggtctgctggtgctgaaggacctgggcatccaggtggataggtacattgcctccgaggtgtgcgaggactccatcaccgtgggaatggtgcgtcatcagggcaagatcatgtacgtgggcgacgtgcggagcgtgacacagaagcatatccaggagtggggccctttcgacctggtgatcggcggcagcccttgcaatgacctgagcatcgtgaacccagcccggaagggcctgtacgagggaaccggcagactgttcttcgagttttacagactgctgcacgacgcccggcctaaggaaggcgacgaccggcccttcttttggctgttcgagaatgtggtggccatgggagtcagcgacaagcgggatattagccggttcctggagagcaaccccgtgatgatcgatgccaaggaagtgagcgccgcccaccgggccagatacttctggggcaatctgcctggcatgaacagacccctggccagcaccgtgaacgacaagctggagctgcaggagtgcctggagcacggccggatcgccaagttcagcaaggtgagaaccatcaccacccgaagcaacagcatcaaacaaggcaaggaccagcactttcctgtgttcatgaacgagaaggaggacatcctgtggtgtaccgagatggagagagtgttcgggttcccagtccactacacagatgtcagcaacatgtctagactggccagacagagactgctgggaagaagctggtccgtccctgtgatcagacacctgttcgcccctctgaaggagtacttcgcctgcgtgagcagcggcaacagcaacgccaacagccggggccccagcttctctagcggcctggtgccactgtccctgagagggagccacatgggccccatggagatctacaaaaccgtgagcgcctggaagcggcagcctgtgcgcgtgctgagcctgtttcggaatatcgataaagtcctgaaaagcctgggattcctggagagcggctctggctccggcggtggcaccctgaagtacgtggaggatgtgacaaacgtggtcagacgggatgtggagaagtggggccccttcgatctggtgtacggcagcacccaacccctgggcagctcttgtgaccggtgccctggctggtacatgtttcagttccaccggatcctgcagtacgccctgccgagacaggagtcccagcggccattcttttggattttcatggacaacttgctgctgaccgaggatgaccaggaaactaccactcggttcctgcagaccgaagccgtgaccctgcaggacgtgagaggccgggactaccagaacgccatgcgggtgtggtccaacatccctggactgaaaagcaagcacgcacctctgacccctaaagaagaggagtacctgcaggcccaggtgcggagcagaagcaagctggacgcccctaaggtggatctgctggtgaagaattgcctcctgcccctgagagagtacttcaagtatttcagccagaatagtctgcccctgggcggcccaagcagcggcgcccctcctcccagcggcggcagcccagccggctccccaacctctaccgaggagggcacctctgagtccgccacccccgagagcggccctggcacctccaccgagcccagcgagggcagcgcacccggcagccctgccggcagccccacctccacagaggagggaaccagcaccgagcccagcgaaggcagcgccccaggcaccagcaccgagcctagtgagggcggctctggcggcggcagcgcccaggagattaaacggatcaacaagatcagaagaagacttgtgaaagacagcaacaccaagaaggccggcaagacaggccccatgaaaaccctgctggttagagtgatgacacccgatctgagagagcggctggaaaacctgagaaagaagcctgaaaatatcccccagcccatcagcaatacatctagagccaacctgaataagctgctgaccgattacaccgaaatgaagaaggcgatcctgcatgtgtactgggaagagttccagaaggaccctgtgggcctgatgagccgggtggcccagcctgccagcaagaagatcgatcagaacaagctgaaacctgagatggacgagaagggcaacctgaccaccgccggctttgcctgctctcagtgtggccagcccctgttcgtgtacaagctggagcaggtgtctgagaagggcaaggcttacaccaactacttcggacggtgcaatgtggccgagcacgaaaagctgatcctgctggcccagctgaagcccgagaaggatagcgacgaagccgtgacatatagcctgggaaagtttgggcagagggccctggatttctacagcattcatgtgaccaaggagtccacccaccccgtgaagcccctggcccagatcgccggaaacagatacgcctccggacctgtgggaaaggccctgagcgacgcatgtatgggcacaatcgcctccttcctgtctaagtaccaggacatcatcatcgaacaccagaaggtggtgaagggcaaccagaagagactggagagcctgcgggagctggccggcaaggaaaacctggaataccctagcgtgaccctgccacctcagcctcacaccaaggagggcgttgatgcctacaacgaagtgatcgcccgggtgcgaatgtgggtgaacctgaacctgtggcagaagctgaagctaagcagagatgatgccaagcctctgctgagactgaagggattcccttcctttcctctggtcgagagacaggccaacgaagtggactggtgggacatggtgtgtaacgtgaagaagctgatcaacgagaaaaaggaggatggcaaggtgttttggcagaatctggctggctacaagagacaggaagccctgagaccatacctgagcagcgaggaagatcggaagaagggaaagaaattcgctcggtaccagctgggcgacctgctgctgcacctggaaaagaagcacggcgaggactggggaaaggtgtacgacgaggcctgggagcggattgacaagaaagtggaaggcctgagcaagcacatcaagctggaagaggaacggagaagcgaggacgcccagagcaaggccgccctgaccgactggctgcgggctaaggccagcttcgtgatcgagggcctgaaggaggccgacaaggacgagttctgcagatgcgagctgaagctgcagaagtggtacggggacctgcggggaaagcccttcgccatcgaagccgagaacagcatcctggacatcagcggcttcagcaagcagtacaactgtgccttcatctggcagaaggacggcgtgaagaagctgaacctgtacctgatcatcaactacttcaagggcggcaagctgcggttcaagaagatcaaacctgaagccttcgaagccaacagattctacaccgtgatcaacaaaaagagcggcgagatcgtgcccatggaggtgaacttcaacttcgacgaccccaacctgatcatcctgcctctggcctttggcaagagacagggcagagaattcatctggaacgacctgctgtccctggaaaccggcagcctgaagctggccaacggaagagtgatcgagaagacactgtacaacagaagaacccggcaggatgagcctgccctgttcgtggccctgaccttcgagcggcgggaggtcctggactcctccaatatcaaaccaatgaacctgatcggcgtggcaagaggcgaaaacatccccgccgtgatcgccctgaccgaccccgagggctgcccactgagccggtttaaggatagcctgggaaacccaacccacatcctgagaatcggcgagagctataaggagaagcagcggaccatccaggccaagaaggaggtggagcagcggagagccggcggctacagccggaagtacgccagcaaagccaagaatctggcagacgatatggtgagaaacaccgctagagatctgctgtactacgccgtgacccaggatgccatgctgatcttcgccaacctgagccggggcttcggccggcagggcaagcggaccttcatggccgagagacagtacacacggatggaggactggctgaccgccaagctggcctacgagggcctgagcaagacctacctgtccaagacactggcccagtacacctccaagacatgcagcaactgtgggtttaccatcaccagcgccgactacgacagggtgctggagaagctgaagaagacagcaacaggctggatgaccacaattaacggcaaggagctgaaggtggagggccagattacctactacaacagatacaagagacagaacgtagtcaaggacctgtccgtcgagctggatagactgagcgaagaatctgtgaacaacgacatctcctcctggacaaagggcagaagcggagaagctctgagcctcctgaagaaaagattctcccatagacccgtgcaggagaagttcgtgtgcctgaactgcggcttcgagacacacgcagccgagcaagccgccctgaacatcgccagatcctggctgttcctgcggagccaggagtacaagaaataccagacaaacaagacaaccggcaacaccgataagagagccttcgtcgagacctggcagtccttttaccggaagaagcttaaggaggtgtggaaacctgccgtgcggtctggcggatctggcggaggctccacaagcgtgcaggagcccgtgaccttcaaggacgtggccgtggacttcacccaggaggagtggggccagctggacctggtgcagaggaccctgtacagggacgtgatgctggagacctacggccacctgctgagcgtgggcaaccagatcaccaagcccgaggtgatcagcctgctggagcagggcgaggagccctggagcgtggagcaggcctacccccagagcacctgccccgagtggatgaggaacaccagccccaagaaaaagagaaaagtctaagctgccttctgcggggcttgccttctggccatgcccttcttctctcccttgcacctgtacctcttggtctttgaataaagcctgagtaggaaggctagcaaaaaaaaaaaaaaaaaaaaaaaaaaaaaaaaaaaaaaaaaaaaaaaaaaaaaaaaaaaaaaaaaaaaaaaaaaaaaaaa

SEQ ID NO: 2651 - RNA, 5419 nt, synthetic construct
  source 1..5419: mol_type = other RNA
aggaaataagagagaaaagaagagtaagaagaaatataagagccaccatggcccctaagaagaagcgtaaagtgagccgggtgaacggcagcggcagcggcggcggcatgaaccacgaccaggagttcgacccccctaaggtgtaccctcccgtccccgccgagaagagaaagcccatccgggtcctgagcctgttcgatggcatcgccaccggtctgctggtgctgaaggacctgggcatccaggtggataggtacattgcctccgaggtgtgcgaggactccatcaccgtgggaatggtgcgtcatcagggcaagatcatgtacgtgggcgacgtgcggagcgtgacacagaagcatatccaggagtggggccctttcgacctggtgatcggcggcagcccttgcaatgacctgagcatcgtgaacccagcccggaagggcctgtacgagggaaccggcagactgttcttcgagttttacagactgctgcacgacgcccggcctaaggaaggcgacgaccggcccttcttttggctgttcgagaatgtggtggccatgggagtcagcgacaagcgggatattagccggttcctggagagcaaccccgtgatgatcgatgccaaggaagtgagcgccgcccaccgggccagatacttctggggcaatctgcctggcatgaacagacccctggccagcaccgtgaacgacaagctggagctgcaggagtgcctggagcacggccggatcgccaagttcagcaaggtgagaaccatcaccacccgaagcaacagcatcaaacaaggcaaggaccagcactttcctgtgttcatgaacgagaaggaggacatcctgtggtgtaccgagatggagagagtgttcgggttcccagtccactacacagatgtcagcaacatgtctagactggccagacagagactgctgggaagaagctggtccgtccctgtgatcagacacctgttcgcccctctgaaggagtacttcgcctgcgtgagcagcggcaacagcaacgccaacagccggggccccagcttctctagcggcctggtgccactgtccctgagagggagccacatgggccccatggagatctacaaaaccgtgagcgcctggaagcggcagcctgtgcgcgtgctgagcctgtttcggaatatcgataaagtcctgaaaagcctgggattcctggagagcggctctggctccggcggtggcaccctgaagtacgtggaggatgtgacaaacgtggtcagacgggatgtggagaagtggggccccttcgatctggtgtacggcagcacccaacccctgggcagctcttgtgaccggtgccctggctggtacatgtttcagttccaccggatcctgcagtacgccctgccgagacaggagtcccagcggccattcttttggattttcatggacaacttgctgctgaccgaggatgaccaggaaactaccactcggttcctgcagaccgaagccgtgaccctgcaggacgtgagaggccgggactaccagaacgccatgcgggtgtggtccaacatccctggactgaaaagcaagcacgcacctctgacccctaaagaagaggagtacctgcaggcccaggtgcggagcagaagcaagctggacgcccctaaggtggatctgctggtgaagaattgcctcctgcccctgagagagtacttcaagtatttcagccagaatagtctgcccctgggcggcccaagcagcggcgcccctcctcccagcggcggcagcccagccggctccccaacctctaccgaggagggcacctctgagtccgccacccccgagagcggccctggcacctccaccgagcccagcgagggcagcgcacccggcagccctgccggcagccccacctccacagaggagggaaccagcaccgagcccagcgaaggcagcgccccaggcaccagcaccgagcctagtgagggcggctctggcggcggcagcgcccaggagattaaacggatcaacaagatcagaagaagacttgtgaaagacagcaacaccaagaaggccggcaagacaggccccatgaaaaccctgctggttagagtgatgacacccgatctgagagagcggctggaaaacctgagaaagaagcctgaaaatatcccccagcccatcagcaatacatctagagccaacctgaataagctgctgaccgattacaccgaaatgaagaaggcgatcctgcatgtgtactgggaagagttccagaaggaccctgtgggcctgatgagccgggtggcccagcctgccagcaagaagatcgatcagaacaagctgaaacctgagatggacgagaagggcaacctgaccaccgccggctttgcctgctctcagtgtggccagcccctgttcgtgtacaagctggagcaggtgtctgagaagggcaaggcttacaccaactacttcggacggtgcaatgtggccgagcacgaaaagctgatcctgctggcccagctgaagcccgagaaggatagcgacgaagccgtgacatatagcctgggaaagtttgggcagagggccctggatttctacagcattcatgtgaccaaggagtccacccaccccgtgaagcccctggcccagatcgccggaaacagatacgcctccggacctgtgggaaaggccctgagcgacgcatgtatgggcacaatcgcctccttcctgtctaagtaccaggacatcatcatcgaacaccagaaggtggtgaagggcaaccagaagagactggagagcctgcgggagctggccggcaaggaaaacctggaataccctagcgtgaccctgccacctcagcctcacaccaaggagggcgttgatgcctacaacgaagtgatcgcccgggtgcgaatgtgggtgaacctgaacctgtggcagaagctgaagctaagcagagatgatgccaagcctctgctgagactgaagggattcccttcctttcctctggtcgagagacaggccaacgaagtggactggtgggacatggtgtgtaacgtgaagaagctgatcaacgagaaaaaggaggatggcaaggtgttttggcagaatctggctggctacaagagacaggaagccctgagaccatacctgagcagcgaggaagatcggaagaagggaaagaaattcgctcggtaccagctgggcgacctgctgctgcacctggaaaagaagcacggcgaggactggggaaaggtgtacgacgaggcctgggagcggattgacaagaaagtggaaggcctgagcaagcacatcaagctggaagaggaacggagaagcgaggacgcccagagcaaggccgccctgaccgactggctgcgggctaaggccagcttcgtgatcgagggcctgaaggaggccgacaaggacgagttctgcagatgcgagctgaagctgcagaagtggtacggggacctgcggggaaagcccttcgccatcgaagccgagaacagcatcctggacatcagcggcttcagcaagcagtacaactgtgccttcatctggcagaaggacggcgtgaagaagctgaacctgtacctgatcatcaactacttcaagggcggcaagctgcggttcaagaagatcaaacctgaagccttcgaagccaacagattctacaccgtgatcaacaaaaagagcggcgagatcgtgcccatggaggtgaacttcaacttcgacgaccccaacctgatcatcctgcctctggcctttggcaagagacagggcagagaattcatctggaacgacctgctgtccctggaaaccggcagcctgaagctggccaacggaagagtgatcgagaagacactgtacaacagaagaacccggcaggatgagcctgccctgttcgtggccctgaccttcgagcggcgggaggtcctggactcctccaatatcaaaccaatgaacctgatcggcgtggcaagaggcgaaaacatccccgccgtgatcgccctgaccgaccccgagggctgcccactgagccggtttaaggatagcctgggaaacccaacccacatcctgagaatcggcgagagctataaggagaagcagcggaccatccaggccaagaaggaggtggagcagcggagagccggcggctacagccggaagtacgccagcaaagccaagaatctggcagacgatatggtgagaaacaccgctagagatctgctgtactacgccgtgacccaggatgccatgctgatcttcgccaacctgagccggggcttcggccggcagggcaagcggaccttcatggccgagagacagtacacacggatggaggactggctgaccgccaagctggcctacgagggcctgagcaagacctacctgtccaagacactggcccagtacacctccaagacatgcagcaactgtgggtttaccatcaccagcgccgactacgacagggtgctggagaagctgaagaagacagcaacaggctggatgaccacaattaacggcaaggagctgaaggtggagggccagattacctactacaacagatacaagagacagaacgtagtcaaggacctgtccgtcgagctggatagactgagcgaagaatctgtgaacaacgacatctcctcctggacaaagggcagaagcggagaagctctgagcctcctgaagaaaagattctcccatagacccgtgcaggagaagttcgtgtgcctgaactgcggcttcgagacacacgcagccgagcaagccgccctgaacatcgccagatcctggctgttcctgcggagccaggagtacaagaaataccagacaaacaagacaaccggcaacaccgataagagagccttcgtcgagacctggcagtccttttaccggaagaagcttaaggaggtgtggaaacctgccgtgcggtctggcggatctggcggaggctccacaagcagcaaggtgcccgtgaccttcggcgacctggccatctacttcagccaggaggagtgggagtggctgagccccatccagaaggacctgtacgaggacgtgatgctggagaactaccagaacctggtgagcctgggcctgagcttcaggaggcccaacgtgatcaccctgctggagaagggcaaggccccctggatggtggagcccgtgaggaagaggaggggcgtggacagcggcagcaagtgcaccagccccaagaaaaagagaaaagtctaagctgccttctgcggggcttgccttctggccatgcccttcttctctcccttgcacctgtacctcttggtctttgaataaagcctgagtaggaaggctagcaaaaaaaaaaaaaaaaaaaaaaaaaaaaaaaaaaaaaaaaaaaaaaaaaaaaaaaaaaaaaaaaaaaaaaaaaaaaaaaa

SEQ ID NO: 2652 - RNA, 5419 nt, synthetic construct
  source 1..5419: mol_type = other RNA
aggaaataagagagaaaagaagagtaagaagaaatataagagccaccatggcccctaagaagaagcgtaaagtgagccgggtgaacggcagcggcagcggcggcggcatgaaccacgaccaggagttcgacccccctaaggtgtaccctcccgtccccgccgagaagagaaagcccatccgggtcctgagcctgttcgatggcatcgccaccggtctgctggtgctgaaggacctgggcatccaggtggataggtacattgcctccgaggtgtgcgaggactccatcaccgtgggaatggtgcgtcatcagggcaagatcatgtacgtgggcgacgtgcggagcgtgacacagaagcatatccaggagtggggccctttcgacctggtgatcggcggcagcccttgcaatgacctgagcatcgtgaacccagcccggaagggcctgtacgagggaaccggcagactgttcttcgagttttacagactgctgcacgacgcccggcctaaggaaggcgacgaccggcccttcttttggctgttcgagaatgtggtggccatgggagtcagcgacaagcgggatattagccggttcctggagagcaaccccgtgatgatcgatgccaaggaagtgagcgccgcccaccgggccagatacttctggggcaatctgcctggcatgaacagacccctggccagcaccgtgaacgacaagctggagctgcaggagtgcctggagcacggccggatcgccaagttcagcaaggtgagaaccatcaccacccgaagcaacagcatcaaacaaggcaaggaccagcactttcctgtgttcatgaacgagaaggaggacatcctgtggtgtaccgagatggagagagtgttcgggttcccagtccactacacagatgtcagcaacatgtctagactggccagacagagactgctgggaagaagctggtccgtccctgtgatcagacacctgttcgcccctctgaaggagtacttcgcctgcgtgagcagcggcaacagcaacgccaacagccggggccccagcttctctagcggcctggtgccactgtccctgagagggagccacatgggccccatggagatctacaaaaccgtgagcgcctggaagcggcagcctgtgcgcgtgctgagcctgtttcggaatatcgataaagtcctgaaaagcctgggattcctggagagcggctctggctccggcggtggcaccctgaagtacgtggaggatgtgacaaacgtggtcagacgggatgtggagaagtggggccccttcgatctggtgtacggcagcacccaacccctgggcagctcttgtgaccggtgccctggctggtacatgtttcagttccaccggatcctgcagtacgccctgccgagacaggagtcccagcggccattcttttggattttcatggacaacttgctgctgaccgaggatgaccaggaaactaccactcggttcctgcagaccgaagccgtgaccctgcaggacgtgagaggccgggactaccagaacgccatgcgggtgtggtccaacatccctggactgaaaagcaagcacgcacctctgacccctaaagaagaggagtacctgcaggcccaggtgcggagcagaagcaagctggacgcccctaaggtggatctgctggtgaagaattgcctcctgcccctgagagagtacttcaagtatttcagccagaatagtctgcccctgggcggcccaagcagcggcgcccctcctcccagcggcggcagcccagccggctccccaacctctaccgaggagggcacctctgagtccgccacccccgagagcggccctggcacctccaccgagcccagcgagggcagcgcacccggcagccctgccggcagccccacctccacagaggagggaaccagcaccgagcccagcgaaggcagcgccccaggcaccagcaccgagcctagtgagggcggctctggcggcggcagcgcccaggagattaaacggatcaacaagatcagaagaagacttgtgaaagacagcaacaccaagaaggccggcaagacaggccccatgaaaaccctgctggttagagtgatgacacccgatctgagagagcggctggaaaacctgagaaagaagcctgaaaatatcccccagcccatcagcaatacatctagagccaacctgaataagctgctgaccgattacaccgaaatgaagaaggcgatcctgcatgtgtactgggaagagttccagaaggaccctgtgggcctgatgagccgggtggcccagcctgccagcaagaagatcgatcagaacaagctgaaacctgagatggacgagaagggcaacctgaccaccgccggctttgcctgctctcagtgtggccagcccctgttcgtgtacaagctggagcaggtgtctgagaagggcaaggcttacaccaactacttcggacggtgcaatgtggccgagcacgaaaagctgatcctgctggcccagctgaagcccgagaaggatagcgacgaagccgtgacatatagcctgggaaagtttgggcagagggccctggatttctacagcattcatgtgaccaaggagtccacccaccccgtgaagcccctggcccagatcgccggaaacagatacgcctccggacctgtgggaaaggccctgagcgacgcatgtatgggcacaatcgcctccttcctgtctaagtaccaggacatcatcatcgaacaccagaaggtggtgaagggcaaccagaagagactggagagcctgcgggagctggccggcaaggaaaacctggaataccctagcgtgaccctgccacctcagcctcacaccaaggagggcgttgatgcctacaacgaagtgatcgcccgggtgcgaatgtgggtgaacctgaacctgtggcagaagctgaagctaagcagagatgatgccaagcctctgctgagactgaagggattcccttcctttcctctggtcgagagacaggccaacgaagtggactggtgggacatggtgtgtaacgtgaagaagctgatcaacgagaaaaaggaggatggcaaggtgttttggcagaatctggctggctacaagagacaggaagccctgagaccatacctgagcagcgaggaagatcggaagaagggaaagaaattcgctcggtaccagctgggcgacctgctgctgcacctggaaaagaagcacggcgaggactggggaaaggtgtacgacgaggcctgggagcggattgacaagaaagtggaaggcctgagcaagcacatcaagctggaagaggaacggagaagcgaggacgcccagagcaaggccgccctgaccgactggctgcgggctaaggccagcttcgtgatcgagggcctgaaggaggccgacaaggacgagttctgcagatgcgagctgaagctgcagaagtggtacggggacctgcggggaaagcccttcgccatcgaagccgagaacagcatcctggacatcagcggcttcagcaagcagtacaactgtgccttcatctggcagaaggacggcgtgaagaagctgaacctgtacctgatcatcaactacttcaagggcggcaagctgcggttcaagaagatcaaacctgaagccttcgaagccaacagattctacaccgtgatcaacaaaaagagcggcgagatcgtgcccatggaggtgaacttcaacttcgacgaccccaacctgatcatcctgcctctggcctttggcaagagacagggcagagaattcatctggaacgacctgctgtccctggaaaccggcagcctgaagctggccaacggaagagtgatcgagaagacactgtacaacagaagaacccggcaggatgagcctgccctgttcgtggccctgaccttcgagcggcgggaggtcctggactcctccaatatcaaaccaatgaacctgatcggcgtggcaagaggcgaaaacatccccgccgtgatcgccctgaccgaccccgagggctgcccactgagccggtttaaggatagcctgggaaacccaacccacatcctgagaatcggcgagagctataaggagaagcagcggaccatccaggccaagaaggaggtggagcagcggagagccggcggctacagccggaagtacgccagcaaagccaagaatctggcagacgatatggtgagaaacaccgctagagatctgctgtactacgccgtgacccaggatgccatgctgatcttcgccaacctgagccggggcttcggccggcagggcaagcggaccttcatggccgagagacagtacacacggatggaggactggctgaccgccaagctggcctacgagggcctgagcaagacctacctgtccaagacactggcccagtacacctccaagacatgcagcaactgtgggtttaccatcaccagcgccgactacgacagggtgctggagaagctgaagaagacagcaacaggctggatgaccacaattaacggcaaggagctgaaggtggagggccagattacctactacaacagatacaagagacagaacgtagtcaaggacctgtccgtcgagctggatagactgagcgaagaatctgtgaacaacgacatctcctcctggacaaagggcagaagcggagaagctctgagcctcctgaagaaaagattctcccatagacccgtgcaggagaagttcgtgtgcctgaactgcggcttcgagacacacgcagccgagcaagccgccctgaacatcgccagatcctggctgttcctgcggagccaggagtacaagaaataccagacaaacaagacaaccggcaacaccgataagagagccttcgtcgagacctggcagtccttttaccggaagaagcttaaggaggtgtggaaacctgccgtgcggtctggcggatctggcggaggctccacaagcatggccgccatgcccctgaaggccaggtaccaggagatggtgaccttcgaggacgtggccgtgcacttcaccaagaccgagtggaccggcctgagccccgcccagagggccctgtacaggagcgtgatgctggagaacttcggcaacctgaccgccctgggctaccccgtgcccaagcccgccctgatcagcctgctggagggcggcgacatggactggggcctggaggcccaggacgaccccaccagccccaagaaaaagagaaaagtctaagctgccttctgcggggcttgccttctggccatgcccttcttctctcccttgcacctgtacctcttggtctttgaataaagcctgagtaggaaggctagcaaaaaaaaaaaaaaaaaaaaaaaaaaaaaaaaaaaaaaaaaaaaaaaaaaaaaaaaaaaaaaaaaaaaaaaaaaaaaaaa

SEQ ID NO: 2653 - RNA, 5419 nt, synthetic construct
  source 1..5419: mol_type = other RNA
aggaaataagagagaaaagaagagtaagaagaaatataagagccaccatggcccctaagaagaagcgtaaagtgagccgggtgaacggcagcggcagcggcggcggcatgaaccacgaccaggagttcgacccccctaaggtgtaccctcccgtccccgccgagaagagaaagcccatccgggtcctgagcctgttcgatggcatcgccaccggtctgctggtgctgaaggacctgggcatccaggtggataggtacattgcctccgaggtgtgcgaggactccatcaccgtgggaatggtgcgtcatcagggcaagatcatgtacgtgggcgacgtgcggagcgtgacacagaagcatatccaggagtggggccctttcgacctggtgatcggcggcagcccttgcaatgacctgagcatcgtgaacccagcccggaagggcctgtacgagggaaccggcagactgttcttcgagttttacagactgctgcacgacgcccggcctaaggaaggcgacgaccggcccttcttttggctgttcgagaatgtggtggccatgggagtcagcgacaagcgggatattagccggttcctggagagcaaccccgtgatgatcgatgccaaggaagtgagcgccgcccaccgggccagatacttctggggcaatctgcctggcatgaacagacccctggccagcaccgtgaacgacaagctggagctgcaggagtgcctggagcacggccggatcgccaagttcagcaaggtgagaaccatcaccacccgaagcaacagcatcaaacaaggcaaggaccagcactttcctgtgttcatgaacgagaaggaggacatcctgtggtgtaccgagatggagagagtgttcgggttcccagtccactacacagatgtcagcaacatgtctagactggccagacagagactgctgggaagaagctggtccgtccctgtgatcagacacctgttcgcccctctgaaggagtacttcgcctgcgtgagcagcggcaacagcaacgccaacagccggggccccagcttctctagcggcctggtgccactgtccctgagagggagccacatgggccccatggagatctacaaaaccgtgagcgcctggaagcggcagcctgtgcgcgtgctgagcctgtttcggaatatcgataaagtcctgaaaagcctgggattcctggagagcggctctggctccggcggtggcaccctgaagtacgtggaggatgtgacaaacgtggtcagacgggatgtggagaagtggggccccttcgatctggtgtacggcagcacccaacccctgggcagctcttgtgaccggtgccctggctggtacatgtttcagttccaccggatcctgcagtacgccctgccgagacaggagtcccagcggccattcttttggattttcatggacaacttgctgctgaccgaggatgaccaggaaactaccactcggttcctgcagaccgaagccgtgaccctgcaggacgtgagaggccgggactaccagaacgccatgcgggtgtggtccaacatccctggactgaaaagcaagcacgcacctctgacccctaaagaagaggagtacctgcaggcccaggtgcggagcagaagcaagctggacgcccctaaggtggatctgctggtgaagaattgcctcctgcccctgagagagtacttcaagtatttcagccagaatagtctgcccctgggcggcccaagcagcggcgcccctcctcccagcggcggcagcccagccggctccccaacctctaccgaggagggcacctctgagtccgccacccccgagagcggccctggcacctccaccgagcccagcgagggcagcgcacccggcagccctgccggcagccccacctccacagaggagggaaccagcaccgagcccagcgaaggcagcgccccaggcaccagcaccgagcctagtgagggcggctctggcggcggcagcgcccaggagattaaacggatcaacaagatcagaagaagacttgtgaaagacagcaacaccaagaaggccggcaagacaggccccatgaaaaccctgctggttagagtgatgacacccgatctgagagagcggctggaaaacctgagaaagaagcctgaaaatatcccccagcccatcagcaatacatctagagccaacctgaataagctgctgaccgattacaccgaaatgaagaaggcgatcctgcatgtgtactgggaagagttccagaaggaccctgtgggcctgatgagccgggtggcccagcctgccagcaagaagatcgatcagaacaagctgaaacctgagatggacgagaagggcaacctgaccaccgccggctttgcctgctctcagtgtggccagcccctgttcgtgtacaagctggagcaggtgtctgagaagggcaaggcttacaccaactacttcggacggtgcaatgtggccgagcacgaaaagctgatcctgctggcccagctgaagcccgagaaggatagcgacgaagccgtgacatatagcctgggaaagtttgggcagagggccctggatttctacagcattcatgtgaccaaggagtccacccaccccgtgaagcccctggcccagatcgccggaaacagatacgcctccggacctgtgggaaaggccctgagcgacgcatgtatgggcacaatcgcctccttcctgtctaagtaccaggacatcatcatcgaacaccagaaggtggtgaagggcaaccagaagagactggagagcctgcgggagctggccggcaaggaaaacctggaataccctagcgtgaccctgccacctcagcctcacaccaaggagggcgttgatgcctacaacgaagtgatcgcccgggtgcgaatgtgggtgaacctgaacctgtggcagaagctgaagctaagcagagatgatgccaagcctctgctgagactgaagggattcccttcctttcctctggtcgagagacaggccaacgaagtggactggtgggacatggtgtgtaacgtgaagaagctgatcaacgagaaaaaggaggatggcaaggtgttttggcagaatctggctggctacaagagacaggaagccctgagaccatacctgagcagcgaggaagatcggaagaagggaaagaaattcgctcggtaccagctgggcgacctgctgctgcacctggaaaagaagcacggcgaggactggggaaaggtgtacgacgaggcctgggagcggattgacaagaaagtggaaggcctgagcaagcacatcaagctggaagaggaacggagaagcgaggacgcccagagcaaggccgccctgaccgactggctgcgggctaaggccagcttcgtgatcgagggcctgaaggaggccgacaaggacgagttctgcagatgcgagctgaagctgcagaagtggtacggggacctgcggggaaagcccttcgccatcgaagccgagaacagcatcctggacatcagcggcttcagcaagcagtacaactgtgccttcatctggcagaaggacggcgtgaagaagctgaacctgtacctgatcatcaactacttcaagggcggcaagctgcggttcaagaagatcaaacctgaagccttcgaagccaacagattctacaccgtgatcaacaaaaagagcggcgagatcgtgcccatggaggtgaacttcaacttcgacgaccccaacctgatcatcctgcctctggcctttggcaagagacagggcagagaattcatctggaacgacctgctgtccctggaaaccggcagcctgaagctggccaacggaagagtgatcgagaagacactgtacaacagaagaacccggcaggatgagcctgccctgttcgtggccctgaccttcgagcggcgggaggtcctggactcctccaatatcaaaccaatgaacctgatcggcgtggcaagaggcgaaaacatccccgccgtgatcgccctgaccgaccccgagggctgcccactgagccggtttaaggatagcctgggaaacccaacccacatcctgagaatcggcgagagctataaggagaagcagcggaccatccaggccaagaaggaggtggagcagcggagagccggcggctacagccggaagtacgccagcaaagccaagaatctggcagacgatatggtgagaaacaccgctagagatctgctgtactacgccgtgacccaggatgccatgctgatcttcgccaacctgagccggggcttcggccggcagggcaagcggaccttcatggccgagagacagtacacacggatggaggactggctgaccgccaagctggcctacgagggcctgagcaagacctacctgtccaagacactggcccagtacacctccaagacatgcagcaactgtgggtttaccatcaccagcgccgactacgacagggtgctggagaagctgaagaagacagcaacaggctggatgaccacaattaacggcaaggagctgaaggtggagggccagattacctactacaacagatacaagagacagaacgtagtcaaggacctgtccgtcgagctggatagactgagcgaagaatctgtgaacaacgacatctcctcctggacaaagggcagaagcggagaagctctgagcctcctgaagaaaagattctcccatagacccgtgcaggagaagttcgtgtgcctgaactgcggcttcgagacacacgcagccgagcaagccgccctgaacatcgccagatcctggctgttcctgcggagccaggagtacaagaaataccagacaaacaagacaaccggcaacaccgataagagagccttcgtcgagacctggcagtccttttaccggaagaagcttaaggaggtgtggaaacctgccgtgcggtctggcggatctggcggaggctccacaagccaggccgaggtgaccttcgaggacgtggccgtgctgctgagcagggaggagtggggcaggctgggccccgtgcagaagggcctgtacagggacgtgatgctggagacctacaggaacctggtgagcctgggcgccggccccgccggccccaagcccgaggtgatcacccagctggagaggggcgacgagccctgggtgcccgacgtgcagggcagggagcagcccaccatcgacggcagcgccaccagccccaagaaaaagagaaaagtctaagctgccttctgcggggcttgccttctggccatgcccttcttctctcccttgcacctgtacctcttggtctttgaataaagcctgagtaggaaggctagcaaaaaaaaaaaaaaaaaaaaaaaaaaaaaaaaaaaaaaaaaaaaaaaaaaaaaaaaaaaaaaaaaaaaaaaaaaaaaaaa

SEQ ID NO: 2654 - RNA, 5419 nt, synthetic construct
  source 1..5419: mol_type = other RNA
aggaaataagagagaaaagaagagtaagaagaaatataagagccaccatggcccctaagaagaagcgtaaagtgagccgggtgaacggcagcggcagcggcggcggcatgaaccacgaccaggagttcgacccccctaaggtgtaccctcccgtccccgccgagaagagaaagcccatccgggtcctgagcctgttcgatggcatcgccaccggtctgctggtgctgaaggacctgggcatccaggtggataggtacattgcctccgaggtgtgcgaggactccatcaccgtgggaatggtgcgtcatcagggcaagatcatgtacgtgggcgacgtgcggagcgtgacacagaagcatatccaggagtggggccctttcgacctggtgatcggcggcagcccttgcaatgacctgagcatcgtgaacccagcccggaagggcctgtacgagggaaccggcagactgttcttcgagttttacagactgctgcacgacgcccggcctaaggaaggcgacgaccggcccttcttttggctgttcgagaatgtggtggccatgggagtcagcgacaagcgggatattagccggttcctggagagcaaccccgtgatgatcgatgccaaggaagtgagcgccgcccaccgggccagatacttctggggcaatctgcctggcatgaacagacccctggccagcaccgtgaacgacaagctggagctgcaggagtgcctggagcacggccggatcgccaagttcagcaaggtgagaaccatcaccacccgaagcaacagcatcaaacaaggcaaggaccagcactttcctgtgttcatgaacgagaaggaggacatcctgtggtgtaccgagatggagagagtgttcgggttcccagtccactacacagatgtcagcaacatgtctagactggccagacagagactgctgggaagaagctggtccgtccctgtgatcagacacctgttcgcccctctgaaggagtacttcgcctgcgtgagcagcggcaacagcaacgccaacagccggggccccagcttctctagcggcctggtgccactgtccctgagagggagccacatgggccccatggagatctacaaaaccgtgagcgcctggaagcggcagcctgtgcgcgtgctgagcctgtttcggaatatcgataaagtcctgaaaagcctgggattcctggagagcggctctggctccggcggtggcaccctgaagtacgtggaggatgtgacaaacgtggtcagacgggatgtggagaagtggggccccttcgatctggtgtacggcagcacccaacccctgggcagctcttgtgaccggtgccctggctggtacatgtttcagttccaccggatcctgcagtacgccctgccgagacaggagtcccagcggccattcttttggattttcatggacaacttgctgctgaccgaggatgaccaggaaactaccactcggttcctgcagaccgaagccgtgaccctgcaggacgtgagaggccgggactaccagaacgccatgcgggtgtggtccaacatccctggactgaaaagcaagcacgcacctctgacccctaaagaagaggagtacctgcaggcccaggtgcggagcagaagcaagctggacgcccctaaggtggatctgctggtgaagaattgcctcctgcccctgagagagtacttcaagtatttcagccagaatagtctgcccctgggcggcccaagcagcggcgcccctcctcccagcggcggcagcccagccggctccccaacctctaccgaggagggcacctctgagtccgccacccccgagagcggccctggcacctccaccgagcccagcgagggcagcgcacccggcagccctgccggcagccccacctccacagaggagggaaccagcaccgagcccagcgaaggcagcgccccaggcaccagcaccgagcctagtgagggcggctctggcggcggcagcgcccaggagattaaacggatcaacaagatcagaagaagacttgtgaaagacagcaacaccaagaaggccggcaagacaggccccatgaaaaccctgctggttagagtgatgacacccgatctgagagagcggctggaaaacctgagaaagaagcctgaaaatatcccccagcccatcagcaatacatctagagccaacctgaataagctgctgaccgattacaccgaaatgaagaaggcgatcctgcatgtgtactgggaagagttccagaaggaccctgtgggcctgatgagccgggtggcccagcctgccagcaagaagatcgatcagaacaagctgaaacctgagatggacgagaagggcaacctgaccaccgccggctttgcctgctctcagtgtggccagcccctgttcgtgtacaagctggagcaggtgtctgagaagggcaaggcttacaccaactacttcggacggtgcaatgtggccgagcacgaaaagctgatcctgctggcccagctgaagcccgagaaggatagcgacgaagccgtgacatatagcctgggaaagtttgggcagagggccctggatttctacagcattcatgtgaccaaggagtccacccaccccgtgaagcccctggcccagatcgccggaaacagatacgcctccggacctgtgggaaaggccctgagcgacgcatgtatgggcacaatcgcctccttcctgtctaagtaccaggacatcatcatcgaacaccagaaggtggtgaagggcaaccagaagagactggagagcctgcgggagctggccggcaaggaaaacctggaataccctagcgtgaccctgccacctcagcctcacaccaaggagggcgttgatgcctacaacgaagtgatcgcccgggtgcgaatgtgggtgaacctgaacctgtggcagaagctgaagctaagcagagatgatgccaagcctctgctgagactgaagggattcccttcctttcctctggtcgagagacaggccaacgaagtggactggtgggacatggtgtgtaacgtgaagaagctgatcaacgagaaaaaggaggatggcaaggtgttttggcagaatctggctggctacaagagacaggaagccctgagaccatacctgagcagcgaggaagatcggaagaagggaaagaaattcgctcggtaccagctgggcgacctgctgctgcacctggaaaagaagcacggcgaggactggggaaaggtgtacgacgaggcctgggagcggattgacaagaaagtggaaggcctgagcaagcacatcaagctggaagaggaacggagaagcgaggacgcccagagcaaggccgccctgaccgactggctgcgggctaaggccagcttcgtgatcgagggcctgaaggaggccgacaaggacgagttctgcagatgcgagctgaagctgcagaagtggtacggggacctgcggggaaagcccttcgccatcgaagccgagaacagcatcctggacatcagcggcttcagcaagcagtacaactgtgccttcatctggcagaaggacggcgtgaagaagctgaacctgtacctgatcatcaactacttcaagggcggcaagctgcggttcaagaagatcaaacctgaagccttcgaagccaacagattctacaccgtgatcaacaaaaagagcggcgagatcgtgcccatggaggtgaacttcaacttcgacgaccccaacctgatcatcctgcctctggcctttggcaagagacagggcagagaattcatctggaacgacctgctgtccctggaaaccggcagcctgaagctggccaacggaagagtgatcgagaagacactgtacaacagaagaacccggcaggatgagcctgccctgttcgtggccctgaccttcgagcggcgggaggtcctggactcctccaatatcaaaccaatgaacctgatcggcgtggcaagaggcgaaaacatccccgccgtgatcgccctgaccgaccccgagggctgcccactgagccggtttaaggatagcctgggaaacccaacccacatcctgagaatcggcgagagctataaggagaagcagcggaccatccaggccaagaaggaggtggagcagcggagagccggcggctacagccggaagtacgccagcaaagccaagaatctggcagacgatatggtgagaaacaccgctagagatctgctgtactacgccgtgacccaggatgccatgctgatcttcgccaacctgagccggggcttcggccggcagggcaagcggaccttcatggccgagagacagtacacacggatggaggactggctgaccgccaagctggcctacgagggcctgagcaagacctacctgtccaagacactggcccagtacacctccaagacatgcagcaactgtgggtttaccatcaccagcgccgactacgacagggtgctggagaagctgaagaagacagcaacaggctggatgaccacaattaacggcaaggagctgaaggtggagggccagattacctactacaacagatacaagagacagaacgtagtcaaggacctgtccgtcgagctggatagactgagcgaagaatctgtgaacaacgacatctcctcctggacaaagggcagaagcggagaagctctgagcctcctgaagaaaagattctcccatagacccgtgcaggagaagttcgtgtgcctgaactgcggcttcgagacacacgcagccgagcaagccgccctgaacatcgccagatcctggctgttcctgcggagccaggagtacaagaaataccagacaaacaagacaaccggcaacaccgataagagagccttcgtcgagacctggcagtccttttaccggaagaagcttaaggaggtgtggaaacctgccgtgcggtctggcggatctggcggaggctccacaagcgcccacggcagcgtgatcttcagcgacgtgagcatcgccttcagccaggaggagtgggagtacctggacctggagcagagggacctgtacagggacgtgatgctggagaactacagcaacctggtgagcctgggctgcttcatcagcaagcccaacgtgatcagcctgctggagcagggcaaggagccctggaaggtggtgaggaaggagaggaggtaccccgacatgggcatcaggtacgagaccagccccaagaaaaagagaaaagtctaagctgccttctgcggggcttgccttctggccatgcccttcttctctcccttgcacctgtacctcttggtctttgaataaagcctgagtaggaaggctagcaaaaaaaaaaaaaaaaaaaaaaaaaaaaaaaaaaaaaaaaaaaaaaaaaaaaaaaaaaaaaaaaaaaaaaaaaaaaaaaa

SEQ ID NO: 2655 - RNA, 5419 nt, synthetic construct
  source 1..5419: mol_type = other RNA
aggaaataagagagaaaagaagagtaagaagaaatataagagccaccatggcccctaagaagaagcgtaaagtgagccgggtgaacggcagcggcagcggcggcggcatgaaccacgaccaggagttcgacccccctaaggtgtaccctcccgtccccgccgagaagagaaagcccatccgggtcctgagcctgttcgatggcatcgccaccggtctgctggtgctgaaggacctgggcatccaggtggataggtacattgcctccgaggtgtgcgaggactccatcaccgtgggaatggtgcgtcatcagggcaagatcatgtacgtgggcgacgtgcggagcgtgacacagaagcatatccaggagtggggccctttcgacctggtgatcggcggcagcccttgcaatgacctgagcatcgtgaacccagcccggaagggcctgtacgagggaaccggcagactgttcttcgagttttacagactgctgcacgacgcccggcctaaggaaggcgacgaccggcccttcttttggctgttcgagaatgtggtggccatgggagtcagcgacaagcgggatattagccggttcctggagagcaaccccgtgatgatcgatgccaaggaagtgagcgccgcccaccgggccagatacttctggggcaatctgcctggcatgaacagacccctggccagcaccgtgaacgacaagctggagctgcaggagtgcctggagcacggccggatcgccaagttcagcaaggtgagaaccatcaccacccgaagcaacagcatcaaacaaggcaaggaccagcactttcctgtgttcatgaacgagaaggaggacatcctgtggtgtaccgagatggagagagtgttcgggttcccagtccactacacagatgtcagcaacatgtctagactggccagacagagactgctgggaagaagctggtccgtccctgtgatcagacacctgttcgcccctctgaaggagtacttcgcctgcgtgagcagcggcaacagcaacgccaacagccggggccccagcttctctagcggcctggtgccactgtccctgagagggagccacatgggccccatggagatctacaaaaccgtgagcgcctggaagcggcagcctgtgcgcgtgctgagcctgtttcggaatatcgataaagtcctgaaaagcctgggattcctggagagcggctctggctccggcggtggcaccctgaagtacgtggaggatgtgacaaacgtggtcagacgggatgtggagaagtggggccccttcgatctggtgtacggcagcacccaacccctgggcagctcttgtgaccggtgccctggctggtacatgtttcagttccaccggatcctgcagtacgccctgccgagacaggagtcccagcggccattcttttggattttcatggacaacttgctgctgaccgaggatgaccaggaaactaccactcggttcctgcagaccgaagccgtgaccctgcaggacgtgagaggccgggactaccagaacgccatgcgggtgtggtccaacatccctggactgaaaagcaagcacgcacctctgacccctaaagaagaggagtacctgcaggcccaggtgcggagcagaagcaagctggacgcccctaaggtggatctgctggtgaagaattgcctcctgcccctgagagagtacttcaagtatttcagccagaatagtctgcccctgggcggcccaagcagcggcgcccctcctcccagcggcggcagcccagccggctccccaacctctaccgaggagggcacctctgagtccgccacccccgagagcggccctggcacctccaccgagcccagcgagggcagcgcacccggcagccctgccggcagccccacctccacagaggagggaaccagcaccgagcccagcgaaggcagcgccccaggcaccagcaccgagcctagtgagggcggctctggcggcggcagcgcccaggagattaaacggatcaacaagatcagaagaagacttgtgaaagacagcaacaccaagaaggccggcaagacaggccccatgaaaaccctgctggttagagtgatgacacccgatctgagagagcggctggaaaacctgagaaagaagcctgaaaatatcccccagcccatcagcaatacatctagagccaacctgaataagctgctgaccgattacaccgaaatgaagaaggcgatcctgcatgtgtactgggaagagttccagaaggaccctgtgggcctgatgagccgggtggcccagcctgccagcaagaagatcgatcagaacaagctgaaacctgagatggacgagaagggcaacctgaccaccgccggctttgcctgctctcagtgtggccagcccctgttcgtgtacaagctggagcaggtgtctgagaagggcaaggcttacaccaactacttcggacggtgcaatgtggccgagcacgaaaagctgatcctgctggcccagctgaagcccgagaaggatagcgacgaagccgtgacatatagcctgggaaagtttgggcagagggccctggatttctacagcattcatgtgaccaaggagtccacccaccccgtgaagcccctggcccagatcgccggaaacagatacgcctccggacctgtgggaaaggccctgagcgacgcatgtatgggcacaatcgcctccttcctgtctaagtaccaggacatcatcatcgaacaccagaaggtggtgaagggcaaccagaagagactggagagcctgcgggagctggccggcaaggaaaacctggaataccctagcgtgaccctgccacctcagcctcacaccaaggagggcgttgatgcctacaacgaagtgatcgcccgggtgcgaatgtgggtgaacctgaacctgtggcagaagctgaagctaagcagagatgatgccaagcctctgctgagactgaagggattcccttcctttcctctggtcgagagacaggccaacgaagtggactggtgggacatggtgtgtaacgtgaagaagctgatcaacgagaaaaaggaggatggcaaggtgttttggcagaatctggctggctacaagagacaggaagccctgagaccatacctgagcagcgaggaagatcggaagaagggaaagaaattcgctcggtaccagctgggcgacctgctgctgcacctggaaaagaagcacggcgaggactggggaaaggtgtacgacgaggcctgggagcggattgacaagaaagtggaaggcctgagcaagcacatcaagctggaagaggaacggagaagcgaggacgcccagagcaaggccgccctgaccgactggctgcgggctaaggccagcttcgtgatcgagggcctgaaggaggccgacaaggacgagttctgcagatgcgagctgaagctgcagaagtggtacggggacctgcggggaaagcccttcgccatcgaagccgagaacagcatcctggacatcagcggcttcagcaagcagtacaactgtgccttcatctggcagaaggacggcgtgaagaagctgaacctgtacctgatcatcaactacttcaagggcggcaagctgcggttcaagaagatcaaacctgaagccttcgaagccaacagattctacaccgtgatcaacaaaaagagcggcgagatcgtgcccatggaggtgaacttcaacttcgacgaccccaacctgatcatcctgcctctggcctttggcaagagacagggcagagaattcatctggaacgacctgctgtccctggaaaccggcagcctgaagctggccaacggaagagtgatcgagaagacactgtacaacagaagaacccggcaggatgagcctgccctgttcgtggccctgaccttcgagcggcgggaggtcctggactcctccaatatcaaaccaatgaacctgatcggcgtggcaagaggcgaaaacatccccgccgtgatcgccctgaccgaccccgagggctgcccactgagccggtttaaggatagcctgggaaacccaacccacatcctgagaatcggcgagagctataaggagaagcagcggaccatccaggccaagaaggaggtggagcagcggagagccggcggctacagccggaagtacgccagcaaagccaagaatctggcagacgatatggtgagaaacaccgctagagatctgctgtactacgccgtgacccaggatgccatgctgatcttcgccaacctgagccggggcttcggccggcagggcaagcggaccttcatggccgagagacagtacacacggatggaggactggctgaccgccaagctggcctacgagggcctgagcaagacctacctgtccaagacactggcccagtacacctccaagacatgcagcaactgtgggtttaccatcaccagcgccgactacgacagggtgctggagaagctgaagaagacagcaacaggctggatgaccacaattaacggcaaggagctgaaggtggagggccagattacctactacaacagatacaagagacagaacgtagtcaaggacctgtccgtcgagctggatagactgagcgaagaatctgtgaacaacgacatctcctcctggacaaagggcagaagcggagaagctctgagcctcctgaagaaaagattctcccatagacccgtgcaggagaagttcgtgtgcctgaactgcggcttcgagacacacgcagccgagcaagccgccctgaacatcgccagatcctggctgttcctgcggagccaggagtacaagaaataccagacaaacaagacaaccggcaacaccgataagagagccttcgtcgagacctggcagtccttttaccggaagaagcttaaggaggtgtggaaacctgccgtgcggtctggcggatctggcggaggctccacaagcaggcccggcgccgtgagcttcgccgacgtggccgtgtacttcagccccgaggagtggggctgcctgaggcccgcccagagggccctgtacagggacgtgatgagggagacctacggccacctgggcgccctgggcttcgccggcagcaagcccgccctgatcagctggctggagaggaagaaggaggtgtggagccccgaggccgaggaccccgaggacggcgccaggcaccccggcagcggcaccagccccaagaaaaagagaaaagtctaagctgccttctgcggggcttgccttctggccatgcccttcttctctcccttgcacctgtacctcttggtctttgaataaagcctgagtaggaaggctagcaaaaaaaaaaaaaaaaaaaaaaaaaaaaaaaaaaaaaaaaaaaaaaaaaaaaaaaaaaaaaaaaaaaaaaaaaaaaaaaa

SEQ ID NO: 2656 - RNA, 5419 nt, synthetic construct
  source 1..5419: mol_type = other RNA
aggaaataagagagaaaagaagagtaagaagaaatataagagccaccatggcccctaagaagaagcgtaaagtgagccgggtgaacggcagcggcagcggcggcggcatgaaccacgaccaggagttcgacccccctaaggtgtaccctcccgtccccgccgagaagagaaagcccatccgggtcctgagcctgttcgatggcatcgccaccggtctgctggtgctgaaggacctgggcatccaggtggataggtacattgcctccgaggtgtgcgaggactccatcaccgtgggaatggtgcgtcatcagggcaagatcatgtacgtgggcgacgtgcggagcgtgacacagaagcatatccaggagtggggccctttcgacctggtgatcggcggcagcccttgcaatgacctgagcatcgtgaacccagcccggaagggcctgtacgagggaaccggcagactgttcttcgagttttacagactgctgcacgacgcccggcctaaggaaggcgacgaccggcccttcttttggctgttcgagaatgtggtggccatgggagtcagcgacaagcgggatattagccggttcctggagagcaaccccgtgatgatcgatgccaaggaagtgagcgccgcccaccgggccagatacttctggggcaatctgcctggcatgaacagacccctggccagcaccgtgaacgacaagctggagctgcaggagtgcctggagcacggccggatcgccaagttcagcaaggtgagaaccatcaccacccgaagcaacagcatcaaacaaggcaaggaccagcactttcctgtgttcatgaacgagaaggaggacatcctgtggtgtaccgagatggagagagtgttcgggttcccagtccactacacagatgtcagcaacatgtctagactggccagacagagactgctgggaagaagctggtccgtccctgtgatcagacacctgttcgcccctctgaaggagtacttcgcctgcgtgagcagcggcaacagcaacgccaacagccggggccccagcttctctagcggcctggtgccactgtccctgagagggagccacatgggccccatggagatctacaaaaccgtgagcgcctggaagcggcagcctgtgcgcgtgctgagcctgtttcggaatatcgataaagtcctgaaaagcctgggattcctggagagcggctctggctccggcggtggcaccctgaagtacgtggaggatgtgacaaacgtggtcagacgggatgtggagaagtggggccccttcgatctggtgtacggcagcacccaacccctgggcagctcttgtgaccggtgccctggctggtacatgtttcagttccaccggatcctgcagtacgccctgccgagacaggagtcccagcggccattcttttggattttcatggacaacttgctgctgaccgaggatgaccaggaaactaccactcggttcctgcagaccgaagccgtgaccctgcaggacgtgagaggccgggactaccagaacgccatgcgggtgtggtccaacatccctggactgaaaagcaagcacgcacctctgacccctaaagaagaggagtacctgcaggcccaggtgcggagcagaagcaagctggacgcccctaaggtggatctgctggtgaagaattgcctcctgcccctgagagagtacttcaagtatttcagccagaatagtctgcccctgggcggcccaagcagcggcgcccctcctcccagcggcggcagcccagccggctccccaacctctaccgaggagggcacctctgagtccgccacccccgagagcggccctggcacctccaccgagcccagcgagggcagcgcacccggcagccctgccggcagccccacctccacagaggagggaaccagcaccgagcccagcgaaggcagcgccccaggcaccagcaccgagcctagtgagggcggctctggcggcggcagcgcccaggagattaaacggatcaacaagatcagaagaagacttgtgaaagacagcaacaccaagaaggccggcaagacaggccccatgaaaaccctgctggttagagtgatgacacccgatctgagagagcggctggaaaacctgagaaagaagcctgaaaatatcccccagcccatcagcaatacatctagagccaacctgaataagctgctgaccgattacaccgaaatgaagaaggcgatcctgcatgtgtactgggaagagttccagaaggaccctgtgggcctgatgagccgggtggcccagcctgccagcaagaagatcgatcagaacaagctgaaacctgagatggacgagaagggcaacctgaccaccgccggctttgcctgctctcagtgtggccagcccctgttcgtgtacaagctggagcaggtgtctgagaagggcaaggcttacaccaactacttcggacggtgcaatgtggccgagcacgaaaagctgatcctgctggcccagctgaagcccgagaaggatagcgacgaagccgtgacatatagcctgggaaagtttgggcagagggccctggatttctacagcattcatgtgaccaaggagtccacccaccccgtgaagcccctggcccagatcgccggaaacagatacgcctccggacctgtgggaaaggccctgagcgacgcatgtatgggcacaatcgcctccttcctgtctaagtaccaggacatcatcatcgaacaccagaaggtggtgaagggcaaccagaagagactggagagcctgcgggagctggccggcaaggaaaacctggaataccctagcgtgaccctgccacctcagcctcacaccaaggagggcgttgatgcctacaacgaagtgatcgcccgggtgcgaatgtgggtgaacctgaacctgtggcagaagctgaagctaagcagagatgatgccaagcctctgctgagactgaagggattcccttcctttcctctggtcgagagacaggccaacgaagtggactggtgggacatggtgtgtaacgtgaagaagctgatcaacgagaaaaaggaggatggcaaggtgttttggcagaatctggctggctacaagagacaggaagccctgagaccatacctgagcagcgaggaagatcggaagaagggaaagaaattcgctcggtaccagctgggcgacctgctgctgcacctggaaaagaagcacggcgaggactggggaaaggtgtacgacgaggcctgggagcggattgacaagaaagtggaaggcctgagcaagcacatcaagctggaagaggaacggagaagcgaggacgcccagagcaaggccgccctgaccgactggctgcgggctaaggccagcttcgtgatcgagggcctgaaggaggccgacaaggacgagttctgcagatgcgagctgaagctgcagaagtggtacggggacctgcggggaaagcccttcgccatcgaagccgagaacagcatcctggacatcagcggcttcagcaagcagtacaactgtgccttcatctggcagaaggacggcgtgaagaagctgaacctgtacctgatcatcaactacttcaagggcggcaagctgcggttcaagaagatcaaacctgaagccttcgaagccaacagattctacaccgtgatcaacaaaaagagcggcgagatcgtgcccatggaggtgaacttcaacttcgacgaccccaacctgatcatcctgcctctggcctttggcaagagacagggcagagaattcatctggaacgacctgctgtccctggaaaccggcagcctgaagctggccaacggaagagtgatcgagaagacactgtacaacagaagaacccggcaggatgagcctgccctgttcgtggccctgaccttcgagcggcgggaggtcctggactcctccaatatcaaaccaatgaacctgatcggcgtggcaagaggcgaaaacatccccgccgtgatcgccctgaccgaccccgagggctgcccactgagccggtttaaggatagcctgggaaacccaacccacatcctgagaatcggcgagagctataaggagaagcagcggaccatccaggccaagaaggaggtggagcagcggagagccggcggctacagccggaagtacgccagcaaagccaagaatctggcagacgatatggtgagaaacaccgctagagatctgctgtactacgccgtgacccaggatgccatgctgatcttcgccaacctgagccggggcttcggccggcagggcaagcggaccttcatggccgagagacagtacacacggatggaggactggctgaccgccaagctggcctacgagggcctgagcaagacctacctgtccaagacactggcccagtacacctccaagacatgcagcaactgtgggtttaccatcaccagcgccgactacgacagggtgctggagaagctgaagaagacagcaacaggctggatgaccacaattaacggcaaggagctgaaggtggagggccagattacctactacaacagatacaagagacagaacgtagtcaaggacctgtccgtcgagctggatagactgagcgaagaatctgtgaacaacgacatctcctcctggacaaagggcagaagcggagaagctctgagcctcctgaagaaaagattctcccatagacccgtgcaggagaagttcgtgtgcctgaactgcggcttcgagacacacgcagccgagcaagccgccctgaacatcgccagatcctggctgttcctgcggagccaggagtacaagaaataccagacaaacaagacaaccggcaacaccgataagagagccttcgtcgagacctggcagtccttttaccggaagaagcttaaggaggtgtggaaacctgccgtgcggtctggcggatctggcggaggctccacaagccaggccgaggtgaccttcgaggacgtggccgtgctgttcagcagggaggagtggggcaggctgggccccgcccagaggggcctgtacagggacgtgatgctggagacctacaggaacctggtgagcctgggcgccggccccgccggccccaagcccggcgtgatcacccagctggagaggggcgacgagccctgggtgctggacgcccagggcgccgagggcaaggagaggctgagggtgagcaccagccccaagaaaaagagaaaagtctaagctgccttctgcggggcttgccttctggccatgcccttcttctctcccttgcacctgtacctcttggtctttgaataaagcctgagtaggaaggctagcaaaaaaaaaaaaaaaaaaaaaaaaaaaaaaaaaaaaaaaaaaaaaaaaaaaaaaaaaaaaaaaaaaaaaaaaaaaaaaaa

SEQ ID NO: 2657 - RNA, 5419 nt, synthetic construct
  source 1..5419: mol_type = other RNA
aggaaataagagagaaaagaagagtaagaagaaatataagagccaccatggcccctaagaagaagcgtaaagtgagccgggtgaacggcagcggcagcggcggcggcatgaaccacgaccaggagttcgacccccctaaggtgtaccctcccgtccccgccgagaagagaaagcccatccgggtcctgagcctgttcgatggcatcgccaccggtctgctggtgctgaaggacctgggcatccaggtggataggtacattgcctccgaggtgtgcgaggactccatcaccgtgggaatggtgcgtcatcagggcaagatcatgtacgtgggcgacgtgcggagcgtgacacagaagcatatccaggagtggggccctttcgacctggtgatcggcggcagcccttgcaatgacctgagcatcgtgaacccagcccggaagggcctgtacgagggaaccggcagactgttcttcgagttttacagactgctgcacgacgcccggcctaaggaaggcgacgaccggcccttcttttggctgttcgagaatgtggtggccatgggagtcagcgacaagcgggatattagccggttcctggagagcaaccccgtgatgatcgatgccaaggaagtgagcgccgcccaccgggccagatacttctggggcaatctgcctggcatgaacagacccctggccagcaccgtgaacgacaagctggagctgcaggagtgcctggagcacggccggatcgccaagttcagcaaggtgagaaccatcaccacccgaagcaacagcatcaaacaaggcaaggaccagcactttcctgtgttcatgaacgagaaggaggacatcctgtggtgtaccgagatggagagagtgttcgggttcccagtccactacacagatgtcagcaacatgtctagactggccagacagagactgctgggaagaagctggtccgtccctgtgatcagacacctgttcgcccctctgaaggagtacttcgcctgcgtgagcagcggcaacagcaacgccaacagccggggccccagcttctctagcggcctggtgccactgtccctgagagggagccacatgggccccatggagatctacaaaaccgtgagcgcctggaagcggcagcctgtgcgcgtgctgagcctgtttcggaatatcgataaagtcctgaaaagcctgggattcctggagagcggctctggctccggcggtggcaccctgaagtacgtggaggatgtgacaaacgtggtcagacgggatgtggagaagtggggccccttcgatctggtgtacggcagcacccaacccctgggcagctcttgtgaccggtgccctggctggtacatgtttcagttccaccggatcctgcagtacgccctgccgagacaggagtcccagcggccattcttttggattttcatggacaacttgctgctgaccgaggatgaccaggaaactaccactcggttcctgcagaccgaagccgtgaccctgcaggacgtgagaggccgggactaccagaacgccatgcgggtgtggtccaacatccctggactgaaaagcaagcacgcacctctgacccctaaagaagaggagtacctgcaggcccaggtgcggagcagaagcaagctggacgcccctaaggtggatctgctggtgaagaattgcctcctgcccctgagagagtacttcaagtatttcagccagaatagtctgcccctgggcggcccaagcagcggcgcccctcctcccagcggcggcagcccagccggctccccaacctctaccgaggagggcacctctgagtccgccacccccgagagcggccctggcacctccaccgagcccagcgagggcagcgcacccggcagccctgccggcagccccacctccacagaggagggaaccagcaccgagcccagcgaaggcagcgccccaggcaccagcaccgagcctagtgagggcggctctggcggcggcagcgcccaggagattaaacggatcaacaagatcagaagaagacttgtgaaagacagcaacaccaagaaggccggcaagacaggccccatgaaaaccctgctggttagagtgatgacacccgatctgagagagcggctggaaaacctgagaaagaagcctgaaaatatcccccagcccatcagcaatacatctagagccaacctgaataagctgctgaccgattacaccgaaatgaagaaggcgatcctgcatgtgtactgggaagagttccagaaggaccctgtgggcctgatgagccgggtggcccagcctgccagcaagaagatcgatcagaacaagctgaaacctgagatggacgagaagggcaacctgaccaccgccggctttgcctgctctcagtgtggccagcccctgttcgtgtacaagctggagcaggtgtctgagaagggcaaggcttacaccaactacttcggacggtgcaatgtggccgagcacgaaaagctgatcctgctggcccagctgaagcccgagaaggatagcgacgaagccgtgacatatagcctgggaaagtttgggcagagggccctggatttctacagcattcatgtgaccaaggagtccacccaccccgtgaagcccctggcccagatcgccggaaacagatacgcctccggacctgtgggaaaggccctgagcgacgcatgtatgggcacaatcgcctccttcctgtctaagtaccaggacatcatcatcgaacaccagaaggtggtgaagggcaaccagaagagactggagagcctgcgggagctggccggcaaggaaaacctggaataccctagcgtgaccctgccacctcagcctcacaccaaggagggcgttgatgcctacaacgaagtgatcgcccgggtgcgaatgtgggtgaacctgaacctgtggcagaagctgaagctaagcagagatgatgccaagcctctgctgagactgaagggattcccttcctttcctctggtcgagagacaggccaacgaagtggactggtgggacatggtgtgtaacgtgaagaagctgatcaacgagaaaaaggaggatggcaaggtgttttggcagaatctggctggctacaagagacaggaagccctgagaccatacctgagcagcgaggaagatcggaagaagggaaagaaattcgctcggtaccagctgggcgacctgctgctgcacctggaaaagaagcacggcgaggactggggaaaggtgtacgacgaggcctgggagcggattgacaagaaagtggaaggcctgagcaagcacatcaagctggaagaggaacggagaagcgaggacgcccagagcaaggccgccctgaccgactggctgcgggctaaggccagcttcgtgatcgagggcctgaaggaggccgacaaggacgagttctgcagatgcgagctgaagctgcagaagtggtacggggacctgcggggaaagcccttcgccatcgaagccgagaacagcatcctggacatcagcggcttcagcaagcagtacaactgtgccttcatctggcagaaggacggcgtgaagaagctgaacctgtacctgatcatcaactacttcaagggcggcaagctgcggttcaagaagatcaaacctgaagccttcgaagccaacagattctacaccgtgatcaacaaaaagagcggcgagatcgtgcccatggaggtgaacttcaacttcgacgaccccaacctgatcatcctgcctctggcctttggcaagagacagggcagagaattcatctggaacgacctgctgtccctggaaaccggcagcctgaagctggccaacggaagagtgatcgagaagacactgtacaacagaagaacccggcaggatgagcctgccctgttcgtggccctgaccttcgagcggcgggaggtcctggactcctccaatatcaaaccaatgaacctgatcggcgtggcaagaggcgaaaacatccccgccgtgatcgccctgaccgaccccgagggctgcccactgagccggtttaaggatagcctgggaaacccaacccacatcctgagaatcggcgagagctataaggagaagcagcggaccatccaggccaagaaggaggtggagcagcggagagccggcggctacagccggaagtacgccagcaaagccaagaatctggcagacgatatggtgagaaacaccgctagagatctgctgtactacgccgtgacccaggatgccatgctgatcttcgccaacctgagccggggcttcggccggcagggcaagcggaccttcatggccgagagacagtacacacggatggaggactggctgaccgccaagctggcctacgagggcctgagcaagacctacctgtccaagacactggcccagtacacctccaagacatgcagcaactgtgggtttaccatcaccagcgccgactacgacagggtgctggagaagctgaagaagacagcaacaggctggatgaccacaattaacggcaaggagctgaaggtggagggccagattacctactacaacagatacaagagacagaacgtagtcaaggacctgtccgtcgagctggatagactgagcgaagaatctgtgaacaacgacatctcctcctggacaaagggcagaagcggagaagctctgagcctcctgaagaaaagattctcccatagacccgtgcaggagaagttcgtgtgcctgaactgcggcttcgagacacacgcagccgagcaagccgccctgaacatcgccagatcctggctgttcctgcggagccaggagtacaagaaataccagacaaacaagacaaccggcaacaccgataagagagccttcgtcgagacctggcagtccttttaccggaagaagcttaaggaggtgtggaaacctgccgtgcggtctggcggatctggcggaggctccacaagcagccagggccccgtgagcttcgaggacgtggccgtggacttcacccaggaggagtggcagcagctggaccccgcccagaggaccctgtacagggacgtgatgctggagaactacagccacctggtgagcgtgggctaccccgtgagcaagcccggcgtgatcagcaagctggagcagggcgaggagccctggatcatgaagagggacatcagcaactggatctaccccgacagggagaccaggaccagccccaagaaaaagagaaaagtctaagctgccttctgcggggcttgccttctggccatgcccttcttctctcccttgcacctgtacctcttggtctttgaataaagcctgagtaggaaggctagcaaaaaaaaaaaaaaaaaaaaaaaaaaaaaaaaaaaaaaaaaaaaaaaaaaaaaaaaaaaaaaaaaaaaaaaaaaaaaaaa

SEQ ID NO: 2658 - RNA, 5419 nt, synthetic construct
  source 1..5419: mol_type = other RNA
aggaaataagagagaaaagaagagtaagaagaaatataagagccaccatggcccctaagaagaagcgtaaagtgagccgggtgaacggcagcggcagcggcggcggcatgaaccacgaccaggagttcgacccccctaaggtgtaccctcccgtccccgccgagaagagaaagcccatccgggtcctgagcctgttcgatggcatcgccaccggtctgctggtgctgaaggacctgggcatccaggtggataggtacattgcctccgaggtgtgcgaggactccatcaccgtgggaatggtgcgtcatcagggcaagatcatgtacgtgggcgacgtgcggagcgtgacacagaagcatatccaggagtggggccctttcgacctggtgatcggcggcagcccttgcaatgacctgagcatcgtgaacccagcccggaagggcctgtacgagggaaccggcagactgttcttcgagttttacagactgctgcacgacgcccggcctaaggaaggcgacgaccggcccttcttttggctgttcgagaatgtggtggccatgggagtcagcgacaagcgggatattagccggttcctggagagcaaccccgtgatgatcgatgccaaggaagtgagcgccgcccaccgggccagatacttctggggcaatctgcctggcatgaacagacccctggccagcaccgtgaacgacaagctggagctgcaggagtgcctggagcacggccggatcgccaagttcagcaaggtgagaaccatcaccacccgaagcaacagcatcaaacaaggcaaggaccagcactttcctgtgttcatgaacgagaaggaggacatcctgtggtgtaccgagatggagagagtgttcgggttcccagtccactacacagatgtcagcaacatgtctagactggccagacagagactgctgggaagaagctggtccgtccctgtgatcagacacctgttcgcccctctgaaggagtacttcgcctgcgtgagcagcggcaacagcaacgccaacagccggggccccagcttctctagcggcctggtgccactgtccctgagagggagccacatgggccccatggagatctacaaaaccgtgagcgcctggaagcggcagcctgtgcgcgtgctgagcctgtttcggaatatcgataaagtcctgaaaagcctgggattcctggagagcggctctggctccggcggtggcaccctgaagtacgtggaggatgtgacaaacgtggtcagacgggatgtggagaagtggggccccttcgatctggtgtacggcagcacccaacccctgggcagctcttgtgaccggtgccctggctggtacatgtttcagttccaccggatcctgcagtacgccctgccgagacaggagtcccagcggccattcttttggattttcatggacaacttgctgctgaccgaggatgaccaggaaactaccactcggttcctgcagaccgaagccgtgaccctgcaggacgtgagaggccgggactaccagaacgccatgcgggtgtggtccaacatccctggactgaaaagcaagcacgcacctctgacccctaaagaagaggagtacctgcaggcccaggtgcggagcagaagcaagctggacgcccctaaggtggatctgctggtgaagaattgcctcctgcccctgagagagtacttcaagtatttcagccagaatagtctgcccctgggcggcccaagcagcggcgcccctcctcccagcggcggcagcccagccggctccccaacctctaccgaggagggcacctctgagtccgccacccccgagagcggccctggcacctccaccgagcccagcgagggcagcgcacccggcagccctgccggcagccccacctccacagaggagggaaccagcaccgagcccagcgaaggcagcgccccaggcaccagcaccgagcctagtgagggcggctctggcggcggcagcgcccaggagattaaacggatcaacaagatcagaagaagacttgtgaaagacagcaacaccaagaaggccggcaagacaggccccatgaaaaccctgctggttagagtgatgacacccgatctgagagagcggctggaaaacctgagaaagaagcctgaaaatatcccccagcccatcagcaatacatctagagccaacctgaataagctgctgaccgattacaccgaaatgaagaaggcgatcctgcatgtgtactgggaagagttccagaaggaccctgtgggcctgatgagccgggtggcccagcctgccagcaagaagatcgatcagaacaagctgaaacctgagatggacgagaagggcaacctgaccaccgccggctttgcctgctctcagtgtggccagcccctgttcgtgtacaagctggagcaggtgtctgagaagggcaaggcttacaccaactacttcggacggtgcaatgtggccgagcacgaaaagctgatcctgctggcccagctgaagcccgagaaggatagcgacgaagccgtgacatatagcctgggaaagtttgggcagagggccctggatttctacagcattcatgtgaccaaggagtccacccaccccgtgaagcccctggcccagatcgccggaaacagatacgcctccggacctgtgggaaaggccctgagcgacgcatgtatgggcacaatcgcctccttcctgtctaagtaccaggacatcatcatcgaacaccagaaggtggtgaagggcaaccagaagagactggagagcctgcgggagctggccggcaaggaaaacctggaataccctagcgtgaccctgccacctcagcctcacaccaaggagggcgttgatgcctacaacgaagtgatcgcccgggtgcgaatgtgggtgaacctgaacctgtggcagaagctgaagctaagcagagatgatgccaagcctctgctgagactgaagggattcccttcctttcctctggtcgagagacaggccaacgaagtggactggtgggacatggtgtgtaacgtgaagaagctgatcaacgagaaaaaggaggatggcaaggtgttttggcagaatctggctggctacaagagacaggaagccctgagaccatacctgagcagcgaggaagatcggaagaagggaaagaaattcgctcggtaccagctgggcgacctgctgctgcacctggaaaagaagcacggcgaggactggggaaaggtgtacgacgaggcctgggagcggattgacaagaaagtggaaggcctgagcaagcacatcaagctggaagaggaacggagaagcgaggacgcccagagcaaggccgccctgaccgactggctgcgggctaaggccagcttcgtgatcgagggcctgaaggaggccgacaaggacgagttctgcagatgcgagctgaagctgcagaagtggtacggggacctgcggggaaagcccttcgccatcgaagccgagaacagcatcctggacatcagcggcttcagcaagcagtacaactgtgccttcatctggcagaaggacggcgtgaagaagctgaacctgtacctgatcatcaactacttcaagggcggcaagctgcggttcaagaagatcaaacctgaagccttcgaagccaacagattctacaccgtgatcaacaaaaagagcggcgagatcgtgcccatggaggtgaacttcaacttcgacgaccccaacctgatcatcctgcctctggcctttggcaagagacagggcagagaattcatctggaacgacctgctgtccctggaaaccggcagcctgaagctggccaacggaagagtgatcgagaagacactgtacaacagaagaacccggcaggatgagcctgccctgttcgtggccctgaccttcgagcggcgggaggtcctggactcctccaatatcaaaccaatgaacctgatcggcgtggcaagaggcgaaaacatccccgccgtgatcgccctgaccgaccccgagggctgcccactgagccggtttaaggatagcctgggaaacccaacccacatcctgagaatcggcgagagctataaggagaagcagcggaccatccaggccaagaaggaggtggagcagcggagagccggcggctacagccggaagtacgccagcaaagccaagaatctggcagacgatatggtgagaaacaccgctagagatctgctgtactacgccgtgacccaggatgccatgctgatcttcgccaacctgagccggggcttcggccggcagggcaagcggaccttcatggccgagagacagtacacacggatggaggactggctgaccgccaagctggcctacgagggcctgagcaagacctacctgtccaagacactggcccagtacacctccaagacatgcagcaactgtgggtttaccatcaccagcgccgactacgacagggtgctggagaagctgaagaagacagcaacaggctggatgaccacaattaacggcaaggagctgaaggtggagggccagattacctactacaacagatacaagagacagaacgtagtcaaggacctgtccgtcgagctggatagactgagcgaagaatctgtgaacaacgacatctcctcctggacaaagggcagaagcggagaagctctgagcctcctgaagaaaagattctcccatagacccgtgcaggagaagttcgtgtgcctgaactgcggcttcgagacacacgcagccgagcaagccgccctgaacatcgccagatcctggctgttcctgcggagccaggagtacaagaaataccagacaaacaagacaaccggcaacaccgataagagagccttcgtcgagacctggcagtccttttaccggaagaagcttaaggaggtgtggaaacctgccgtgcggtctggcggatctggcggaggctccacaagcagccagggcctggtgaccttcggcgacgtggccatcgacttcagccaggaggagtgggagtggctgagccccatccagaggaacctgtacaggaaggtgatgctggagaactacaggaacctggccagcctgggcctgtgcgtgagcaagcccgacgtgatcagcctgctggagcagggcaaggagccctggaccgtgaagaggaagatgaccagggccggctgccccgacctgaaggccgtgaccagccccaagaaaaagagaaaagtctaagctgccttctgcggggcttgccttctggccatgcccttcttctctcccttgcacctgtacctcttggtctttgaataaagcctgagtaggaaggctagcaaaaaaaaaaaaaaaaaaaaaaaaaaaaaaaaaaaaaaaaaaaaaaaaaaaaaaaaaaaaaaaaaaaaaaaaaaaaaaaa

SEQ ID NO: 2659 - RNA, 5419 nt, synthetic construct
  source 1..5419: mol_type = other RNA
aggaaataagagagaaaagaagagtaagaagaaatataagagccaccatggcccctaagaagaagcgtaaagtgagccgggtgaacggcagcggcagcggcggcggcatgaaccacgaccaggagttcgacccccctaaggtgtaccctcccgtccccgccgagaagagaaagcccatccgggtcctgagcctgttcgatggcatcgccaccggtctgctggtgctgaaggacctgggcatccaggtggataggtacattgcctccgaggtgtgcgaggactccatcaccgtgggaatggtgcgtcatcagggcaagatcatgtacgtgggcgacgtgcggagcgtgacacagaagcatatccaggagtggggccctttcgacctggtgatcggcggcagcccttgcaatgacctgagcatcgtgaacccagcccggaagggcctgtacgagggaaccggcagactgttcttcgagttttacagactgctgcacgacgcccggcctaaggaaggcgacgaccggcccttcttttggctgttcgagaatgtggtggccatgggagtcagcgacaagcgggatattagccggttcctggagagcaaccccgtgatgatcgatgccaaggaagtgagcgccgcccaccgggccagatacttctggggcaatctgcctggcatgaacagacccctggccagcaccgtgaacgacaagctggagctgcaggagtgcctggagcacggccggatcgccaagttcagcaaggtgagaaccatcaccacccgaagcaacagcatcaaacaaggcaaggaccagcactttcctgtgttcatgaacgagaaggaggacatcctgtggtgtaccgagatggagagagtgttcgggttcccagtccactacacagatgtcagcaacatgtctagactggccagacagagactgctgggaagaagctggtccgtccctgtgatcagacacctgttcgcccctctgaaggagtacttcgcctgcgtgagcagcggcaacagcaacgccaacagccggggccccagcttctctagcggcctggtgccactgtccctgagagggagccacatgggccccatggagatctacaaaaccgtgagcgcctggaagcggcagcctgtgcgcgtgctgagcctgtttcggaatatcgataaagtcctgaaaagcctgggattcctggagagcggctctggctccggcggtggcaccctgaagtacgtggaggatgtgacaaacgtggtcagacgggatgtggagaagtggggccccttcgatctggtgtacggcagcacccaacccctgggcagctcttgtgaccggtgccctggctggtacatgtttcagttccaccggatcctgcagtacgccctgccgagacaggagtcccagcggccattcttttggattttcatggacaacttgctgctgaccgaggatgaccaggaaactaccactcggttcctgcagaccgaagccgtgaccctgcaggacgtgagaggccgggactaccagaacgccatgcgggtgtggtccaacatccctggactgaaaagcaagcacgcacctctgacccctaaagaagaggagtacctgcaggcccaggtgcggagcagaagcaagctggacgcccctaaggtggatctgctggtgaagaattgcctcctgcccctgagagagtacttcaagtatttcagccagaatagtctgcccctgggcggcccaagcagcggcgcccctcctcccagcggcggcagcccagccggctccccaacctctaccgaggagggcacctctgagtccgccacccccgagagcggccctggcacctccaccgagcccagcgagggcagcgcacccggcagccctgccggcagccccacctccacagaggagggaaccagcaccgagcccagcgaaggcagcgccccaggcaccagcaccgagcctagtgagggcggctctggcggcggcagcgcccaggagattaaacggatcaacaagatcagaagaagacttgtgaaagacagcaacaccaagaaggccggcaagacaggccccatgaaaaccctgctggttagagtgatgacacccgatctgagagagcggctggaaaacctgagaaagaagcctgaaaatatcccccagcccatcagcaatacatctagagccaacctgaataagctgctgaccgattacaccgaaatgaagaaggcgatcctgcatgtgtactgggaagagttccagaaggaccctgtgggcctgatgagccgggtggcccagcctgccagcaagaagatcgatcagaacaagctgaaacctgagatggacgagaagggcaacctgaccaccgccggctttgcctgctctcagtgtggccagcccctgttcgtgtacaagctggagcaggtgtctgagaagggcaaggcttacaccaactacttcggacggtgcaatgtggccgagcacgaaaagctgatcctgctggcccagctgaagcccgagaaggatagcgacgaagccgtgacatatagcctgggaaagtttgggcagagggccctggatttctacagcattcatgtgaccaaggagtccacccaccccgtgaagcccctggcccagatcgccggaaacagatacgcctccggacctgtgggaaaggccctgagcgacgcatgtatgggcacaatcgcctccttcctgtctaagtaccaggacatcatcatcgaacaccagaaggtggtgaagggcaaccagaagagactggagagcctgcgggagctggccggcaaggaaaacctggaataccctagcgtgaccctgccacctcagcctcacaccaaggagggcgttgatgcctacaacgaagtgatcgcccgggtgcgaatgtgggtgaacctgaacctgtggcagaagctgaagctaagcagagatgatgccaagcctctgctgagactgaagggattcccttcctttcctctggtcgagagacaggccaacgaagtggactggtgggacatggtgtgtaacgtgaagaagctgatcaacgagaaaaaggaggatggcaaggtgttttggcagaatctggctggctacaagagacaggaagccctgagaccatacctgagcagcgaggaagatcggaagaagggaaagaaattcgctcggtaccagctgggcgacctgctgctgcacctggaaaagaagcacggcgaggactggggaaaggtgtacgacgaggcctgggagcggattgacaagaaagtggaaggcctgagcaagcacatcaagctggaagaggaacggagaagcgaggacgcccagagcaaggccgccctgaccgactggctgcgggctaaggccagcttcgtgatcgagggcctgaaggaggccgacaaggacgagttctgcagatgcgagctgaagctgcagaagtggtacggggacctgcggggaaagcccttcgccatcgaagccgagaacagcatcctggacatcagcggcttcagcaagcagtacaactgtgccttcatctggcagaaggacggcgtgaagaagctgaacctgtacctgatcatcaactacttcaagggcggcaagctgcggttcaagaagatcaaacctgaagccttcgaagccaacagattctacaccgtgatcaacaaaaagagcggcgagatcgtgcccatggaggtgaacttcaacttcgacgaccccaacctgatcatcctgcctctggcctttggcaagagacagggcagagaattcatctggaacgacctgctgtccctggaaaccggcagcctgaagctggccaacggaagagtgatcgagaagacactgtacaacagaagaacccggcaggatgagcctgccctgttcgtggccctgaccttcgagcggcgggaggtcctggactcctccaatatcaaaccaatgaacctgatcggcgtggcaagaggcgaaaacatccccgccgtgatcgccctgaccgaccccgagggctgcccactgagccggtttaaggatagcctgggaaacccaacccacatcctgagaatcggcgagagctataaggagaagcagcggaccatccaggccaagaaggaggtggagcagcggagagccggcggctacagccggaagtacgccagcaaagccaagaatctggcagacgatatggtgagaaacaccgctagagatctgctgtactacgccgtgacccaggatgccatgctgatcttcgccaacctgagccggggcttcggccggcagggcaagcggaccttcatggccgagagacagtacacacggatggaggactggctgaccgccaagctggcctacgagggcctgagcaagacctacctgtccaagacactggcccagtacacctccaagacatgcagcaactgtgggtttaccatcaccagcgccgactacgacagggtgctggagaagctgaagaagacagcaacaggctggatgaccacaattaacggcaaggagctgaaggtggagggccagattacctactacaacagatacaagagacagaacgtagtcaaggacctgtccgtcgagctggatagactgagcgaagaatctgtgaacaacgacatctcctcctggacaaagggcagaagcggagaagctctgagcctcctgaagaaaagattctcccatagacccgtgcaggagaagttcgtgtgcctgaactgcggcttcgagacacacgcagccgagcaagccgccctgaacatcgccagatcctggctgttcctgcggagccaggagtacaagaaataccagacaaacaagacaaccggcaacaccgataagagagccttcgtcgagacctggcagtccttttaccggaagaagcttaaggaggtgtggaaacctgccgtgcggtctggcggatctggcggaggctccacaagcagccaggagctgctgaccttcaaggacatcagcgtggacttcacccaggaggagtggggccagctggcccccgcccacaggaacctgtacagggaggtgatgctggagaactacggcaacctggtgagcgtggccggctgccagctgagcaagcccagcgtgatcagccagctggagaagggcgaggagccctggatgaccgagaaggagggccccggcgaccccagcagcgacctgaagagcaccagccccaagaaaaagagaaaagtctaagctgccttctgcggggcttgccttctggccatgcccttcttctctcccttgcacctgtacctcttggtctttgaataaagcctgagtaggaaggctagcaaaaaaaaaaaaaaaaaaaaaaaaaaaaaaaaaaaaaaaaaaaaaaaaaaaaaaaaaaaaaaaaaaaaaaaaaaaaaaaa

SEQ ID NO: 2660 - RNA, 5419 nt, synthetic construct
  source 1..5419: mol_type = other RNA
aggaaataagagagaaaagaagagtaagaagaaatataagagccaccatggcccctaagaagaagcgtaaagtgagccgggtgaacggcagcggcagcggcggcggcatgaaccacgaccaggagttcgacccccctaaggtgtaccctcccgtccccgccgagaagagaaagcccatccgggtcctgagcctgttcgatggcatcgccaccggtctgctggtgctgaaggacctgggcatccaggtggataggtacattgcctccgaggtgtgcgaggactccatcaccgtgggaatggtgcgtcatcagggcaagatcatgtacgtgggcgacgtgcggagcgtgacacagaagcatatccaggagtggggccctttcgacctggtgatcggcggcagcccttgcaatgacctgagcatcgtgaacccagcccggaagggcctgtacgagggaaccggcagactgttcttcgagttttacagactgctgcacgacgcccggcctaaggaaggcgacgaccggcccttcttttggctgttcgagaatgtggtggccatgggagtcagcgacaagcgggatattagccggttcctggagagcaaccccgtgatgatcgatgccaaggaagtgagcgccgcccaccgggccagatacttctggggcaatctgcctggcatgaacagacccctggccagcaccgtgaacgacaagctggagctgcaggagtgcctggagcacggccggatcgccaagttcagcaaggtgagaaccatcaccacccgaagcaacagcatcaaacaaggcaaggaccagcactttcctgtgttcatgaacgagaaggaggacatcctgtggtgtaccgagatggagagagtgttcgggttcccagtccactacacagatgtcagcaacatgtctagactggccagacagagactgctgggaagaagctggtccgtccctgtgatcagacacctgttcgcccctctgaaggagtacttcgcctgcgtgagcagcggcaacagcaacgccaacagccggggccccagcttctctagcggcctggtgccactgtccctgagagggagccacatgggccccatggagatctacaaaaccgtgagcgcctggaagcggcagcctgtgcgcgtgctgagcctgtttcggaatatcgataaagtcctgaaaagcctgggattcctggagagcggctctggctccggcggtggcaccctgaagtacgtggaggatgtgacaaacgtggtcagacgggatgtggagaagtggggccccttcgatctggtgtacggcagcacccaacccctgggcagctcttgtgaccggtgccctggctggtacatgtttcagttccaccggatcctgcagtacgccctgccgagacaggagtcccagcggccattcttttggattttcatggacaacttgctgctgaccgaggatgaccaggaaactaccactcggttcctgcagaccgaagccgtgaccctgcaggacgtgagaggccgggactaccagaacgccatgcgggtgtggtccaacatccctggactgaaaagcaagcacgcacctctgacccctaaagaagaggagtacctgcaggcccaggtgcggagcagaagcaagctggacgcccctaaggtggatctgctggtgaagaattgcctcctgcccctgagagagtacttcaagtatttcagccagaatagtctgcccctgggcggcccaagcagcggcgcccctcctcccagcggcggcagcccagccggctccccaacctctaccgaggagggcacctctgagtccgccacccccgagagcggccctggcacctccaccgagcccagcgagggcagcgcacccggcagccctgccggcagccccacctccacagaggagggaaccagcaccgagcccagcgaaggcagcgccccaggcaccagcaccgagcctagtgagggcggctctggcggcggcagcgcccaggagattaaacggatcaacaagatcagaagaagacttgtgaaagacagcaacaccaagaaggccggcaagacaggccccatgaaaaccctgctggttagagtgatgacacccgatctgagagagcggctggaaaacctgagaaagaagcctgaaaatatcccccagcccatcagcaatacatctagagccaacctgaataagctgctgaccgattacaccgaaatgaagaaggcgatcctgcatgtgtactgggaagagttccagaaggaccctgtgggcctgatgagccgggtggcccagcctgccagcaagaagatcgatcagaacaagctgaaacctgagatggacgagaagggcaacctgaccaccgccggctttgcctgctctcagtgtggccagcccctgttcgtgtacaagctggagcaggtgtctgagaagggcaaggcttacaccaactacttcggacggtgcaatgtggccgagcacgaaaagctgatcctgctggcccagctgaagcccgagaaggatagcgacgaagccgtgacatatagcctgggaaagtttgggcagagggccctggatttctacagcattcatgtgaccaaggagtccacccaccccgtgaagcccctggcccagatcgccggaaacagatacgcctccggacctgtgggaaaggccctgagcgacgcatgtatgggcacaatcgcctccttcctgtctaagtaccaggacatcatcatcgaacaccagaaggtggtgaagggcaaccagaagagactggagagcctgcgggagctggccggcaaggaaaacctggaataccctagcgtgaccctgccacctcagcctcacaccaaggagggcgttgatgcctacaacgaagtgatcgcccgggtgcgaatgtgggtgaacctgaacctgtggcagaagctgaagctaagcagagatgatgccaagcctctgctgagactgaagggattcccttcctttcctctggtcgagagacaggccaacgaagtggactggtgggacatggtgtgtaacgtgaagaagctgatcaacgagaaaaaggaggatggcaaggtgttttggcagaatctggctggctacaagagacaggaagccctgagaccatacctgagcagcgaggaagatcggaagaagggaaagaaattcgctcggtaccagctgggcgacctgctgctgcacctggaaaagaagcacggcgaggactggggaaaggtgtacgacgaggcctgggagcggattgacaagaaagtggaaggcctgagcaagcacatcaagctggaagaggaacggagaagcgaggacgcccagagcaaggccgccctgaccgactggctgcgggctaaggccagcttcgtgatcgagggcctgaaggaggccgacaaggacgagttctgcagatgcgagctgaagctgcagaagtggtacggggacctgcggggaaagcccttcgccatcgaagccgagaacagcatcctggacatcagcggcttcagcaagcagtacaactgtgccttcatctggcagaaggacggcgtgaagaagctgaacctgtacctgatcatcaactacttcaagggcggcaagctgcggttcaagaagatcaaacctgaagccttcgaagccaacagattctacaccgtgatcaacaaaaagagcggcgagatcgtgcccatggaggtgaacttcaacttcgacgaccccaacctgatcatcctgcctctggcctttggcaagagacagggcagagaattcatctggaacgacctgctgtccctggaaaccggcagcctgaagctggccaacggaagagtgatcgagaagacactgtacaacagaagaacccggcaggatgagcctgccctgttcgtggccctgaccttcgagcggcgggaggtcctggactcctccaatatcaaaccaatgaacctgatcggcgtggcaagaggcgaaaacatccccgccgtgatcgccctgaccgaccccgagggctgcccactgagccggtttaaggatagcctgggaaacccaacccacatcctgagaatcggcgagagctataaggagaagcagcggaccatccaggccaagaaggaggtggagcagcggagagccggcggctacagccggaagtacgccagcaaagccaagaatctggcagacgatatggtgagaaacaccgctagagatctgctgtactacgccgtgacccaggatgccatgctgatcttcgccaacctgagccggggcttcggccggcagggcaagcggaccttcatggccgagagacagtacacacggatggaggactggctgaccgccaagctggcctacgagggcctgagcaagacctacctgtccaagacactggcccagtacacctccaagacatgcagcaactgtgggtttaccatcaccagcgccgactacgacagggtgctggagaagctgaagaagacagcaacaggctggatgaccacaattaacggcaaggagctgaaggtggagggccagattacctactacaacagatacaagagacagaacgtagtcaaggacctgtccgtcgagctggatagactgagcgaagaatctgtgaacaacgacatctcctcctggacaaagggcagaagcggagaagctctgagcctcctgaagaaaagattctcccatagacccgtgcaggagaagttcgtgtgcctgaactgcggcttcgagacacacgcagccgagcaagccgccctgaacatcgccagatcctggctgttcctgcggagccaggagtacaagaaataccagacaaacaagacaaccggcaacaccgataagagagccttcgtcgagacctggcagtccttttaccggaagaagcttaaggaggtgtggaaacctgccgtgcggtctggcggatctggcggaggctccacaagcatgcccggcccccccggcagcctggagatggaccccctgaccttcagggacgtggccatcgagttcagcctggaggagtggcagtgcctggacaccgcccagcagaacctgtacaggaacgtgatgctggagaactacaagaacctggccttcctgggcatcgccgtgagcaagcccgacctgatcaccaggctggagaaggagaaggagccctggaagatgaagaggcacaggatggtggacaccagccccaagaaaaagagaaaagtctaagctgccttctgcggggcttgccttctggccatgcccttcttctctcccttgcacctgtacctcttggtctttgaataaagcctgagtaggaaggctagcaaaaaaaaaaaaaaaaaaaaaaaaaaaaaaaaaaaaaaaaaaaaaaaaaaaaaaaaaaaaaaaaaaaaaaaaaaaaaaaa

SEQ ID NO: 2661 - RNA, 5419 nt, synthetic construct
  source 1..5419: mol_type = other RNA
aggaaataagagagaaaagaagagtaagaagaaatataagagccaccatggcccctaagaagaagcgtaaagtgagccgggtgaacggcagcggcagcggcggcggcatgaaccacgaccaggagttcgacccccctaaggtgtaccctcccgtccccgccgagaagagaaagcccatccgggtcctgagcctgttcgatggcatcgccaccggtctgctggtgctgaaggacctgggcatccaggtggataggtacattgcctccgaggtgtgcgaggactccatcaccgtgggaatggtgcgtcatcagggcaagatcatgtacgtgggcgacgtgcggagcgtgacacagaagcatatccaggagtggggccctttcgacctggtgatcggcggcagcccttgcaatgacctgagcatcgtgaacccagcccggaagggcctgtacgagggaaccggcagactgttcttcgagttttacagactgctgcacgacgcccggcctaaggaaggcgacgaccggcccttcttttggctgttcgagaatgtggtggccatgggagtcagcgacaagcgggatattagccggttcctggagagcaaccccgtgatgatcgatgccaaggaagtgagcgccgcccaccgggccagatacttctggggcaatctgcctggcatgaacagacccctggccagcaccgtgaacgacaagctggagctgcaggagtgcctggagcacggccggatcgccaagttcagcaaggtgagaaccatcaccacccgaagcaacagcatcaaacaaggcaaggaccagcactttcctgtgttcatgaacgagaaggaggacatcctgtggtgtaccgagatggagagagtgttcgggttcccagtccactacacagatgtcagcaacatgtctagactggccagacagagactgctgggaagaagctggtccgtccctgtgatcagacacctgttcgcccctctgaaggagtacttcgcctgcgtgagcagcggcaacagcaacgccaacagccggggccccagcttctctagcggcctggtgccactgtccctgagagggagccacatgggccccatggagatctacaaaaccgtgagcgcctggaagcggcagcctgtgcgcgtgctgagcctgtttcggaatatcgataaagtcctgaaaagcctgggattcctggagagcggctctggctccggcggtggcaccctgaagtacgtggaggatgtgacaaacgtggtcagacgggatgtggagaagtggggccccttcgatctggtgtacggcagcacccaacccctgggcagctcttgtgaccggtgccctggctggtacatgtttcagttccaccggatcctgcagtacgccctgccgagacaggagtcccagcggccattcttttggattttcatggacaacttgctgctgaccgaggatgaccaggaaactaccactcggttcctgcagaccgaagccgtgaccctgcaggacgtgagaggccgggactaccagaacgccatgcgggtgtggtccaacatccctggactgaaaagcaagcacgcacctctgacccctaaagaagaggagtacctgcaggcccaggtgcggagcagaagcaagctggacgcccctaaggtggatctgctggtgaagaattgcctcctgcccctgagagagtacttcaagtatttcagccagaatagtctgcccctgggcggcccaagcagcggcgcccctcctcccagcggcggcagcccagccggctccccaacctctaccgaggagggcacctctgagtccgccacccccgagagcggccctggcacctccaccgagcccagcgagggcagcgcacccggcagccctgccggcagccccacctccacagaggagggaaccagcaccgagcccagcgaaggcagcgccccaggcaccagcaccgagcctagtgagggcggctctggcggcggcagcgcccaggagattaaacggatcaacaagatcagaagaagacttgtgaaagacagcaacaccaagaaggccggcaagacaggccccatgaaaaccctgctggttagagtgatgacacccgatctgagagagcggctggaaaacctgagaaagaagcctgaaaatatcccccagcccatcagcaatacatctagagccaacctgaataagctgctgaccgattacaccgaaatgaagaaggcgatcctgcatgtgtactgggaagagttccagaaggaccctgtgggcctgatgagccgggtggcccagcctgccagcaagaagatcgatcagaacaagctgaaacctgagatggacgagaagggcaacctgaccaccgccggctttgcctgctctcagtgtggccagcccctgttcgtgtacaagctggagcaggtgtctgagaagggcaaggcttacaccaactacttcggacggtgcaatgtggccgagcacgaaaagctgatcctgctggcccagctgaagcccgagaaggatagcgacgaagccgtgacatatagcctgggaaagtttgggcagagggccctggatttctacagcattcatgtgaccaaggagtccacccaccccgtgaagcccctggcccagatcgccggaaacagatacgcctccggacctgtgggaaaggccctgagcgacgcatgtatgggcacaatcgcctccttcctgtctaagtaccaggacatcatcatcgaacaccagaaggtggtgaagggcaaccagaagagactggagagcctgcgggagctggccggcaaggaaaacctggaataccctagcgtgaccctgccacctcagcctcacaccaaggagggcgttgatgcctacaacgaagtgatcgcccgggtgcgaatgtgggtgaacctgaacctgtggcagaagctgaagctaagcagagatgatgccaagcctctgctgagactgaagggattcccttcctttcctctggtcgagagacaggccaacgaagtggactggtgggacatggtgtgtaacgtgaagaagctgatcaacgagaaaaaggaggatggcaaggtgttttggcagaatctggctggctacaagagacaggaagccctgagaccatacctgagcagcgaggaagatcggaagaagggaaagaaattcgctcggtaccagctgggcgacctgctgctgcacctggaaaagaagcacggcgaggactggggaaaggtgtacgacgaggcctgggagcggattgacaagaaagtggaaggcctgagcaagcacatcaagctggaagaggaacggagaagcgaggacgcccagagcaaggccgccctgaccgactggctgcgggctaaggccagcttcgtgatcgagggcctgaaggaggccgacaaggacgagttctgcagatgcgagctgaagctgcagaagtggtacggggacctgcggggaaagcccttcgccatcgaagccgagaacagcatcctggacatcagcggcttcagcaagcagtacaactgtgccttcatctggcagaaggacggcgtgaagaagctgaacctgtacctgatcatcaactacttcaagggcggcaagctgcggttcaagaagatcaaacctgaagccttcgaagccaacagattctacaccgtgatcaacaaaaagagcggcgagatcgtgcccatggaggtgaacttcaacttcgacgaccccaacctgatcatcctgcctctggcctttggcaagagacagggcagagaattcatctggaacgacctgctgtccctggaaaccggcagcctgaagctggccaacggaagagtgatcgagaagacactgtacaacagaagaacccggcaggatgagcctgccctgttcgtggccctgaccttcgagcggcgggaggtcctggactcctccaatatcaaaccaatgaacctgatcggcgtggcaagaggcgaaaacatccccgccgtgatcgccctgaccgaccccgagggctgcccactgagccggtttaaggatagcctgggaaacccaacccacatcctgagaatcggcgagagctataaggagaagcagcggaccatccaggccaagaaggaggtggagcagcggagagccggcggctacagccggaagtacgccagcaaagccaagaatctggcagacgatatggtgagaaacaccgctagagatctgctgtactacgccgtgacccaggatgccatgctgatcttcgccaacctgagccggggcttcggccggcagggcaagcggaccttcatggccgagagacagtacacacggatggaggactggctgaccgccaagctggcctacgagggcctgagcaagacctacctgtccaagacactggcccagtacacctccaagacatgcagcaactgtgggtttaccatcaccagcgccgactacgacagggtgctggagaagctgaagaagacagcaacaggctggatgaccacaattaacggcaaggagctgaaggtggagggccagattacctactacaacagatacaagagacagaacgtagtcaaggacctgtccgtcgagctggatagactgagcgaagaatctgtgaacaacgacatctcctcctggacaaagggcagaagcggagaagctctgagcctcctgaagaaaagattctcccatagacccgtgcaggagaagttcgtgtgcctgaactgcggcttcgagacacacgcagccgagcaagccgccctgaacatcgccagatcctggctgttcctgcggagccaggagtacaagaaataccagacaaacaagacaaccggcaacaccgataagagagccttcgtcgagacctggcagtccttttaccggaagaagcttaaggaggtgtggaaacctgccgtgcggtctggcggatctggcggaggctccacaagcaacgccgtgacctacaacgacgtgcacgtggacttcacccaggaggagtgggccctgatggaccccagccagaggaacctgtacaaggacgtgatggtggagacctacatgaacctgaccgccatcggctacaactgggaggacctggaggtggaggagcactgccagaacagcctgaagcacggcaggcacaagaggccccacaccaccgagaagagctgcgagtacatgggctgcggcaagaccagccccaagaaaaagagaaaagtctaagctgccttctgcggggcttgccttctggccatgcccttcttctctcccttgcacctgtacctcttggtctttgaataaagcctgagtaggaaggctagcaaaaaaaaaaaaaaaaaaaaaaaaaaaaaaaaaaaaaaaaaaaaaaaaaaaaaaaaaaaaaaaaaaaaaaaaaaaaaaaa

SEQ ID NO: 2662 - RNA, 5419 nt, synthetic construct
  source 1..5419: mol_type = other RNA
aggaaataagagagaaaagaagagtaagaagaaatataagagccaccatggcccctaagaagaagcgtaaagtgagccgggtgaacggcagcggcagcggcggcggcatgaaccacgaccaggagttcgacccccctaaggtgtaccctcccgtccccgccgagaagagaaagcccatccgggtcctgagcctgttcgatggcatcgccaccggtctgctggtgctgaaggacctgggcatccaggtggataggtacattgcctccgaggtgtgcgaggactccatcaccgtgggaatggtgcgtcatcagggcaagatcatgtacgtgggcgacgtgcggagcgtgacacagaagcatatccaggagtggggccctttcgacctggtgatcggcggcagcccttgcaatgacctgagcatcgtgaacccagcccggaagggcctgtacgagggaaccggcagactgttcttcgagttttacagactgctgcacgacgcccggcctaaggaaggcgacgaccggcccttcttttggctgttcgagaatgtggtggccatgggagtcagcgacaagcgggatattagccggttcctggagagcaaccccgtgatgatcgatgccaaggaagtgagcgccgcccaccgggccagatacttctggggcaatctgcctggcatgaacagacccctggccagcaccgtgaacgacaagctggagctgcaggagtgcctggagcacggccggatcgccaagttcagcaaggtgagaaccatcaccacccgaagcaacagcatcaaacaaggcaaggaccagcactttcctgtgttcatgaacgagaaggaggacatcctgtggtgtaccgagatggagagagtgttcgggttcccagtccactacacagatgtcagcaacatgtctagactggccagacagagactgctgggaagaagctggtccgtccctgtgatcagacacctgttcgcccctctgaaggagtacttcgcctgcgtgagcagcggcaacagcaacgccaacagccggggccccagcttctctagcggcctggtgccactgtccctgagagggagccacatgggccccatggagatctacaaaaccgtgagcgcctggaagcggcagcctgtgcgcgtgctgagcctgtttcggaatatcgataaagtcctgaaaagcctgggattcctggagagcggctctggctccggcggtggcaccctgaagtacgtggaggatgtgacaaacgtggtcagacgggatgtggagaagtggggccccttcgatctggtgtacggcagcacccaacccctgggcagctcttgtgaccggtgccctggctggtacatgtttcagttccaccggatcctgcagtacgccctgccgagacaggagtcccagcggccattcttttggattttcatggacaacttgctgctgaccgaggatgaccaggaaactaccactcggttcctgcagaccgaagccgtgaccctgcaggacgtgagaggccgggactaccagaacgccatgcgggtgtggtccaacatccctggactgaaaagcaagcacgcacctctgacccctaaagaagaggagtacctgcaggcccaggtgcggagcagaagcaagctggacgcccctaaggtggatctgctggtgaagaattgcctcctgcccctgagagagtacttcaagtatttcagccagaatagtctgcccctgggcggcccaagcagcggcgcccctcctcccagcggcggcagcccagccggctccccaacctctaccgaggagggcacctctgagtccgccacccccgagagcggccctggcacctccaccgagcccagcgagggcagcgcacccggcagccctgccggcagccccacctccacagaggagggaaccagcaccgagcccagcgaaggcagcgccccaggcaccagcaccgagcctagtgagggcggctctggcggcggcagcgcccaggagattaaacggatcaacaagatcagaagaagacttgtgaaagacagcaacaccaagaaggccggcaagacaggccccatgaaaaccctgctggttagagtgatgacacccgatctgagagagcggctggaaaacctgagaaagaagcctgaaaatatcccccagcccatcagcaatacatctagagccaacctgaataagctgctgaccgattacaccgaaatgaagaaggcgatcctgcatgtgtactgggaagagttccagaaggaccctgtgggcctgatgagccgggtggcccagcctgccagcaagaagatcgatcagaacaagctgaaacctgagatggacgagaagggcaacctgaccaccgccggctttgcctgctctcagtgtggccagcccctgttcgtgtacaagctggagcaggtgtctgagaagggcaaggcttacaccaactacttcggacggtgcaatgtggccgagcacgaaaagctgatcctgctggcccagctgaagcccgagaaggatagcgacgaagccgtgacatatagcctgggaaagtttgggcagagggccctggatttctacagcattcatgtgaccaaggagtccacccaccccgtgaagcccctggcccagatcgccggaaacagatacgcctccggacctgtgggaaaggccctgagcgacgcatgtatgggcacaatcgcctccttcctgtctaagtaccaggacatcatcatcgaacaccagaaggtggtgaagggcaaccagaagagactggagagcctgcgggagctggccggcaaggaaaacctggaataccctagcgtgaccctgccacctcagcctcacaccaaggagggcgttgatgcctacaacgaagtgatcgcccgggtgcgaatgtgggtgaacctgaacctgtggcagaagctgaagctaagcagagatgatgccaagcctctgctgagactgaagggattcccttcctttcctctggtcgagagacaggccaacgaagtggactggtgggacatggtgtgtaacgtgaagaagctgatcaacgagaaaaaggaggatggcaaggtgttttggcagaatctggctggctacaagagacaggaagccctgagaccatacctgagcagcgaggaagatcggaagaagggaaagaaattcgctcggtaccagctgggcgacctgctgctgcacctggaaaagaagcacggcgaggactggggaaaggtgtacgacgaggcctgggagcggattgacaagaaagtggaaggcctgagcaagcacatcaagctggaagaggaacggagaagcgaggacgcccagagcaaggccgccctgaccgactggctgcgggctaaggccagcttcgtgatcgagggcctgaaggaggccgacaaggacgagttctgcagatgcgagctgaagctgcagaagtggtacggggacctgcggggaaagcccttcgccatcgaagccgagaacagcatcctggacatcagcggcttcagcaagcagtacaactgtgccttcatctggcagaaggacggcgtgaagaagctgaacctgtacctgatcatcaactacttcaagggcggcaagctgcggttcaagaagatcaaacctgaagccttcgaagccaacagattctacaccgtgatcaacaaaaagagcggcgagatcgtgcccatggaggtgaacttcaacttcgacgaccccaacctgatcatcctgcctctggcctttggcaagagacagggcagagaattcatctggaacgacctgctgtccctggaaaccggcagcctgaagctggccaacggaagagtgatcgagaagacactgtacaacagaagaacccggcaggatgagcctgccctgttcgtggccctgaccttcgagcggcgggaggtcctggactcctccaatatcaaaccaatgaacctgatcggcgtggcaagaggcgaaaacatccccgccgtgatcgccctgaccgaccccgagggctgcccactgagccggtttaaggatagcctgggaaacccaacccacatcctgagaatcggcgagagctataaggagaagcagcggaccatccaggccaagaaggaggtggagcagcggagagccggcggctacagccggaagtacgccagcaaagccaagaatctggcagacgatatggtgagaaacaccgctagagatctgctgtactacgccgtgacccaggatgccatgctgatcttcgccaacctgagccggggcttcggccggcagggcaagcggaccttcatggccgagagacagtacacacggatggaggactggctgaccgccaagctggcctacgagggcctgagcaagacctacctgtccaagacactggcccagtacacctccaagacatgcagcaactgtgggtttaccatcaccagcgccgactacgacagggtgctggagaagctgaagaagacagcaacaggctggatgaccacaattaacggcaaggagctgaaggtggagggccagattacctactacaacagatacaagagacagaacgtagtcaaggacctgtccgtcgagctggatagactgagcgaagaatctgtgaacaacgacatctcctcctggacaaagggcagaagcggagaagctctgagcctcctgaagaaaagattctcccatagacccgtgcaggagaagttcgtgtgcctgaactgcggcttcgagacacacgcagccgagcaagccgccctgaacatcgccagatcctggctgttcctgcggagccaggagtacaagaaataccagacaaacaagacaaccggcaacaccgataagagagccttcgtcgagacctggcagtccttttaccggaagaagcttaaggaggtgtggaaacctgccgtgcggtctggcggatctggcggaggctccacaagcagccaggagcccgtgaccttcgaggacgtggccgtgtacttcacccagaaccagtgggccagcctggaccccacccagagggccctgtacagggaggtgatgctggagaactacgccaacatcaccagcctggccgccttccccttccccaagcccgacctgatcctgcagctggagaggggcgaggccaggtggggcctggacccctggatcgccatcgagggcgaggccctgggcggcgtgaccagccccaagaaaaagagaaaagtctaagctgccttctgcggggcttgccttctggccatgcccttcttctctcccttgcacctgtacctcttggtctttgaataaagcctgagtaggaaggctagcaaaaaaaaaaaaaaaaaaaaaaaaaaaaaaaaaaaaaaaaaaaaaaaaaaaaaaaaaaaaaaaaaaaaaaaaaaaaaaaa

SEQ ID NO: 2663 - RNA, 5419 nt, synthetic construct
  source 1..5419: mol_type = other RNA
aggaaataagagagaaaagaagagtaagaagaaatataagagccaccatggcccctaagaagaagcgtaaagtgagccgggtgaacggcagcggcagcggcggcggcatgaaccacgaccaggagttcgacccccctaaggtgtaccctcccgtccccgccgagaagagaaagcccatccgggtcctgagcctgttcgatggcatcgccaccggtctgctggtgctgaaggacctgggcatccaggtggataggtacattgcctccgaggtgtgcgaggactccatcaccgtgggaatggtgcgtcatcagggcaagatcatgtacgtgggcgacgtgcggagcgtgacacagaagcatatccaggagtggggccctttcgacctggtgatcggcggcagcccttgcaatgacctgagcatcgtgaacccagcccggaagggcctgtacgagggaaccggcagactgttcttcgagttttacagactgctgcacgacgcccggcctaaggaaggcgacgaccggcccttcttttggctgttcgagaatgtggtggccatgggagtcagcgacaagcgggatattagccggttcctggagagcaaccccgtgatgatcgatgccaaggaagtgagcgccgcccaccgggccagatacttctggggcaatctgcctggcatgaacagacccctggccagcaccgtgaacgacaagctggagctgcaggagtgcctggagcacggccggatcgccaagttcagcaaggtgagaaccatcaccacccgaagcaacagcatcaaacaaggcaaggaccagcactttcctgtgttcatgaacgagaaggaggacatcctgtggtgtaccgagatggagagagtgttcgggttcccagtccactacacagatgtcagcaacatgtctagactggccagacagagactgctgggaagaagctggtccgtccctgtgatcagacacctgttcgcccctctgaaggagtacttcgcctgcgtgagcagcggcaacagcaacgccaacagccggggccccagcttctctagcggcctggtgccactgtccctgagagggagccacatgggccccatggagatctacaaaaccgtgagcgcctggaagcggcagcctgtgcgcgtgctgagcctgtttcggaatatcgataaagtcctgaaaagcctgggattcctggagagcggctctggctccggcggtggcaccctgaagtacgtggaggatgtgacaaacgtggtcagacgggatgtggagaagtggggccccttcgatctggtgtacggcagcacccaacccctgggcagctcttgtgaccggtgccctggctggtacatgtttcagttccaccggatcctgcagtacgccctgccgagacaggagtcccagcggccattcttttggattttcatggacaacttgctgctgaccgaggatgaccaggaaactaccactcggttcctgcagaccgaagccgtgaccctgcaggacgtgagaggccgggactaccagaacgccatgcgggtgtggtccaacatccctggactgaaaagcaagcacgcacctctgacccctaaagaagaggagtacctgcaggcccaggtgcggagcagaagcaagctggacgcccctaaggtggatctgctggtgaagaattgcctcctgcccctgagagagtacttcaagtatttcagccagaatagtctgcccctgggcggcccaagcagcggcgcccctcctcccagcggcggcagcccagccggctccccaacctctaccgaggagggcacctctgagtccgccacccccgagagcggccctggcacctccaccgagcccagcgagggcagcgcacccggcagccctgccggcagccccacctccacagaggagggaaccagcaccgagcccagcgaaggcagcgccccaggcaccagcaccgagcctagtgagggcggctctggcggcggcagcgcccaggagattaaacggatcaacaagatcagaagaagacttgtgaaagacagcaacaccaagaaggccggcaagacaggccccatgaaaaccctgctggttagagtgatgacacccgatctgagagagcggctggaaaacctgagaaagaagcctgaaaatatcccccagcccatcagcaatacatctagagccaacctgaataagctgctgaccgattacaccgaaatgaagaaggcgatcctgcatgtgtactgggaagagttccagaaggaccctgtgggcctgatgagccgggtggcccagcctgccagcaagaagatcgatcagaacaagctgaaacctgagatggacgagaagggcaacctgaccaccgccggctttgcctgctctcagtgtggccagcccctgttcgtgtacaagctggagcaggtgtctgagaagggcaaggcttacaccaactacttcggacggtgcaatgtggccgagcacgaaaagctgatcctgctggcccagctgaagcccgagaaggatagcgacgaagccgtgacatatagcctgggaaagtttgggcagagggccctggatttctacagcattcatgtgaccaaggagtccacccaccccgtgaagcccctggcccagatcgccggaaacagatacgcctccggacctgtgggaaaggccctgagcgacgcatgtatgggcacaatcgcctccttcctgtctaagtaccaggacatcatcatcgaacaccagaaggtggtgaagggcaaccagaagagactggagagcctgcgggagctggccggcaaggaaaacctggaataccctagcgtgaccctgccacctcagcctcacaccaaggagggcgttgatgcctacaacgaagtgatcgcccgggtgcgaatgtgggtgaacctgaacctgtggcagaagctgaagctaagcagagatgatgccaagcctctgctgagactgaagggattcccttcctttcctctggtcgagagacaggccaacgaagtggactggtgggacatggtgtgtaacgtgaagaagctgatcaacgagaaaaaggaggatggcaaggtgttttggcagaatctggctggctacaagagacaggaagccctgagaccatacctgagcagcgaggaagatcggaagaagggaaagaaattcgctcggtaccagctgggcgacctgctgctgcacctggaaaagaagcacggcgaggactggggaaaggtgtacgacgaggcctgggagcggattgacaagaaagtggaaggcctgagcaagcacatcaagctggaagaggaacggagaagcgaggacgcccagagcaaggccgccctgaccgactggctgcgggctaaggccagcttcgtgatcgagggcctgaaggaggccgacaaggacgagttctgcagatgcgagctgaagctgcagaagtggtacggggacctgcggggaaagcccttcgccatcgaagccgagaacagcatcctggacatcagcggcttcagcaagcagtacaactgtgccttcatctggcagaaggacggcgtgaagaagctgaacctgtacctgatcatcaactacttcaagggcggcaagctgcggttcaagaagatcaaacctgaagccttcgaagccaacagattctacaccgtgatcaacaaaaagagcggcgagatcgtgcccatggaggtgaacttcaacttcgacgaccccaacctgatcatcctgcctctggcctttggcaagagacagggcagagaattcatctggaacgacctgctgtccctggaaaccggcagcctgaagctggccaacggaagagtgatcgagaagacactgtacaacagaagaacccggcaggatgagcctgccctgttcgtggccctgaccttcgagcggcgggaggtcctggactcctccaatatcaaaccaatgaacctgatcggcgtggcaagaggcgaaaacatccccgccgtgatcgccctgaccgaccccgagggctgcccactgagccggtttaaggatagcctgggaaacccaacccacatcctgagaatcggcgagagctataaggagaagcagcggaccatccaggccaagaaggaggtggagcagcggagagccggcggctacagccggaagtacgccagcaaagccaagaatctggcagacgatatggtgagaaacaccgctagagatctgctgtactacgccgtgacccaggatgccatgctgatcttcgccaacctgagccggggcttcggccggcagggcaagcggaccttcatggccgagagacagtacacacggatggaggactggctgaccgccaagctggcctacgagggcctgagcaagacctacctgtccaagacactggcccagtacacctccaagacatgcagcaactgtgggtttaccatcaccagcgccgactacgacagggtgctggagaagctgaagaagacagcaacaggctggatgaccacaattaacggcaaggagctgaaggtggagggccagattacctactacaacagatacaagagacagaacgtagtcaaggacctgtccgtcgagctggatagactgagcgaagaatctgtgaacaacgacatctcctcctggacaaagggcagaagcggagaagctctgagcctcctgaagaaaagattctcccatagacccgtgcaggagaagttcgtgtgcctgaactgcggcttcgagacacacgcagccgagcaagccgccctgaacatcgccagatcctggctgttcctgcggagccaggagtacaagaaataccagacaaacaagacaaccggcaacaccgataagagagccttcgtcgagacctggcagtccttttaccggaagaagcttaaggaggtgtggaaacctgccgtgcggtctggcggatctggcggaggctccacaagcgccagggtgagcgtgatgttcagcgacgtgagcatcgccttcagcagggaggagtgggagtacctggacctgagccagagggacctgtacaaggacgtgatgatggagaactacaggaacgtggccagcctgggctacttcatcagcaagcccgacgtgatcagcctgctggagcagggcaaggagccctggaaggtggtgaggaggaggaggaggaaccccgacctggagaccaaggacgagaccagccccaagaaaaagagaaaagtctaagctgccttctgcggggcttgccttctggccatgcccttcttctctcccttgcacctgtacctcttggtctttgaataaagcctgagtaggaaggctagcaaaaaaaaaaaaaaaaaaaaaaaaaaaaaaaaaaaaaaaaaaaaaaaaaaaaaaaaaaaaaaaaaaaaaaaaaaaaaaaa

SEQ ID NO: 2664 - RNA, 5419 nt, synthetic construct
  source 1..5419: mol_type = other RNA
aggaaataagagagaaaagaagagtaagaagaaatataagagccaccatggcccctaagaagaagcgtaaagtgagccgggtgaacggcagcggcagcggcggcggcatgaaccacgaccaggagttcgacccccctaaggtgtaccctcccgtccccgccgagaagagaaagcccatccgggtcctgagcctgttcgatggcatcgccaccggtctgctggtgctgaaggacctgggcatccaggtggataggtacattgcctccgaggtgtgcgaggactccatcaccgtgggaatggtgcgtcatcagggcaagatcatgtacgtgggcgacgtgcggagcgtgacacagaagcatatccaggagtggggccctttcgacctggtgatcggcggcagcccttgcaatgacctgagcatcgtgaacccagcccggaagggcctgtacgagggaaccggcagactgttcttcgagttttacagactgctgcacgacgcccggcctaaggaaggcgacgaccggcccttcttttggctgttcgagaatgtggtggccatgggagtcagcgacaagcgggatattagccggttcctggagagcaaccccgtgatgatcgatgccaaggaagtgagcgccgcccaccgggccagatacttctggggcaatctgcctggcatgaacagacccctggccagcaccgtgaacgacaagctggagctgcaggagtgcctggagcacggccggatcgccaagttcagcaaggtgagaaccatcaccacccgaagcaacagcatcaaacaaggcaaggaccagcactttcctgtgttcatgaacgagaaggaggacatcctgtggtgtaccgagatggagagagtgttcgggttcccagtccactacacagatgtcagcaacatgtctagactggccagacagagactgctgggaagaagctggtccgtccctgtgatcagacacctgttcgcccctctgaaggagtacttcgcctgcgtgagcagcggcaacagcaacgccaacagccggggccccagcttctctagcggcctggtgccactgtccctgagagggagccacatgggccccatggagatctacaaaaccgtgagcgcctggaagcggcagcctgtgcgcgtgctgagcctgtttcggaatatcgataaagtcctgaaaagcctgggattcctggagagcggctctggctccggcggtggcaccctgaagtacgtggaggatgtgacaaacgtggtcagacgggatgtggagaagtggggccccttcgatctggtgtacggcagcacccaacccctgggcagctcttgtgaccggtgccctggctggtacatgtttcagttccaccggatcctgcagtacgccctgccgagacaggagtcccagcggccattcttttggattttcatggacaacttgctgctgaccgaggatgaccaggaaactaccactcggttcctgcagaccgaagccgtgaccctgcaggacgtgagaggccgggactaccagaacgccatgcgggtgtggtccaacatccctggactgaaaagcaagcacgcacctctgacccctaaagaagaggagtacctgcaggcccaggtgcggagcagaagcaagctggacgcccctaaggtggatctgctggtgaagaattgcctcctgcccctgagagagtacttcaagtatttcagccagaatagtctgcccctgggcggcccaagcagcggcgcccctcctcccagcggcggcagcccagccggctccccaacctctaccgaggagggcacctctgagtccgccacccccgagagcggccctggcacctccaccgagcccagcgagggcagcgcacccggcagccctgccggcagccccacctccacagaggagggaaccagcaccgagcccagcgaaggcagcgccccaggcaccagcaccgagcctagtgagggcggctctggcggcggcagcgcccaggagattaaacggatcaacaagatcagaagaagacttgtgaaagacagcaacaccaagaaggccggcaagacaggccccatgaaaaccctgctggttagagtgatgacacccgatctgagagagcggctggaaaacctgagaaagaagcctgaaaatatcccccagcccatcagcaatacatctagagccaacctgaataagctgctgaccgattacaccgaaatgaagaaggcgatcctgcatgtgtactgggaagagttccagaaggaccctgtgggcctgatgagccgggtggcccagcctgccagcaagaagatcgatcagaacaagctgaaacctgagatggacgagaagggcaacctgaccaccgccggctttgcctgctctcagtgtggccagcccctgttcgtgtacaagctggagcaggtgtctgagaagggcaaggcttacaccaactacttcggacggtgcaatgtggccgagcacgaaaagctgatcctgctggcccagctgaagcccgagaaggatagcgacgaagccgtgacatatagcctgggaaagtttgggcagagggccctggatttctacagcattcatgtgaccaaggagtccacccaccccgtgaagcccctggcccagatcgccggaaacagatacgcctccggacctgtgggaaaggccctgagcgacgcatgtatgggcacaatcgcctccttcctgtctaagtaccaggacatcatcatcgaacaccagaaggtggtgaagggcaaccagaagagactggagagcctgcgggagctggccggcaaggaaaacctggaataccctagcgtgaccctgccacctcagcctcacaccaaggagggcgttgatgcctacaacgaagtgatcgcccgggtgcgaatgtgggtgaacctgaacctgtggcagaagctgaagctaagcagagatgatgccaagcctctgctgagactgaagggattcccttcctttcctctggtcgagagacaggccaacgaagtggactggtgggacatggtgtgtaacgtgaagaagctgatcaacgagaaaaaggaggatggcaaggtgttttggcagaatctggctggctacaagagacaggaagccctgagaccatacctgagcagcgaggaagatcggaagaagggaaagaaattcgctcggtaccagctgggcgacctgctgctgcacctggaaaagaagcacggcgaggactggggaaaggtgtacgacgaggcctgggagcggattgacaagaaagtggaaggcctgagcaagcacatcaagctggaagaggaacggagaagcgaggacgcccagagcaaggccgccctgaccgactggctgcgggctaaggccagcttcgtgatcgagggcctgaaggaggccgacaaggacgagttctgcagatgcgagctgaagctgcagaagtggtacggggacctgcggggaaagcccttcgccatcgaagccgagaacagcatcctggacatcagcggcttcagcaagcagtacaactgtgccttcatctggcagaaggacggcgtgaagaagctgaacctgtacctgatcatcaactacttcaagggcggcaagctgcggttcaagaagatcaaacctgaagccttcgaagccaacagattctacaccgtgatcaacaaaaagagcggcgagatcgtgcccatggaggtgaacttcaacttcgacgaccccaacctgatcatcctgcctctggcctttggcaagagacagggcagagaattcatctggaacgacctgctgtccctggaaaccggcagcctgaagctggccaacggaagagtgatcgagaagacactgtacaacagaagaacccggcaggatgagcctgccctgttcgtggccctgaccttcgagcggcgggaggtcctggactcctccaatatcaaaccaatgaacctgatcggcgtggcaagaggcgaaaacatccccgccgtgatcgccctgaccgaccccgagggctgcccactgagccggtttaaggatagcctgggaaacccaacccacatcctgagaatcggcgagagctataaggagaagcagcggaccatccaggccaagaaggaggtggagcagcggagagccggcggctacagccggaagtacgccagcaaagccaagaatctggcagacgatatggtgagaaacaccgctagagatctgctgtactacgccgtgacccaggatgccatgctgatcttcgccaacctgagccggggcttcggccggcagggcaagcggaccttcatggccgagagacagtacacacggatggaggactggctgaccgccaagctggcctacgagggcctgagcaagacctacctgtccaagacactggcccagtacacctccaagacatgcagcaactgtgggtttaccatcaccagcgccgactacgacagggtgctggagaagctgaagaagacagcaacaggctggatgaccacaattaacggcaaggagctgaaggtggagggccagattacctactacaacagatacaagagacagaacgtagtcaaggacctgtccgtcgagctggatagactgagcgaagaatctgtgaacaacgacatctcctcctggacaaagggcagaagcggagaagctctgagcctcctgaagaaaagattctcccatagacccgtgcaggagaagttcgtgtgcctgaactgcggcttcgagacacacgcagccgagcaagccgccctgaacatcgccagatcctggctgttcctgcggagccaggagtacaagaaataccagacaaacaagacaaccggcaacaccgataagagagccttcgtcgagacctggcagtccttttaccggaagaagcttaaggaggtgtggaaacctgccgtgcggtctggcggatctggcggaggctccacaagcaagcccctggccgtgaggttcgccgacgtggccgtgtacttcagccccgaggagtggggctacctgaggcccgcccagagggccctgtacagggacgtgatgcaggagacctacggccacctgggcgccctgggcttccccggccccaagcccgccctgatcagctggatggagcaggagagcgaggcctggagccccgccgcccaggaccccgaggagggcgagaacctgggcggcgccctgaccagccccaagaaaaagagaaaagtctaagctgccttctgcggggcttgccttctggccatgcccttcttctctcccttgcacctgtacctcttggtctttgaataaagcctgagtaggaaggctagcaaaaaaaaaaaaaaaaaaaaaaaaaaaaaaaaaaaaaaaaaaaaaaaaaaaaaaaaaaaaaaaaaaaaaaaaaaaaaaaa

SEQ ID NO: 2665 - RNA, 5419 nt, synthetic construct
  source 1..5419: mol_type = other RNA
aggaaataagagagaaaagaagagtaagaagaaatataagagccaccatggcccctaagaagaagcgtaaagtgagccgggtgaacggcagcggcagcggcggcggcatgaaccacgaccaggagttcgacccccctaaggtgtaccctcccgtccccgccgagaagagaaagcccatccgggtcctgagcctgttcgatggcatcgccaccggtctgctggtgctgaaggacctgggcatccaggtggataggtacattgcctccgaggtgtgcgaggactccatcaccgtgggaatggtgcgtcatcagggcaagatcatgtacgtgggcgacgtgcggagcgtgacacagaagcatatccaggagtggggccctttcgacctggtgatcggcggcagcccttgcaatgacctgagcatcgtgaacccagcccggaagggcctgtacgagggaaccggcagactgttcttcgagttttacagactgctgcacgacgcccggcctaaggaaggcgacgaccggcccttcttttggctgttcgagaatgtggtggccatgggagtcagcgacaagcgggatattagccggttcctggagagcaaccccgtgatgatcgatgccaaggaagtgagcgccgcccaccgggccagatacttctggggcaatctgcctggcatgaacagacccctggccagcaccgtgaacgacaagctggagctgcaggagtgcctggagcacggccggatcgccaagttcagcaaggtgagaaccatcaccacccgaagcaacagcatcaaacaaggcaaggaccagcactttcctgtgttcatgaacgagaaggaggacatcctgtggtgtaccgagatggagagagtgttcgggttcccagtccactacacagatgtcagcaacatgtctagactggccagacagagactgctgggaagaagctggtccgtccctgtgatcagacacctgttcgcccctctgaaggagtacttcgcctgcgtgagcagcggcaacagcaacgccaacagccggggccccagcttctctagcggcctggtgccactgtccctgagagggagccacatgggccccatggagatctacaaaaccgtgagcgcctggaagcggcagcctgtgcgcgtgctgagcctgtttcggaatatcgataaagtcctgaaaagcctgggattcctggagagcggctctggctccggcggtggcaccctgaagtacgtggaggatgtgacaaacgtggtcagacgggatgtggagaagtggggccccttcgatctggtgtacggcagcacccaacccctgggcagctcttgtgaccggtgccctggctggtacatgtttcagttccaccggatcctgcagtacgccctgccgagacaggagtcccagcggccattcttttggattttcatggacaacttgctgctgaccgaggatgaccaggaaactaccactcggttcctgcagaccgaagccgtgaccctgcaggacgtgagaggccgggactaccagaacgccatgcgggtgtggtccaacatccctggactgaaaagcaagcacgcacctctgacccctaaagaagaggagtacctgcaggcccaggtgcggagcagaagcaagctggacgcccctaaggtggatctgctggtgaagaattgcctcctgcccctgagagagtacttcaagtatttcagccagaatagtctgcccctgggcggcccaagcagcggcgcccctcctcccagcggcggcagcccagccggctccccaacctctaccgaggagggcacctctgagtccgccacccccgagagcggccctggcacctccaccgagcccagcgagggcagcgcacccggcagccctgccggcagccccacctccacagaggagggaaccagcaccgagcccagcgaaggcagcgccccaggcaccagcaccgagcctagtgagggcggctctggcggcggcagcgcccaggagattaaacggatcaacaagatcagaagaagacttgtgaaagacagcaacaccaagaaggccggcaagacaggccccatgaaaaccctgctggttagagtgatgacacccgatctgagagagcggctggaaaacctgagaaagaagcctgaaaatatcccccagcccatcagcaatacatctagagccaacctgaataagctgctgaccgattacaccgaaatgaagaaggcgatcctgcatgtgtactgggaagagttccagaaggaccctgtgggcctgatgagccgggtggcccagcctgccagcaagaagatcgatcagaacaagctgaaacctgagatggacgagaagggcaacctgaccaccgccggctttgcctgctctcagtgtggccagcccctgttcgtgtacaagctggagcaggtgtctgagaagggcaaggcttacaccaactacttcggacggtgcaatgtggccgagcacgaaaagctgatcctgctggcccagctgaagcccgagaaggatagcgacgaagccgtgacatatagcctgggaaagtttgggcagagggccctggatttctacagcattcatgtgaccaaggagtccacccaccccgtgaagcccctggcccagatcgccggaaacagatacgcctccggacctgtgggaaaggccctgagcgacgcatgtatgggcacaatcgcctccttcctgtctaagtaccaggacatcatcatcgaacaccagaaggtggtgaagggcaaccagaagagactggagagcctgcgggagctggccggcaaggaaaacctggaataccctagcgtgaccctgccacctcagcctcacaccaaggagggcgttgatgcctacaacgaagtgatcgcccgggtgcgaatgtgggtgaacctgaacctgtggcagaagctgaagctaagcagagatgatgccaagcctctgctgagactgaagggattcccttcctttcctctggtcgagagacaggccaacgaagtggactggtgggacatggtgtgtaacgtgaagaagctgatcaacgagaaaaaggaggatggcaaggtgttttggcagaatctggctggctacaagagacaggaagccctgagaccatacctgagcagcgaggaagatcggaagaagggaaagaaattcgctcggtaccagctgggcgacctgctgctgcacctggaaaagaagcacggcgaggactggggaaaggtgtacgacgaggcctgggagcggattgacaagaaagtggaaggcctgagcaagcacatcaagctggaagaggaacggagaagcgaggacgcccagagcaaggccgccctgaccgactggctgcgggctaaggccagcttcgtgatcgagggcctgaaggaggccgacaaggacgagttctgcagatgcgagctgaagctgcagaagtggtacggggacctgcggggaaagcccttcgccatcgaagccgagaacagcatcctggacatcagcggcttcagcaagcagtacaactgtgccttcatctggcagaaggacggcgtgaagaagctgaacctgtacctgatcatcaactacttcaagggcggcaagctgcggttcaagaagatcaaacctgaagccttcgaagccaacagattctacaccgtgatcaacaaaaagagcggcgagatcgtgcccatggaggtgaacttcaacttcgacgaccccaacctgatcatcctgcctctggcctttggcaagagacagggcagagaattcatctggaacgacctgctgtccctggaaaccggcagcctgaagctggccaacggaagagtgatcgagaagacactgtacaacagaagaacccggcaggatgagcctgccctgttcgtggccctgaccttcgagcggcgggaggtcctggactcctccaatatcaaaccaatgaacctgatcggcgtggcaagaggcgaaaacatccccgccgtgatcgccctgaccgaccccgagggctgcccactgagccggtttaaggatagcctgggaaacccaacccacatcctgagaatcggcgagagctataaggagaagcagcggaccatccaggccaagaaggaggtggagcagcggagagccggcggctacagccggaagtacgccagcaaagccaagaatctggcagacgatatggtgagaaacaccgctagagatctgctgtactacgccgtgacccaggatgccatgctgatcttcgccaacctgagccggggcttcggccggcagggcaagcggaccttcatggccgagagacagtacacacggatggaggactggctgaccgccaagctggcctacgagggcctgagcaagacctacctgtccaagacactggcccagtacacctccaagacatgcagcaactgtgggtttaccatcaccagcgccgactacgacagggtgctggagaagctgaagaagacagcaacaggctggatgaccacaattaacggcaaggagctgaaggtggagggccagattacctactacaacagatacaagagacagaacgtagtcaaggacctgtccgtcgagctggatagactgagcgaagaatctgtgaacaacgacatctcctcctggacaaagggcagaagcggagaagctctgagcctcctgaagaaaagattctcccatagacccgtgcaggagaagttcgtgtgcctgaactgcggcttcgagacacacgcagccgagcaagccgccctgaacatcgccagatcctggctgttcctgcggagccaggagtacaagaaataccagacaaacaagacaaccggcaacaccgataagagagccttcgtcgagacctggcagtccttttaccggaagaagcttaaggaggtgtggaaacctgccgtgcggtctggcggatctggcggaggctccacaagcatggccttcgaggacgtggccgtgtacttcagccaggaggagtggggcctgctggacaccacccagagggccctgtacaggcacgtgatgctggagaacttcaccctggtgaccagcctgggcctgagcaccagcaggccccacgtggtgatccagctggagaggggcgaggagccctgggtgcccagcggcaccgacaccaccctgagcaggaccacctacaggaggaggaaccccggcagcaccagccccaagaaaaagagaaaagtctaagctgccttctgcggggcttgccttctggccatgcccttcttctctcccttgcacctgtacctcttggtctttgaataaagcctgagtaggaaggctagcaaaaaaaaaaaaaaaaaaaaaaaaaaaaaaaaaaaaaaaaaaaaaaaaaaaaaaaaaaaaaaaaaaaaaaaaaaaaaaaa

SEQ ID NO: 2666 - RNA, 5419 nt, synthetic construct
  source 1..5419: mol_type = other RNA
aggaaataagagagaaaagaagagtaagaagaaatataagagccaccatggcccctaagaagaagcgtaaagtgagccgggtgaacggcagcggcagcggcggcggcatgaaccacgaccaggagttcgacccccctaaggtgtaccctcccgtccccgccgagaagagaaagcccatccgggtcctgagcctgttcgatggcatcgccaccggtctgctggtgctgaaggacctgggcatccaggtggataggtacattgcctccgaggtgtgcgaggactccatcaccgtgggaatggtgcgtcatcagggcaagatcatgtacgtgggcgacgtgcggagcgtgacacagaagcatatccaggagtggggccctttcgacctggtgatcggcggcagcccttgcaatgacctgagcatcgtgaacccagcccggaagggcctgtacgagggaaccggcagactgttcttcgagttttacagactgctgcacgacgcccggcctaaggaaggcgacgaccggcccttcttttggctgttcgagaatgtggtggccatgggagtcagcgacaagcgggatattagccggttcctggagagcaaccccgtgatgatcgatgccaaggaagtgagcgccgcccaccgggccagatacttctggggcaatctgcctggcatgaacagacccctggccagcaccgtgaacgacaagctggagctgcaggagtgcctggagcacggccggatcgccaagttcagcaaggtgagaaccatcaccacccgaagcaacagcatcaaacaaggcaaggaccagcactttcctgtgttcatgaacgagaaggaggacatcctgtggtgtaccgagatggagagagtgttcgggttcccagtccactacacagatgtcagcaacatgtctagactggccagacagagactgctgggaagaagctggtccgtccctgtgatcagacacctgttcgcccctctgaaggagtacttcgcctgcgtgagcagcggcaacagcaacgccaacagccggggccccagcttctctagcggcctggtgccactgtccctgagagggagccacatgggccccatggagatctacaaaaccgtgagcgcctggaagcggcagcctgtgcgcgtgctgagcctgtttcggaatatcgataaagtcctgaaaagcctgggattcctggagagcggctctggctccggcggtggcaccctgaagtacgtggaggatgtgacaaacgtggtcagacgggatgtggagaagtggggccccttcgatctggtgtacggcagcacccaacccctgggcagctcttgtgaccggtgccctggctggtacatgtttcagttccaccggatcctgcagtacgccctgccgagacaggagtcccagcggccattcttttggattttcatggacaacttgctgctgaccgaggatgaccaggaaactaccactcggttcctgcagaccgaagccgtgaccctgcaggacgtgagaggccgggactaccagaacgccatgcgggtgtggtccaacatccctggactgaaaagcaagcacgcacctctgacccctaaagaagaggagtacctgcaggcccaggtgcggagcagaagcaagctggacgcccctaaggtggatctgctggtgaagaattgcctcctgcccctgagagagtacttcaagtatttcagccagaatagtctgcccctgggcggcccaagcagcggcgcccctcctcccagcggcggcagcccagccggctccccaacctctaccgaggagggcacctctgagtccgccacccccgagagcggccctggcacctccaccgagcccagcgagggcagcgcacccggcagccctgccggcagccccacctccacagaggagggaaccagcaccgagcccagcgaaggcagcgccccaggcaccagcaccgagcctagtgagggcggctctggcggcggcagcgcccaggagattaaacggatcaacaagatcagaagaagacttgtgaaagacagcaacaccaagaaggccggcaagacaggccccatgaaaaccctgctggttagagtgatgacacccgatctgagagagcggctggaaaacctgagaaagaagcctgaaaatatcccccagcccatcagcaatacatctagagccaacctgaataagctgctgaccgattacaccgaaatgaagaaggcgatcctgcatgtgtactgggaagagttccagaaggaccctgtgggcctgatgagccgggtggcccagcctgccagcaagaagatcgatcagaacaagctgaaacctgagatggacgagaagggcaacctgaccaccgccggctttgcctgctctcagtgtggccagcccctgttcgtgtacaagctggagcaggtgtctgagaagggcaaggcttacaccaactacttcggacggtgcaatgtggccgagcacgaaaagctgatcctgctggcccagctgaagcccgagaaggatagcgacgaagccgtgacatatagcctgggaaagtttgggcagagggccctggatttctacagcattcatgtgaccaaggagtccacccaccccgtgaagcccctggcccagatcgccggaaacagatacgcctccggacctgtgggaaaggccctgagcgacgcatgtatgggcacaatcgcctccttcctgtctaagtaccaggacatcatcatcgaacaccagaaggtggtgaagggcaaccagaagagactggagagcctgcgggagctggccggcaaggaaaacctggaataccctagcgtgaccctgccacctcagcctcacaccaaggagggcgttgatgcctacaacgaagtgatcgcccgggtgcgaatgtgggtgaacctgaacctgtggcagaagctgaagctaagcagagatgatgccaagcctctgctgagactgaagggattcccttcctttcctctggtcgagagacaggccaacgaagtggactggtgggacatggtgtgtaacgtgaagaagctgatcaacgagaaaaaggaggatggcaaggtgttttggcagaatctggctggctacaagagacaggaagccctgagaccatacctgagcagcgaggaagatcggaagaagggaaagaaattcgctcggtaccagctgggcgacctgctgctgcacctggaaaagaagcacggcgaggactggggaaaggtgtacgacgaggcctgggagcggattgacaagaaagtggaaggcctgagcaagcacatcaagctggaagaggaacggagaagcgaggacgcccagagcaaggccgccctgaccgactggctgcgggctaaggccagcttcgtgatcgagggcctgaaggaggccgacaaggacgagttctgcagatgcgagctgaagctgcagaagtggtacggggacctgcggggaaagcccttcgccatcgaagccgagaacagcatcctggacatcagcggcttcagcaagcagtacaactgtgccttcatctggcagaaggacggcgtgaagaagctgaacctgtacctgatcatcaactacttcaagggcggcaagctgcggttcaagaagatcaaacctgaagccttcgaagccaacagattctacaccgtgatcaacaaaaagagcggcgagatcgtgcccatggaggtgaacttcaacttcgacgaccccaacctgatcatcctgcctctggcctttggcaagagacagggcagagaattcatctggaacgacctgctgtccctggaaaccggcagcctgaagctggccaacggaagagtgatcgagaagacactgtacaacagaagaacccggcaggatgagcctgccctgttcgtggccctgaccttcgagcggcgggaggtcctggactcctccaatatcaaaccaatgaacctgatcggcgtggcaagaggcgaaaacatccccgccgtgatcgccctgaccgaccccgagggctgcccactgagccggtttaaggatagcctgggaaacccaacccacatcctgagaatcggcgagagctataaggagaagcagcggaccatccaggccaagaaggaggtggagcagcggagagccggcggctacagccggaagtacgccagcaaagccaagaatctggcagacgatatggtgagaaacaccgctagagatctgctgtactacgccgtgacccaggatgccatgctgatcttcgccaacctgagccggggcttcggccggcagggcaagcggaccttcatggccgagagacagtacacacggatggaggactggctgaccgccaagctggcctacgagggcctgagcaagacctacctgtccaagacactggcccagtacacctccaagacatgcagcaactgtgggtttaccatcaccagcgccgactacgacagggtgctggagaagctgaagaagacagcaacaggctggatgaccacaattaacggcaaggagctgaaggtggagggccagattacctactacaacagatacaagagacagaacgtagtcaaggacctgtccgtcgagctggatagactgagcgaagaatctgtgaacaacgacatctcctcctggacaaagggcagaagcggagaagctctgagcctcctgaagaaaagattctcccatagacccgtgcaggagaagttcgtgtgcctgaactgcggcttcgagacacacgcagccgagcaagccgccctgaacatcgccagatcctggctgttcctgcggagccaggagtacaagaaataccagacaaacaagacaaccggcaacaccgataagagagccttcgtcgagacctggcagtccttttaccggaagaagcttaaggaggtgtggaaacctgccgtgcggtctggcggatctggcggaggctccacaagcgccctggtgaccttcgaggacgtggccgtgaggttcacccaggaggagtgggccctgctggaccccagccagaagatcctgtacagggacgtgatgagggagacctacaggaacctgaccagcgtgggcatcaactgggagtgctgggacctggaggcctgcttcaggagcctgggcaggaacctgagggtgcaggtggtgaagaggaagtgcgagctgaccaacagcggcccctgcgccgagaccagccccaagaaaaagagaaaagtctaagctgccttctgcggggcttgccttctggccatgcccttcttctctcccttgcacctgtacctcttggtctttgaataaagcctgagtaggaaggctagcaaaaaaaaaaaaaaaaaaaaaaaaaaaaaaaaaaaaaaaaaaaaaaaaaaaaaaaaaaaaaaaaaaaaaaaaaaaaaaaa

SEQ ID NO: 2667 - RNA, 5419 nt, synthetic construct
  source 1..5419: mol_type = other RNA
aggaaataagagagaaaagaagagtaagaagaaatataagagccaccatggcccctaagaagaagcgtaaagtgagccgggtgaacggcagcggcagcggcggcggcatgaaccacgaccaggagttcgacccccctaaggtgtaccctcccgtccccgccgagaagagaaagcccatccgggtcctgagcctgttcgatggcatcgccaccggtctgctggtgctgaaggacctgggcatccaggtggataggtacattgcctccgaggtgtgcgaggactccatcaccgtgggaatggtgcgtcatcagggcaagatcatgtacgtgggcgacgtgcggagcgtgacacagaagcatatccaggagtggggccctttcgacctggtgatcggcggcagcccttgcaatgacctgagcatcgtgaacccagcccggaagggcctgtacgagggaaccggcagactgttcttcgagttttacagactgctgcacgacgcccggcctaaggaaggcgacgaccggcccttcttttggctgttcgagaatgtggtggccatgggagtcagcgacaagcgggatattagccggttcctggagagcaaccccgtgatgatcgatgccaaggaagtgagcgccgcccaccgggccagatacttctggggcaatctgcctggcatgaacagacccctggccagcaccgtgaacgacaagctggagctgcaggagtgcctggagcacggccggatcgccaagttcagcaaggtgagaaccatcaccacccgaagcaacagcatcaaacaaggcaaggaccagcactttcctgtgttcatgaacgagaaggaggacatcctgtggtgtaccgagatggagagagtgttcgggttcccagtccactacacagatgtcagcaacatgtctagactggccagacagagactgctgggaagaagctggtccgtccctgtgatcagacacctgttcgcccctctgaaggagtacttcgcctgcgtgagcagcggcaacagcaacgccaacagccggggccccagcttctctagcggcctggtgccactgtccctgagagggagccacatgggccccatggagatctacaaaaccgtgagcgcctggaagcggcagcctgtgcgcgtgctgagcctgtttcggaatatcgataaagtcctgaaaagcctgggattcctggagagcggctctggctccggcggtggcaccctgaagtacgtggaggatgtgacaaacgtggtcagacgggatgtggagaagtggggccccttcgatctggtgtacggcagcacccaacccctgggcagctcttgtgaccggtgccctggctggtacatgtttcagttccaccggatcctgcagtacgccctgccgagacaggagtcccagcggccattcttttggattttcatggacaacttgctgctgaccgaggatgaccaggaaactaccactcggttcctgcagaccgaagccgtgaccctgcaggacgtgagaggccgggactaccagaacgccatgcgggtgtggtccaacatccctggactgaaaagcaagcacgcacctctgacccctaaagaagaggagtacctgcaggcccaggtgcggagcagaagcaagctggacgcccctaaggtggatctgctggtgaagaattgcctcctgcccctgagagagtacttcaagtatttcagccagaatagtctgcccctgggcggcccaagcagcggcgcccctcctcccagcggcggcagcccagccggctccccaacctctaccgaggagggcacctctgagtccgccacccccgagagcggccctggcacctccaccgagcccagcgagggcagcgcacccggcagccctgccggcagccccacctccacagaggagggaaccagcaccgagcccagcgaaggcagcgccccaggcaccagcaccgagcctagtgagggcggctctggcggcggcagcgcccaggagattaaacggatcaacaagatcagaagaagacttgtgaaagacagcaacaccaagaaggccggcaagacaggccccatgaaaaccctgctggttagagtgatgacacccgatctgagagagcggctggaaaacctgagaaagaagcctgaaaatatcccccagcccatcagcaatacatctagagccaacctgaataagctgctgaccgattacaccgaaatgaagaaggcgatcctgcatgtgtactgggaagagttccagaaggaccctgtgggcctgatgagccgggtggcccagcctgccagcaagaagatcgatcagaacaagctgaaacctgagatggacgagaagggcaacctgaccaccgccggctttgcctgctctcagtgtggccagcccctgttcgtgtacaagctggagcaggtgtctgagaagggcaaggcttacaccaactacttcggacggtgcaatgtggccgagcacgaaaagctgatcctgctggcccagctgaagcccgagaaggatagcgacgaagccgtgacatatagcctgggaaagtttgggcagagggccctggatttctacagcattcatgtgaccaaggagtccacccaccccgtgaagcccctggcccagatcgccggaaacagatacgcctccggacctgtgggaaaggccctgagcgacgcatgtatgggcacaatcgcctccttcctgtctaagtaccaggacatcatcatcgaacaccagaaggtggtgaagggcaaccagaagagactggagagcctgcgggagctggccggcaaggaaaacctggaataccctagcgtgaccctgccacctcagcctcacaccaaggagggcgttgatgcctacaacgaagtgatcgcccgggtgcgaatgtgggtgaacctgaacctgtggcagaagctgaagctaagcagagatgatgccaagcctctgctgagactgaagggattcccttcctttcctctggtcgagagacaggccaacgaagtggactggtgggacatggtgtgtaacgtgaagaagctgatcaacgagaaaaaggaggatggcaaggtgttttggcagaatctggctggctacaagagacaggaagccctgagaccatacctgagcagcgaggaagatcggaagaagggaaagaaattcgctcggtaccagctgggcgacctgctgctgcacctggaaaagaagcacggcgaggactggggaaaggtgtacgacgaggcctgggagcggattgacaagaaagtggaaggcctgagcaagcacatcaagctggaagaggaacggagaagcgaggacgcccagagcaaggccgccctgaccgactggctgcgggctaaggccagcttcgtgatcgagggcctgaaggaggccgacaaggacgagttctgcagatgcgagctgaagctgcagaagtggtacggggacctgcggggaaagcccttcgccatcgaagccgagaacagcatcctggacatcagcggcttcagcaagcagtacaactgtgccttcatctggcagaaggacggcgtgaagaagctgaacctgtacctgatcatcaactacttcaagggcggcaagctgcggttcaagaagatcaaacctgaagccttcgaagccaacagattctacaccgtgatcaacaaaaagagcggcgagatcgtgcccatggaggtgaacttcaacttcgacgaccccaacctgatcatcctgcctctggcctttggcaagagacagggcagagaattcatctggaacgacctgctgtccctggaaaccggcagcctgaagctggccaacggaagagtgatcgagaagacactgtacaacagaagaacccggcaggatgagcctgccctgttcgtggccctgaccttcgagcggcgggaggtcctggactcctccaatatcaaaccaatgaacctgatcggcgtggcaagaggcgaaaacatccccgccgtgatcgccctgaccgaccccgagggctgcccactgagccggtttaaggatagcctgggaaacccaacccacatcctgagaatcggcgagagctataaggagaagcagcggaccatccaggccaagaaggaggtggagcagcggagagccggcggctacagccggaagtacgccagcaaagccaagaatctggcagacgatatggtgagaaacaccgctagagatctgctgtactacgccgtgacccaggatgccatgctgatcttcgccaacctgagccggggcttcggccggcagggcaagcggaccttcatggccgagagacagtacacacggatggaggactggctgaccgccaagctggcctacgagggcctgagcaagacctacctgtccaagacactggcccagtacacctccaagacatgcagcaactgtgggtttaccatcaccagcgccgactacgacagggtgctggagaagctgaagaagacagcaacaggctggatgaccacaattaacggcaaggagctgaaggtggagggccagattacctactacaacagatacaagagacagaacgtagtcaaggacctgtccgtcgagctggatagactgagcgaagaatctgtgaacaacgacatctcctcctggacaaagggcagaagcggagaagctctgagcctcctgaagaaaagattctcccatagacccgtgcaggagaagttcgtgtgcctgaactgcggcttcgagacacacgcagccgagcaagccgccctgaacatcgccagatcctggctgttcctgcggagccaggagtacaagaaataccagacaaacaagacaaccggcaacaccgataagagagccttcgtcgagacctggcagtccttttaccggaagaagcttaaggaggtgtggaaacctgccgtgcggtctggcggatctggcggaggctccacaagcgtgctgggcctggtgaccttcggcgacgtggccatcgacttcagcagggaggagtgggagtggctgaacagcgcccagaggaccctgcacagggacgtgatgctggagaactacaggaacctggtgagcctgggcctgtgcgtgagcaagcccgacatgatcagcagcctggagcagaggaaggagccctggatggtgaagaggaagctgaccaggggcaggtgccccgacctgaagaccatgaccagccccaagaaaaagagaaaagtctaagctgccttctgcggggcttgccttctggccatgcccttcttctctcccttgcacctgtacctcttggtctttgaataaagcctgagtaggaaggctagcaaaaaaaaaaaaaaaaaaaaaaaaaaaaaaaaaaaaaaaaaaaaaaaaaaaaaaaaaaaaaaaaaaaaaaaaaaaaaaaa

SEQ ID NO: 2668 - RNA, 5419 nt, synthetic construct
  source 1..5419: mol_type = other RNA
aggaaataagagagaaaagaagagtaagaagaaatataagagccaccatggcccctaagaagaagcgtaaagtgagccgggtgaacggcagcggcagcggcggcggcatgaaccacgaccaggagttcgacccccctaaggtgtaccctcccgtccccgccgagaagagaaagcccatccgggtcctgagcctgttcgatggcatcgccaccggtctgctggtgctgaaggacctgggcatccaggtggataggtacattgcctccgaggtgtgcgaggactccatcaccgtgggaatggtgcgtcatcagggcaagatcatgtacgtgggcgacgtgcggagcgtgacacagaagcatatccaggagtggggccctttcgacctggtgatcggcggcagcccttgcaatgacctgagcatcgtgaacccagcccggaagggcctgtacgagggaaccggcagactgttcttcgagttttacagactgctgcacgacgcccggcctaaggaaggcgacgaccggcccttcttttggctgttcgagaatgtggtggccatgggagtcagcgacaagcgggatattagccggttcctggagagcaaccccgtgatgatcgatgccaaggaagtgagcgccgcccaccgggccagatacttctggggcaatctgcctggcatgaacagacccctggccagcaccgtgaacgacaagctggagctgcaggagtgcctggagcacggccggatcgccaagttcagcaaggtgagaaccatcaccacccgaagcaacagcatcaaacaaggcaaggaccagcactttcctgtgttcatgaacgagaaggaggacatcctgtggtgtaccgagatggagagagtgttcgggttcccagtccactacacagatgtcagcaacatgtctagactggccagacagagactgctgggaagaagctggtccgtccctgtgatcagacacctgttcgcccctctgaaggagtacttcgcctgcgtgagcagcggcaacagcaacgccaacagccggggccccagcttctctagcggcctggtgccactgtccctgagagggagccacatgggccccatggagatctacaaaaccgtgagcgcctggaagcggcagcctgtgcgcgtgctgagcctgtttcggaatatcgataaagtcctgaaaagcctgggattcctggagagcggctctggctccggcggtggcaccctgaagtacgtggaggatgtgacaaacgtggtcagacgggatgtggagaagtggggccccttcgatctggtgtacggcagcacccaacccctgggcagctcttgtgaccggtgccctggctggtacatgtttcagttccaccggatcctgcagtacgccctgccgagacaggagtcccagcggccattcttttggattttcatggacaacttgctgctgaccgaggatgaccaggaaactaccactcggttcctgcagaccgaagccgtgaccctgcaggacgtgagaggccgggactaccagaacgccatgcgggtgtggtccaacatccctggactgaaaagcaagcacgcacctctgacccctaaagaagaggagtacctgcaggcccaggtgcggagcagaagcaagctggacgcccctaaggtggatctgctggtgaagaattgcctcctgcccctgagagagtacttcaagtatttcagccagaatagtctgcccctgggcggcccaagcagcggcgcccctcctcccagcggcggcagcccagccggctccccaacctctaccgaggagggcacctctgagtccgccacccccgagagcggccctggcacctccaccgagcccagcgagggcagcgcacccggcagccctgccggcagccccacctccacagaggagggaaccagcaccgagcccagcgaaggcagcgccccaggcaccagcaccgagcctagtgagggcggctctggcggcggcagcgcccaggagattaaacggatcaacaagatcagaagaagacttgtgaaagacagcaacaccaagaaggccggcaagacaggccccatgaaaaccctgctggttagagtgatgacacccgatctgagagagcggctggaaaacctgagaaagaagcctgaaaatatcccccagcccatcagcaatacatctagagccaacctgaataagctgctgaccgattacaccgaaatgaagaaggcgatcctgcatgtgtactgggaagagttccagaaggaccctgtgggcctgatgagccgggtggcccagcctgccagcaagaagatcgatcagaacaagctgaaacctgagatggacgagaagggcaacctgaccaccgccggctttgcctgctctcagtgtggccagcccctgttcgtgtacaagctggagcaggtgtctgagaagggcaaggcttacaccaactacttcggacggtgcaatgtggccgagcacgaaaagctgatcctgctggcccagctgaagcccgagaaggatagcgacgaagccgtgacatatagcctgggaaagtttgggcagagggccctggatttctacagcattcatgtgaccaaggagtccacccaccccgtgaagcccctggcccagatcgccggaaacagatacgcctccggacctgtgggaaaggccctgagcgacgcatgtatgggcacaatcgcctccttcctgtctaagtaccaggacatcatcatcgaacaccagaaggtggtgaagggcaaccagaagagactggagagcctgcgggagctggccggcaaggaaaacctggaataccctagcgtgaccctgccacctcagcctcacaccaaggagggcgttgatgcctacaacgaagtgatcgcccgggtgcgaatgtgggtgaacctgaacctgtggcagaagctgaagctaagcagagatgatgccaagcctctgctgagactgaagggattcccttcctttcctctggtcgagagacaggccaacgaagtggactggtgggacatggtgtgtaacgtgaagaagctgatcaacgagaaaaaggaggatggcaaggtgttttggcagaatctggctggctacaagagacaggaagccctgagaccatacctgagcagcgaggaagatcggaagaagggaaagaaattcgctcggtaccagctgggcgacctgctgctgcacctggaaaagaagcacggcgaggactggggaaaggtgtacgacgaggcctgggagcggattgacaagaaagtggaaggcctgagcaagcacatcaagctggaagaggaacggagaagcgaggacgcccagagcaaggccgccctgaccgactggctgcgggctaaggccagcttcgtgatcgagggcctgaaggaggccgacaaggacgagttctgcagatgcgagctgaagctgcagaagtggtacggggacctgcggggaaagcccttcgccatcgaagccgagaacagcatcctggacatcagcggcttcagcaagcagtacaactgtgccttcatctggcagaaggacggcgtgaagaagctgaacctgtacctgatcatcaactacttcaagggcggcaagctgcggttcaagaagatcaaacctgaagccttcgaagccaacagattctacaccgtgatcaacaaaaagagcggcgagatcgtgcccatggaggtgaacttcaacttcgacgaccccaacctgatcatcctgcctctggcctttggcaagagacagggcagagaattcatctggaacgacctgctgtccctggaaaccggcagcctgaagctggccaacggaagagtgatcgagaagacactgtacaacagaagaacccggcaggatgagcctgccctgttcgtggccctgaccttcgagcggcgggaggtcctggactcctccaatatcaaaccaatgaacctgatcggcgtggcaagaggcgaaaacatccccgccgtgatcgccctgaccgaccccgagggctgcccactgagccggtttaaggatagcctgggaaacccaacccacatcctgagaatcggcgagagctataaggagaagcagcggaccatccaggccaagaaggaggtggagcagcggagagccggcggctacagccggaagtacgccagcaaagccaagaatctggcagacgatatggtgagaaacaccgctagagatctgctgtactacgccgtgacccaggatgccatgctgatcttcgccaacctgagccggggcttcggccggcagggcaagcggaccttcatggccgagagacagtacacacggatggaggactggctgaccgccaagctggcctacgagggcctgagcaagacctacctgtccaagacactggcccagtacacctccaagacatgcagcaactgtgggtttaccatcaccagcgccgactacgacagggtgctggagaagctgaagaagacagcaacaggctggatgaccacaattaacggcaaggagctgaaggtggagggccagattacctactacaacagatacaagagacagaacgtagtcaaggacctgtccgtcgagctggatagactgagcgaagaatctgtgaacaacgacatctcctcctggacaaagggcagaagcggagaagctctgagcctcctgaagaaaagattctcccatagacccgtgcaggagaagttcgtgtgcctgaactgcggcttcgagacacacgcagccgagcaagccgccctgaacatcgccagatcctggctgttcctgcggagccaggagtacaagaaataccagacaaacaagacaaccggcaacaccgataagagagccttcgtcgagacctggcagtccttttaccggaagaagcttaaggaggtgtggaaacctgccgtgcggtctggcggatctggcggaggctccacaagcggcagcctggaggagggcaggagggccaccggcctgcccgccgcccaggtgcaggagcccgtgaccttcaaggacgtggccgtggacttcacccaggaggagtggggccagctggacctggtgcagaggaccctgtacagggacgtgatgctggagacctacggccacctgctgagcgtgggcaaccagatcgccaagcccgaggtgatcagcctgctggagcagggcgaggagccctggagcaccagccccaagaaaaagagaaaagtctaagctgccttctgcggggcttgccttctggccatgcccttcttctctcccttgcacctgtacctcttggtctttgaataaagcctgagtaggaaggctagcaaaaaaaaaaaaaaaaaaaaaaaaaaaaaaaaaaaaaaaaaaaaaaaaaaaaaaaaaaaaaaaaaaaaaaaaaaaaaaaa

SEQ ID NO: 2669 - RNA, 5419 nt, synthetic construct
  source 1..5419: mol_type = other RNA
aggaaataagagagaaaagaagagtaagaagaaatataagagccaccatggcccctaagaagaagcgtaaagtgagccgggtgaacggcagcggcagcggcggcggcatgaaccacgaccaggagttcgacccccctaaggtgtaccctcccgtccccgccgagaagagaaagcccatccgggtcctgagcctgttcgatggcatcgccaccggtctgctggtgctgaaggacctgggcatccaggtggataggtacattgcctccgaggtgtgcgaggactccatcaccgtgggaatggtgcgtcatcagggcaagatcatgtacgtgggcgacgtgcggagcgtgacacagaagcatatccaggagtggggccctttcgacctggtgatcggcggcagcccttgcaatgacctgagcatcgtgaacccagcccggaagggcctgtacgagggaaccggcagactgttcttcgagttttacagactgctgcacgacgcccggcctaaggaaggcgacgaccggcccttcttttggctgttcgagaatgtggtggccatgggagtcagcgacaagcgggatattagccggttcctggagagcaaccccgtgatgatcgatgccaaggaagtgagcgccgcccaccgggccagatacttctggggcaatctgcctggcatgaacagacccctggccagcaccgtgaacgacaagctggagctgcaggagtgcctggagcacggccggatcgccaagttcagcaaggtgagaaccatcaccacccgaagcaacagcatcaaacaaggcaaggaccagcactttcctgtgttcatgaacgagaaggaggacatcctgtggtgtaccgagatggagagagtgttcgggttcccagtccactacacagatgtcagcaacatgtctagactggccagacagagactgctgggaagaagctggtccgtccctgtgatcagacacctgttcgcccctctgaaggagtacttcgcctgcgtgagcagcggcaacagcaacgccaacagccggggccccagcttctctagcggcctggtgccactgtccctgagagggagccacatgggccccatggagatctacaaaaccgtgagcgcctggaagcggcagcctgtgcgcgtgctgagcctgtttcggaatatcgataaagtcctgaaaagcctgggattcctggagagcggctctggctccggcggtggcaccctgaagtacgtggaggatgtgacaaacgtggtcagacgggatgtggagaagtggggccccttcgatctggtgtacggcagcacccaacccctgggcagctcttgtgaccggtgccctggctggtacatgtttcagttccaccggatcctgcagtacgccctgccgagacaggagtcccagcggccattcttttggattttcatggacaacttgctgctgaccgaggatgaccaggaaactaccactcggttcctgcagaccgaagccgtgaccctgcaggacgtgagaggccgggactaccagaacgccatgcgggtgtggtccaacatccctggactgaaaagcaagcacgcacctctgacccctaaagaagaggagtacctgcaggcccaggtgcggagcagaagcaagctggacgcccctaaggtggatctgctggtgaagaattgcctcctgcccctgagagagtacttcaagtatttcagccagaatagtctgcccctgggcggcccaagcagcggcgcccctcctcccagcggcggcagcccagccggctccccaacctctaccgaggagggcacctctgagtccgccacccccgagagcggccctggcacctccaccgagcccagcgagggcagcgcacccggcagccctgccggcagccccacctccacagaggagggaaccagcaccgagcccagcgaaggcagcgccccaggcaccagcaccgagcctagtgagggcggctctggcggcggcagcgcccaggagattaaacggatcaacaagatcagaagaagacttgtgaaagacagcaacaccaagaaggccggcaagacaggccccatgaaaaccctgctggttagagtgatgacacccgatctgagagagcggctggaaaacctgagaaagaagcctgaaaatatcccccagcccatcagcaatacatctagagccaacctgaataagctgctgaccgattacaccgaaatgaagaaggcgatcctgcatgtgtactgggaagagttccagaaggaccctgtgggcctgatgagccgggtggcccagcctgccagcaagaagatcgatcagaacaagctgaaacctgagatggacgagaagggcaacctgaccaccgccggctttgcctgctctcagtgtggccagcccctgttcgtgtacaagctggagcaggtgtctgagaagggcaaggcttacaccaactacttcggacggtgcaatgtggccgagcacgaaaagctgatcctgctggcccagctgaagcccgagaaggatagcgacgaagccgtgacatatagcctgggaaagtttgggcagagggccctggatttctacagcattcatgtgaccaaggagtccacccaccccgtgaagcccctggcccagatcgccggaaacagatacgcctccggacctgtgggaaaggccctgagcgacgcatgtatgggcacaatcgcctccttcctgtctaagtaccaggacatcatcatcgaacaccagaaggtggtgaagggcaaccagaagagactggagagcctgcgggagctggccggcaaggaaaacctggaataccctagcgtgaccctgccacctcagcctcacaccaaggagggcgttgatgcctacaacgaagtgatcgcccgggtgcgaatgtgggtgaacctgaacctgtggcagaagctgaagctaagcagagatgatgccaagcctctgctgagactgaagggattcccttcctttcctctggtcgagagacaggccaacgaagtggactggtgggacatggtgtgtaacgtgaagaagctgatcaacgagaaaaaggaggatggcaaggtgttttggcagaatctggctggctacaagagacaggaagccctgagaccatacctgagcagcgaggaagatcggaagaagggaaagaaattcgctcggtaccagctgggcgacctgctgctgcacctggaaaagaagcacggcgaggactggggaaaggtgtacgacgaggcctgggagcggattgacaagaaagtggaaggcctgagcaagcacatcaagctggaagaggaacggagaagcgaggacgcccagagcaaggccgccctgaccgactggctgcgggctaaggccagcttcgtgatcgagggcctgaaggaggccgacaaggacgagttctgcagatgcgagctgaagctgcagaagtggtacggggacctgcggggaaagcccttcgccatcgaagccgagaacagcatcctggacatcagcggcttcagcaagcagtacaactgtgccttcatctggcagaaggacggcgtgaagaagctgaacctgtacctgatcatcaactacttcaagggcggcaagctgcggttcaagaagatcaaacctgaagccttcgaagccaacagattctacaccgtgatcaacaaaaagagcggcgagatcgtgcccatggaggtgaacttcaacttcgacgaccccaacctgatcatcctgcctctggcctttggcaagagacagggcagagaattcatctggaacgacctgctgtccctggaaaccggcagcctgaagctggccaacggaagagtgatcgagaagacactgtacaacagaagaacccggcaggatgagcctgccctgttcgtggccctgaccttcgagcggcgggaggtcctggactcctccaatatcaaaccaatgaacctgatcggcgtggcaagaggcgaaaacatccccgccgtgatcgccctgaccgaccccgagggctgcccactgagccggtttaaggatagcctgggaaacccaacccacatcctgagaatcggcgagagctataaggagaagcagcggaccatccaggccaagaaggaggtggagcagcggagagccggcggctacagccggaagtacgccagcaaagccaagaatctggcagacgatatggtgagaaacaccgctagagatctgctgtactacgccgtgacccaggatgccatgctgatcttcgccaacctgagccggggcttcggccggcagggcaagcggaccttcatggccgagagacagtacacacggatggaggactggctgaccgccaagctggcctacgagggcctgagcaagacctacctgtccaagacactggcccagtacacctccaagacatgcagcaactgtgggtttaccatcaccagcgccgactacgacagggtgctggagaagctgaagaagacagcaacaggctggatgaccacaattaacggcaaggagctgaaggtggagggccagattacctactacaacagatacaagagacagaacgtagtcaaggacctgtccgtcgagctggatagactgagcgaagaatctgtgaacaacgacatctcctcctggacaaagggcagaagcggagaagctctgagcctcctgaagaaaagattctcccatagacccgtgcaggagaagttcgtgtgcctgaactgcggcttcgagacacacgcagccgagcaagccgccctgaacatcgccagatcctggctgttcctgcggagccaggagtacaagaaataccagacaaacaagacaaccggcaacaccgataagagagccttcgtcgagacctggcagtccttttaccggaagaagcttaaggaggtgtggaaacctgccgtgcggtctggcggatctggcggaggctccacaagcagcaaggcccccgtgaccttcggcgacctggccatctacttcagccaggaggagtgggagtggctgagccccatccagaaggacctgtacgaggacgtgatgctggagaactacaggaacctggtgagcctgggcctgagcttcaggaggcccaacgtgatcaccctgctggagaagggcaaggccccctggatggtggagcccgtgaggaggaggagggcccccgagctgaccgaggccagcaccagccccaagaaaaagagaaaagtctaagctgccttctgcggggcttgccttctggccatgcccttcttctctcccttgcacctgtacctcttggtctttgaataaagcctgagtaggaaggctagcaaaaaaaaaaaaaaaaaaaaaaaaaaaaaaaaaaaaaaaaaaaaaaaaaaaaaaaaaaaaaaaaaaaaaaaaaaaaaaaa

SEQ ID NO: 2670 - RNA, 5419 nt, synthetic construct
  source 1..5419: mol_type = other RNA
aggaaataagagagaaaagaagagtaagaagaaatataagagccaccatggcccctaagaagaagcgtaaagtgagccgggtgaacggcagcggcagcggcggcggcatgaaccacgaccaggagttcgacccccctaaggtgtaccctcccgtccccgccgagaagagaaagcccatccgggtcctgagcctgttcgatggcatcgccaccggtctgctggtgctgaaggacctgggcatccaggtggataggtacattgcctccgaggtgtgcgaggactccatcaccgtgggaatggtgcgtcatcagggcaagatcatgtacgtgggcgacgtgcggagcgtgacacagaagcatatccaggagtggggccctttcgacctggtgatcggcggcagcccttgcaatgacctgagcatcgtgaacccagcccggaagggcctgtacgagggaaccggcagactgttcttcgagttttacagactgctgcacgacgcccggcctaaggaaggcgacgaccggcccttcttttggctgttcgagaatgtggtggccatgggagtcagcgacaagcgggatattagccggttcctggagagcaaccccgtgatgatcgatgccaaggaagtgagcgccgcccaccgggccagatacttctggggcaatctgcctggcatgaacagacccctggccagcaccgtgaacgacaagctggagctgcaggagtgcctggagcacggccggatcgccaagttcagcaaggtgagaaccatcaccacccgaagcaacagcatcaaacaaggcaaggaccagcactttcctgtgttcatgaacgagaaggaggacatcctgtggtgtaccgagatggagagagtgttcgggttcccagtccactacacagatgtcagcaacatgtctagactggccagacagagactgctgggaagaagctggtccgtccctgtgatcagacacctgttcgcccctctgaaggagtacttcgcctgcgtgagcagcggcaacagcaacgccaacagccggggccccagcttctctagcggcctggtgccactgtccctgagagggagccacatgggccccatggagatctacaaaaccgtgagcgcctggaagcggcagcctgtgcgcgtgctgagcctgtttcggaatatcgataaagtcctgaaaagcctgggattcctggagagcggctctggctccggcggtggcaccctgaagtacgtggaggatgtgacaaacgtggtcagacgggatgtggagaagtggggccccttcgatctggtgtacggcagcacccaacccctgggcagctcttgtgaccggtgccctggctggtacatgtttcagttccaccggatcctgcagtacgccctgccgagacaggagtcccagcggccattcttttggattttcatggacaacttgctgctgaccgaggatgaccaggaaactaccactcggttcctgcagaccgaagccgtgaccctgcaggacgtgagaggccgggactaccagaacgccatgcgggtgtggtccaacatccctggactgaaaagcaagcacgcacctctgacccctaaagaagaggagtacctgcaggcccaggtgcggagcagaagcaagctggacgcccctaaggtggatctgctggtgaagaattgcctcctgcccctgagagagtacttcaagtatttcagccagaatagtctgcccctgggcggcccaagcagcggcgcccctcctcccagcggcggcagcccagccggctccccaacctctaccgaggagggcacctctgagtccgccacccccgagagcggccctggcacctccaccgagcccagcgagggcagcgcacccggcagccctgccggcagccccacctccacagaggagggaaccagcaccgagcccagcgaaggcagcgccccaggcaccagcaccgagcctagtgagggcggctctggcggcggcagcgcccaggagattaaacggatcaacaagatcagaagaagacttgtgaaagacagcaacaccaagaaggccggcaagacaggccccatgaaaaccctgctggttagagtgatgacacccgatctgagagagcggctggaaaacctgagaaagaagcctgaaaatatcccccagcccatcagcaatacatctagagccaacctgaataagctgctgaccgattacaccgaaatgaagaaggcgatcctgcatgtgtactgggaagagttccagaaggaccctgtgggcctgatgagccgggtggcccagcctgccagcaagaagatcgatcagaacaagctgaaacctgagatggacgagaagggcaacctgaccaccgccggctttgcctgctctcagtgtggccagcccctgttcgtgtacaagctggagcaggtgtctgagaagggcaaggcttacaccaactacttcggacggtgcaatgtggccgagcacgaaaagctgatcctgctggcccagctgaagcccgagaaggatagcgacgaagccgtgacatatagcctgggaaagtttgggcagagggccctggatttctacagcattcatgtgaccaaggagtccacccaccccgtgaagcccctggcccagatcgccggaaacagatacgcctccggacctgtgggaaaggccctgagcgacgcatgtatgggcacaatcgcctccttcctgtctaagtaccaggacatcatcatcgaacaccagaaggtggtgaagggcaaccagaagagactggagagcctgcgggagctggccggcaaggaaaacctggaataccctagcgtgaccctgccacctcagcctcacaccaaggagggcgttgatgcctacaacgaagtgatcgcccgggtgcgaatgtgggtgaacctgaacctgtggcagaagctgaagctaagcagagatgatgccaagcctctgctgagactgaagggattcccttcctttcctctggtcgagagacaggccaacgaagtggactggtgggacatggtgtgtaacgtgaagaagctgatcaacgagaaaaaggaggatggcaaggtgttttggcagaatctggctggctacaagagacaggaagccctgagaccatacctgagcagcgaggaagatcggaagaagggaaagaaattcgctcggtaccagctgggcgacctgctgctgcacctggaaaagaagcacggcgaggactggggaaaggtgtacgacgaggcctgggagcggattgacaagaaagtggaaggcctgagcaagcacatcaagctggaagaggaacggagaagcgaggacgcccagagcaaggccgccctgaccgactggctgcgggctaaggccagcttcgtgatcgagggcctgaaggaggccgacaaggacgagttctgcagatgcgagctgaagctgcagaagtggtacggggacctgcggggaaagcccttcgccatcgaagccgagaacagcatcctggacatcagcggcttcagcaagcagtacaactgtgccttcatctggcagaaggacggcgtgaagaagctgaacctgtacctgatcatcaactacttcaagggcggcaagctgcggttcaagaagatcaaacctgaagccttcgaagccaacagattctacaccgtgatcaacaaaaagagcggcgagatcgtgcccatggaggtgaacttcaacttcgacgaccccaacctgatcatcctgcctctggcctttggcaagagacagggcagagaattcatctggaacgacctgctgtccctggaaaccggcagcctgaagctggccaacggaagagtgatcgagaagacactgtacaacagaagaacccggcaggatgagcctgccctgttcgtggccctgaccttcgagcggcgggaggtcctggactcctccaatatcaaaccaatgaacctgatcggcgtggcaagaggcgaaaacatccccgccgtgatcgccctgaccgaccccgagggctgcccactgagccggtttaaggatagcctgggaaacccaacccacatcctgagaatcggcgagagctataaggagaagcagcggaccatccaggccaagaaggaggtggagcagcggagagccggcggctacagccggaagtacgccagcaaagccaagaatctggcagacgatatggtgagaaacaccgctagagatctgctgtactacgccgtgacccaggatgccatgctgatcttcgccaacctgagccggggcttcggccggcagggcaagcggaccttcatggccgagagacagtacacacggatggaggactggctgaccgccaagctggcctacgagggcctgagcaagacctacctgtccaagacactggcccagtacacctccaagacatgcagcaactgtgggtttaccatcaccagcgccgactacgacagggtgctggagaagctgaagaagacagcaacaggctggatgaccacaattaacggcaaggagctgaaggtggagggccagattacctactacaacagatacaagagacagaacgtagtcaaggacctgtccgtcgagctggatagactgagcgaagaatctgtgaacaacgacatctcctcctggacaaagggcagaagcggagaagctctgagcctcctgaagaaaagattctcccatagacccgtgcaggagaagttcgtgtgcctgaactgcggcttcgagacacacgcagccgagcaagccgccctgaacatcgccagatcctggctgttcctgcggagccaggagtacaagaaataccagacaaacaagacaaccggcaacaccgataagagagccttcgtcgagacctggcagtccttttaccggaagaagcttaaggaggtgtggaaacctgccgtgcggtctggcggatctggcggaggctccacaagcccccagggcctggtgaccttcggcgacgtggccgtggacttcagccaggaggagtgggagtggctgaaccccaaccagaggaccctgtacaggaaggtgatgctggagaactacaagaacctggccagcctgggcctgtgcgtgagcaagcccgacgtgatcagcagcctggagcagggcaaggagccctggaccgtgaagaggaagatgaccagggcctggtgccccgacctgaagatcgtgaccagccccaagaaaaagagaaaagtctaagctgccttctgcggggcttgccttctggccatgcccttcttctctcccttgcacctgtacctcttggtctttgaataaagcctgagtaggaaggctagcaaaaaaaaaaaaaaaaaaaaaaaaaaaaaaaaaaaaaaaaaaaaaaaaaaaaaaaaaaaaaaaaaaaaaaaaaaaaaaaa

SEQ ID NO: 2671 - RNA, 5419 nt, synthetic construct
  source 1..5419: mol_type = other RNA
aggaaataagagagaaaagaagagtaagaagaaatataagagccaccatggcccctaagaagaagcgtaaagtgagccgggtgaacggcagcggcagcggcggcggcatgaaccacgaccaggagttcgacccccctaaggtgtaccctcccgtccccgccgagaagagaaagcccatccgggtcctgagcctgttcgatggcatcgccaccggtctgctggtgctgaaggacctgggcatccaggtggataggtacattgcctccgaggtgtgcgaggactccatcaccgtgggaatggtgcgtcatcagggcaagatcatgtacgtgggcgacgtgcggagcgtgacacagaagcatatccaggagtggggccctttcgacctggtgatcggcggcagcccttgcaatgacctgagcatcgtgaacccagcccggaagggcctgtacgagggaaccggcagactgttcttcgagttttacagactgctgcacgacgcccggcctaaggaaggcgacgaccggcccttcttttggctgttcgagaatgtggtggccatgggagtcagcgacaagcgggatattagccggttcctggagagcaaccccgtgatgatcgatgccaaggaagtgagcgccgcccaccgggccagatacttctggggcaatctgcctggcatgaacagacccctggccagcaccgtgaacgacaagctggagctgcaggagtgcctggagcacggccggatcgccaagttcagcaaggtgagaaccatcaccacccgaagcaacagcatcaaacaaggcaaggaccagcactttcctgtgttcatgaacgagaaggaggacatcctgtggtgtaccgagatggagagagtgttcgggttcccagtccactacacagatgtcagcaacatgtctagactggccagacagagactgctgggaagaagctggtccgtccctgtgatcagacacctgttcgcccctctgaaggagtacttcgcctgcgtgagcagcggcaacagcaacgccaacagccggggccccagcttctctagcggcctggtgccactgtccctgagagggagccacatgggccccatggagatctacaaaaccgtgagcgcctggaagcggcagcctgtgcgcgtgctgagcctgtttcggaatatcgataaagtcctgaaaagcctgggattcctggagagcggctctggctccggcggtggcaccctgaagtacgtggaggatgtgacaaacgtggtcagacgggatgtggagaagtggggccccttcgatctggtgtacggcagcacccaacccctgggcagctcttgtgaccggtgccctggctggtacatgtttcagttccaccggatcctgcagtacgccctgccgagacaggagtcccagcggccattcttttggattttcatggacaacttgctgctgaccgaggatgaccaggaaactaccactcggttcctgcagaccgaagccgtgaccctgcaggacgtgagaggccgggactaccagaacgccatgcgggtgtggtccaacatccctggactgaaaagcaagcacgcacctctgacccctaaagaagaggagtacctgcaggcccaggtgcggagcagaagcaagctggacgcccctaaggtggatctgctggtgaagaattgcctcctgcccctgagagagtacttcaagtatttcagccagaatagtctgcccctgggcggcccaagcagcggcgcccctcctcccagcggcggcagcccagccggctccccaacctctaccgaggagggcacctctgagtccgccacccccgagagcggccctggcacctccaccgagcccagcgagggcagcgcacccggcagccctgccggcagccccacctccacagaggagggaaccagcaccgagcccagcgaaggcagcgccccaggcaccagcaccgagcctagtgagggcggctctggcggcggcagcgcccaggagattaaacggatcaacaagatcagaagaagacttgtgaaagacagcaacaccaagaaggccggcaagacaggccccatgaaaaccctgctggttagagtgatgacacccgatctgagagagcggctggaaaacctgagaaagaagcctgaaaatatcccccagcccatcagcaatacatctagagccaacctgaataagctgctgaccgattacaccgaaatgaagaaggcgatcctgcatgtgtactgggaagagttccagaaggaccctgtgggcctgatgagccgggtggcccagcctgccagcaagaagatcgatcagaacaagctgaaacctgagatggacgagaagggcaacctgaccaccgccggctttgcctgctctcagtgtggccagcccctgttcgtgtacaagctggagcaggtgtctgagaagggcaaggcttacaccaactacttcggacggtgcaatgtggccgagcacgaaaagctgatcctgctggcccagctgaagcccgagaaggatagcgacgaagccgtgacatatagcctgggaaagtttgggcagagggccctggatttctacagcattcatgtgaccaaggagtccacccaccccgtgaagcccctggcccagatcgccggaaacagatacgcctccggacctgtgggaaaggccctgagcgacgcatgtatgggcacaatcgcctccttcctgtctaagtaccaggacatcatcatcgaacaccagaaggtggtgaagggcaaccagaagagactggagagcctgcgggagctggccggcaaggaaaacctggaataccctagcgtgaccctgccacctcagcctcacaccaaggagggcgttgatgcctacaacgaagtgatcgcccgggtgcgaatgtgggtgaacctgaacctgtggcagaagctgaagctaagcagagatgatgccaagcctctgctgagactgaagggattcccttcctttcctctggtcgagagacaggccaacgaagtggactggtgggacatggtgtgtaacgtgaagaagctgatcaacgagaaaaaggaggatggcaaggtgttttggcagaatctggctggctacaagagacaggaagccctgagaccatacctgagcagcgaggaagatcggaagaagggaaagaaattcgctcggtaccagctgggcgacctgctgctgcacctggaaaagaagcacggcgaggactggggaaaggtgtacgacgaggcctgggagcggattgacaagaaagtggaaggcctgagcaagcacatcaagctggaagaggaacggagaagcgaggacgcccagagcaaggccgccctgaccgactggctgcgggctaaggccagcttcgtgatcgagggcctgaaggaggccgacaaggacgagttctgcagatgcgagctgaagctgcagaagtggtacggggacctgcggggaaagcccttcgccatcgaagccgagaacagcatcctggacatcagcggcttcagcaagcagtacaactgtgccttcatctggcagaaggacggcgtgaagaagctgaacctgtacctgatcatcaactacttcaagggcggcaagctgcggttcaagaagatcaaacctgaagccttcgaagccaacagattctacaccgtgatcaacaaaaagagcggcgagatcgtgcccatggaggtgaacttcaacttcgacgaccccaacctgatcatcctgcctctggcctttggcaagagacagggcagagaattcatctggaacgacctgctgtccctggaaaccggcagcctgaagctggccaacggaagagtgatcgagaagacactgtacaacagaagaacccggcaggatgagcctgccctgttcgtggccctgaccttcgagcggcgggaggtcctggactcctccaatatcaaaccaatgaacctgatcggcgtggcaagaggcgaaaacatccccgccgtgatcgccctgaccgaccccgagggctgcccactgagccggtttaaggatagcctgggaaacccaacccacatcctgagaatcggcgagagctataaggagaagcagcggaccatccaggccaagaaggaggtggagcagcggagagccggcggctacagccggaagtacgccagcaaagccaagaatctggcagacgatatggtgagaaacaccgctagagatctgctgtactacgccgtgacccaggatgccatgctgatcttcgccaacctgagccggggcttcggccggcagggcaagcggaccttcatggccgagagacagtacacacggatggaggactggctgaccgccaagctggcctacgagggcctgagcaagacctacctgtccaagacactggcccagtacacctccaagacatgcagcaactgtgggtttaccatcaccagcgccgactacgacagggtgctggagaagctgaagaagacagcaacaggctggatgaccacaattaacggcaaggagctgaaggtggagggccagattacctactacaacagatacaagagacagaacgtagtcaaggacctgtccgtcgagctggatagactgagcgaagaatctgtgaacaacgacatctcctcctggacaaagggcagaagcggagaagctctgagcctcctgaagaaaagattctcccatagacccgtgcaggagaagttcgtgtgcctgaactgcggcttcgagacacacgcagccgagcaagccgccctgaacatcgccagatcctggctgttcctgcggagccaggagtacaagaaataccagacaaacaagacaaccggcaacaccgataagagagccttcgtcgagacctggcagtccttttaccggaagaagcttaaggaggtgtggaaacctgccgtgcggtctggcggatctggcggaggctccacaagcgccagggagagcgtggtgttcagcgacgtgagcatcgccttcagccaggaggagtgggcccacctggacctggagcagaaggacctgtacagggacgtgatgctggagaactacagcaacctggtgagcctggccggctgcttcgtgagcaagcccgacgtgatcagcctgctggagcagggcaaggagccctggaagatcgtgaggaagggcaggaggaggtaccccgacctggagaccaggaccagccccaagaaaaagagaaaagtctaagctgccttctgcggggcttgccttctggccatgcccttcttctctcccttgcacctgtacctcttggtctttgaataaagcctgagtaggaaggctagcaaaaaaaaaaaaaaaaaaaaaaaaaaaaaaaaaaaaaaaaaaaaaaaaaaaaaaaaaaaaaaaaaaaaaaaaaaaaaaaa

SEQ ID NO: 2672 - RNA, 5419 nt, synthetic construct
  source 1..5419: mol_type = other RNA
aggaaataagagagaaaagaagagtaagaagaaatataagagccaccatggcccctaagaagaagcgtaaagtgagccgggtgaacggcagcggcagcggcggcggcatgaaccacgaccaggagttcgacccccctaaggtgtaccctcccgtccccgccgagaagagaaagcccatccgggtcctgagcctgttcgatggcatcgccaccggtctgctggtgctgaaggacctgggcatccaggtggataggtacattgcctccgaggtgtgcgaggactccatcaccgtgggaatggtgcgtcatcagggcaagatcatgtacgtgggcgacgtgcggagcgtgacacagaagcatatccaggagtggggccctttcgacctggtgatcggcggcagcccttgcaatgacctgagcatcgtgaacccagcccggaagggcctgtacgagggaaccggcagactgttcttcgagttttacagactgctgcacgacgcccggcctaaggaaggcgacgaccggcccttcttttggctgttcgagaatgtggtggccatgggagtcagcgacaagcgggatattagccggttcctggagagcaaccccgtgatgatcgatgccaaggaagtgagcgccgcccaccgggccagatacttctggggcaatctgcctggcatgaacagacccctggccagcaccgtgaacgacaagctggagctgcaggagtgcctggagcacggccggatcgccaagttcagcaaggtgagaaccatcaccacccgaagcaacagcatcaaacaaggcaaggaccagcactttcctgtgttcatgaacgagaaggaggacatcctgtggtgtaccgagatggagagagtgttcgggttcccagtccactacacagatgtcagcaacatgtctagactggccagacagagactgctgggaagaagctggtccgtccctgtgatcagacacctgttcgcccctctgaaggagtacttcgcctgcgtgagcagcggcaacagcaacgccaacagccggggccccagcttctctagcggcctggtgccactgtccctgagagggagccacatgggccccatggagatctacaaaaccgtgagcgcctggaagcggcagcctgtgcgcgtgctgagcctgtttcggaatatcgataaagtcctgaaaagcctgggattcctggagagcggctctggctccggcggtggcaccctgaagtacgtggaggatgtgacaaacgtggtcagacgggatgtggagaagtggggccccttcgatctggtgtacggcagcacccaacccctgggcagctcttgtgaccggtgccctggctggtacatgtttcagttccaccggatcctgcagtacgccctgccgagacaggagtcccagcggccattcttttggattttcatggacaacttgctgctgaccgaggatgaccaggaaactaccactcggttcctgcagaccgaagccgtgaccctgcaggacgtgagaggccgggactaccagaacgccatgcgggtgtggtccaacatccctggactgaaaagcaagcacgcacctctgacccctaaagaagaggagtacctgcaggcccaggtgcggagcagaagcaagctggacgcccctaaggtggatctgctggtgaagaattgcctcctgcccctgagagagtacttcaagtatttcagccagaatagtctgcccctgggcggcccaagcagcggcgcccctcctcccagcggcggcagcccagccggctccccaacctctaccgaggagggcacctctgagtccgccacccccgagagcggccctggcacctccaccgagcccagcgagggcagcgcacccggcagccctgccggcagccccacctccacagaggagggaaccagcaccgagcccagcgaaggcagcgccccaggcaccagcaccgagcctagtgagggcggctctggcggcggcagcgcccaggagattaaacggatcaacaagatcagaagaagacttgtgaaagacagcaacaccaagaaggccggcaagacaggccccatgaaaaccctgctggttagagtgatgacacccgatctgagagagcggctggaaaacctgagaaagaagcctgaaaatatcccccagcccatcagcaatacatctagagccaacctgaataagctgctgaccgattacaccgaaatgaagaaggcgatcctgcatgtgtactgggaagagttccagaaggaccctgtgggcctgatgagccgggtggcccagcctgccagcaagaagatcgatcagaacaagctgaaacctgagatggacgagaagggcaacctgaccaccgccggctttgcctgctctcagtgtggccagcccctgttcgtgtacaagctggagcaggtgtctgagaagggcaaggcttacaccaactacttcggacggtgcaatgtggccgagcacgaaaagctgatcctgctggcccagctgaagcccgagaaggatagcgacgaagccgtgacatatagcctgggaaagtttgggcagagggccctggatttctacagcattcatgtgaccaaggagtccacccaccccgtgaagcccctggcccagatcgccggaaacagatacgcctccggacctgtgggaaaggccctgagcgacgcatgtatgggcacaatcgcctccttcctgtctaagtaccaggacatcatcatcgaacaccagaaggtggtgaagggcaaccagaagagactggagagcctgcgggagctggccggcaaggaaaacctggaataccctagcgtgaccctgccacctcagcctcacaccaaggagggcgttgatgcctacaacgaagtgatcgcccgggtgcgaatgtgggtgaacctgaacctgtggcagaagctgaagctaagcagagatgatgccaagcctctgctgagactgaagggattcccttcctttcctctggtcgagagacaggccaacgaagtggactggtgggacatggtgtgtaacgtgaagaagctgatcaacgagaaaaaggaggatggcaaggtgttttggcagaatctggctggctacaagagacaggaagccctgagaccatacctgagcagcgaggaagatcggaagaagggaaagaaattcgctcggtaccagctgggcgacctgctgctgcacctggaaaagaagcacggcgaggactggggaaaggtgtacgacgaggcctgggagcggattgacaagaaagtggaaggcctgagcaagcacatcaagctggaagaggaacggagaagcgaggacgcccagagcaaggccgccctgaccgactggctgcgggctaaggccagcttcgtgatcgagggcctgaaggaggccgacaaggacgagttctgcagatgcgagctgaagctgcagaagtggtacggggacctgcggggaaagcccttcgccatcgaagccgagaacagcatcctggacatcagcggcttcagcaagcagtacaactgtgccttcatctggcagaaggacggcgtgaagaagctgaacctgtacctgatcatcaactacttcaagggcggcaagctgcggttcaagaagatcaaacctgaagccttcgaagccaacagattctacaccgtgatcaacaaaaagagcggcgagatcgtgcccatggaggtgaacttcaacttcgacgaccccaacctgatcatcctgcctctggcctttggcaagagacagggcagagaattcatctggaacgacctgctgtccctggaaaccggcagcctgaagctggccaacggaagagtgatcgagaagacactgtacaacagaagaacccggcaggatgagcctgccctgttcgtggccctgaccttcgagcggcgggaggtcctggactcctccaatatcaaaccaatgaacctgatcggcgtggcaagaggcgaaaacatccccgccgtgatcgccctgaccgaccccgagggctgcccactgagccggtttaaggatagcctgggaaacccaacccacatcctgagaatcggcgagagctataaggagaagcagcggaccatccaggccaagaaggaggtggagcagcggagagccggcggctacagccggaagtacgccagcaaagccaagaatctggcagacgatatggtgagaaacaccgctagagatctgctgtactacgccgtgacccaggatgccatgctgatcttcgccaacctgagccggggcttcggccggcagggcaagcggaccttcatggccgagagacagtacacacggatggaggactggctgaccgccaagctggcctacgagggcctgagcaagacctacctgtccaagacactggcccagtacacctccaagacatgcagcaactgtgggtttaccatcaccagcgccgactacgacagggtgctggagaagctgaagaagacagcaacaggctggatgaccacaattaacggcaaggagctgaaggtggagggccagattacctactacaacagatacaagagacagaacgtagtcaaggacctgtccgtcgagctggatagactgagcgaagaatctgtgaacaacgacatctcctcctggacaaagggcagaagcggagaagctctgagcctcctgaagaaaagattctcccatagacccgtgcaggagaagttcgtgtgcctgaactgcggcttcgagacacacgcagccgagcaagccgccctgaacatcgccagatcctggctgttcctgcggagccaggagtacaagaaataccagacaaacaagacaaccggcaacaccgataagagagccttcgtcgagacctggcagtccttttaccggaagaagcttaaggaggtgtggaaacctgccgtgcggtctggcggatctggcggaggctccacaagcatgatcgagtaccagatccccgtgagcttcaaggacgtggtggtgggcttcacccaggaggagtggcaccagctgagccccgcccagagggccctgtacagggacgtgatgctggagacctacagcaacctggtgagcgtgggctacgagggcaccaagcccgacgtgatcctgaggctggagcaggaggaggccccctggatcggcgaggccgcctgccccggctgccactgctggggcaagaccagccccaagaaaaagagaaaagtctaagctgccttctgcggggcttgccttctggccatgcccttcttctctcccttgcacctgtacctcttggtctttgaataaagcctgagtaggaaggctagcaaaaaaaaaaaaaaaaaaaaaaaaaaaaaaaaaaaaaaaaaaaaaaaaaaaaaaaaaaaaaaaaaaaaaaaaaaaaaaaa

SEQ ID NO: 2673 - RNA, 5419 nt, synthetic construct
  source 1..5419: mol_type = other RNA
aggaaataagagagaaaagaagagtaagaagaaatataagagccaccatggcccctaagaagaagcgtaaagtgagccgggtgaacggcagcggcagcggcggcggcatgaaccacgaccaggagttcgacccccctaaggtgtaccctcccgtccccgccgagaagagaaagcccatccgggtcctgagcctgttcgatggcatcgccaccggtctgctggtgctgaaggacctgggcatccaggtggataggtacattgcctccgaggtgtgcgaggactccatcaccgtgggaatggtgcgtcatcagggcaagatcatgtacgtgggcgacgtgcggagcgtgacacagaagcatatccaggagtggggccctttcgacctggtgatcggcggcagcccttgcaatgacctgagcatcgtgaacccagcccggaagggcctgtacgagggaaccggcagactgttcttcgagttttacagactgctgcacgacgcccggcctaaggaaggcgacgaccggcccttcttttggctgttcgagaatgtggtggccatgggagtcagcgacaagcgggatattagccggttcctggagagcaaccccgtgatgatcgatgccaaggaagtgagcgccgcccaccgggccagatacttctggggcaatctgcctggcatgaacagacccctggccagcaccgtgaacgacaagctggagctgcaggagtgcctggagcacggccggatcgccaagttcagcaaggtgagaaccatcaccacccgaagcaacagcatcaaacaaggcaaggaccagcactttcctgtgttcatgaacgagaaggaggacatcctgtggtgtaccgagatggagagagtgttcgggttcccagtccactacacagatgtcagcaacatgtctagactggccagacagagactgctgggaagaagctggtccgtccctgtgatcagacacctgttcgcccctctgaaggagtacttcgcctgcgtgagcagcggcaacagcaacgccaacagccggggccccagcttctctagcggcctggtgccactgtccctgagagggagccacatgggccccatggagatctacaaaaccgtgagcgcctggaagcggcagcctgtgcgcgtgctgagcctgtttcggaatatcgataaagtcctgaaaagcctgggattcctggagagcggctctggctccggcggtggcaccctgaagtacgtggaggatgtgacaaacgtggtcagacgggatgtggagaagtggggccccttcgatctggtgtacggcagcacccaacccctgggcagctcttgtgaccggtgccctggctggtacatgtttcagttccaccggatcctgcagtacgccctgccgagacaggagtcccagcggccattcttttggattttcatggacaacttgctgctgaccgaggatgaccaggaaactaccactcggttcctgcagaccgaagccgtgaccctgcaggacgtgagaggccgggactaccagaacgccatgcgggtgtggtccaacatccctggactgaaaagcaagcacgcacctctgacccctaaagaagaggagtacctgcaggcccaggtgcggagcagaagcaagctggacgcccctaaggtggatctgctggtgaagaattgcctcctgcccctgagagagtacttcaagtatttcagccagaatagtctgcccctgggcggcccaagcagcggcgcccctcctcccagcggcggcagcccagccggctccccaacctctaccgaggagggcacctctgagtccgccacccccgagagcggccctggcacctccaccgagcccagcgagggcagcgcacccggcagccctgccggcagccccacctccacagaggagggaaccagcaccgagcccagcgaaggcagcgccccaggcaccagcaccgagcctagtgagggcggctctggcggcggcagcgcccaggagattaaacggatcaacaagatcagaagaagacttgtgaaagacagcaacaccaagaaggccggcaagacaggccccatgaaaaccctgctggttagagtgatgacacccgatctgagagagcggctggaaaacctgagaaagaagcctgaaaatatcccccagcccatcagcaatacatctagagccaacctgaataagctgctgaccgattacaccgaaatgaagaaggcgatcctgcatgtgtactgggaagagttccagaaggaccctgtgggcctgatgagccgggtggcccagcctgccagcaagaagatcgatcagaacaagctgaaacctgagatggacgagaagggcaacctgaccaccgccggctttgcctgctctcagtgtggccagcccctgttcgtgtacaagctggagcaggtgtctgagaagggcaaggcttacaccaactacttcggacggtgcaatgtggccgagcacgaaaagctgatcctgctggcccagctgaagcccgagaaggatagcgacgaagccgtgacatatagcctgggaaagtttgggcagagggccctggatttctacagcattcatgtgaccaaggagtccacccaccccgtgaagcccctggcccagatcgccggaaacagatacgcctccggacctgtgggaaaggccctgagcgacgcatgtatgggcacaatcgcctccttcctgtctaagtaccaggacatcatcatcgaacaccagaaggtggtgaagggcaaccagaagagactggagagcctgcgggagctggccggcaaggaaaacctggaataccctagcgtgaccctgccacctcagcctcacaccaaggagggcgttgatgcctacaacgaagtgatcgcccgggtgcgaatgtgggtgaacctgaacctgtggcagaagctgaagctaagcagagatgatgccaagcctctgctgagactgaagggattcccttcctttcctctggtcgagagacaggccaacgaagtggactggtgggacatggtgtgtaacgtgaagaagctgatcaacgagaaaaaggaggatggcaaggtgttttggcagaatctggctggctacaagagacaggaagccctgagaccatacctgagcagcgaggaagatcggaagaagggaaagaaattcgctcggtaccagctgggcgacctgctgctgcacctggaaaagaagcacggcgaggactggggaaaggtgtacgacgaggcctgggagcggattgacaagaaagtggaaggcctgagcaagcacatcaagctggaagaggaacggagaagcgaggacgcccagagcaaggccgccctgaccgactggctgcgggctaaggccagcttcgtgatcgagggcctgaaggaggccgacaaggacgagttctgcagatgcgagctgaagctgcagaagtggtacggggacctgcggggaaagcccttcgccatcgaagccgagaacagcatcctggacatcagcggcttcagcaagcagtacaactgtgccttcatctggcagaaggacggcgtgaagaagctgaacctgtacctgatcatcaactacttcaagggcggcaagctgcggttcaagaagatcaaacctgaagccttcgaagccaacagattctacaccgtgatcaacaaaaagagcggcgagatcgtgcccatggaggtgaacttcaacttcgacgaccccaacctgatcatcctgcctctggcctttggcaagagacagggcagagaattcatctggaacgacctgctgtccctggaaaccggcagcctgaagctggccaacggaagagtgatcgagaagacactgtacaacagaagaacccggcaggatgagcctgccctgttcgtggccctgaccttcgagcggcgggaggtcctggactcctccaatatcaaaccaatgaacctgatcggcgtggcaagaggcgaaaacatccccgccgtgatcgccctgaccgaccccgagggctgcccactgagccggtttaaggatagcctgggaaacccaacccacatcctgagaatcggcgagagctataaggagaagcagcggaccatccaggccaagaaggaggtggagcagcggagagccggcggctacagccggaagtacgccagcaaagccaagaatctggcagacgatatggtgagaaacaccgctagagatctgctgtactacgccgtgacccaggatgccatgctgatcttcgccaacctgagccggggcttcggccggcagggcaagcggaccttcatggccgagagacagtacacacggatggaggactggctgaccgccaagctggcctacgagggcctgagcaagacctacctgtccaagacactggcccagtacacctccaagacatgcagcaactgtgggtttaccatcaccagcgccgactacgacagggtgctggagaagctgaagaagacagcaacaggctggatgaccacaattaacggcaaggagctgaaggtggagggccagattacctactacaacagatacaagagacagaacgtagtcaaggacctgtccgtcgagctggatagactgagcgaagaatctgtgaacaacgacatctcctcctggacaaagggcagaagcggagaagctctgagcctcctgaagaaaagattctcccatagacccgtgcaggagaagttcgtgtgcctgaactgcggcttcgagacacacgcagccgagcaagccgccctgaacatcgccagatcctggctgttcctgcggagccaggagtacaagaaataccagacaaacaagacaaccggcaacaccgataagagagccttcgtcgagacctggcagtccttttaccggaagaagcttaaggaggtgtggaaacctgccgtgcggtctggcggatctggcggaggctccacaagcccccaggagagcgtgaccttcaaggacatcgccgtggacttcacccaggaggagtgggccctgctggacgccagccagaggaagctgtacagggacgtgatgctggagaacatcggccacctggtgagcgtgggctacagggtgtgcaagagcgacgtgatcagccagctgcagcagggcgtggagctgtggagggagggcaggggcttcccccagggcgtgatccccgacaggaagagcagcaccagccccaagaaaaagagaaaagtctaagctgccttctgcggggcttgccttctggccatgcccttcttctctcccttgcacctgtacctcttggtctttgaataaagcctgagtaggaaggctagcaaaaaaaaaaaaaaaaaaaaaaaaaaaaaaaaaaaaaaaaaaaaaaaaaaaaaaaaaaaaaaaaaaaaaaaaaaaaaaaa

SEQ ID NO: 2674 - RNA, 5419 nt, synthetic construct
  source 1..5419: mol_type = other RNA
aggaaataagagagaaaagaagagtaagaagaaatataagagccaccatggcccctaagaagaagcgtaaagtgagccgggtgaacggcagcggcagcggcggcggcatgaaccacgaccaggagttcgacccccctaaggtgtaccctcccgtccccgccgagaagagaaagcccatccgggtcctgagcctgttcgatggcatcgccaccggtctgctggtgctgaaggacctgggcatccaggtggataggtacattgcctccgaggtgtgcgaggactccatcaccgtgggaatggtgcgtcatcagggcaagatcatgtacgtgggcgacgtgcggagcgtgacacagaagcatatccaggagtggggccctttcgacctggtgatcggcggcagcccttgcaatgacctgagcatcgtgaacccagcccggaagggcctgtacgagggaaccggcagactgttcttcgagttttacagactgctgcacgacgcccggcctaaggaaggcgacgaccggcccttcttttggctgttcgagaatgtggtggccatgggagtcagcgacaagcgggatattagccggttcctggagagcaaccccgtgatgatcgatgccaaggaagtgagcgccgcccaccgggccagatacttctggggcaatctgcctggcatgaacagacccctggccagcaccgtgaacgacaagctggagctgcaggagtgcctggagcacggccggatcgccaagttcagcaaggtgagaaccatcaccacccgaagcaacagcatcaaacaaggcaaggaccagcactttcctgtgttcatgaacgagaaggaggacatcctgtggtgtaccgagatggagagagtgttcgggttcccagtccactacacagatgtcagcaacatgtctagactggccagacagagactgctgggaagaagctggtccgtccctgtgatcagacacctgttcgcccctctgaaggagtacttcgcctgcgtgagcagcggcaacagcaacgccaacagccggggccccagcttctctagcggcctggtgccactgtccctgagagggagccacatgggccccatggagatctacaaaaccgtgagcgcctggaagcggcagcctgtgcgcgtgctgagcctgtttcggaatatcgataaagtcctgaaaagcctgggattcctggagagcggctctggctccggcggtggcaccctgaagtacgtggaggatgtgacaaacgtggtcagacgggatgtggagaagtggggccccttcgatctggtgtacggcagcacccaacccctgggcagctcttgtgaccggtgccctggctggtacatgtttcagttccaccggatcctgcagtacgccctgccgagacaggagtcccagcggccattcttttggattttcatggacaacttgctgctgaccgaggatgaccaggaaactaccactcggttcctgcagaccgaagccgtgaccctgcaggacgtgagaggccgggactaccagaacgccatgcgggtgtggtccaacatccctggactgaaaagcaagcacgcacctctgacccctaaagaagaggagtacctgcaggcccaggtgcggagcagaagcaagctggacgcccctaaggtggatctgctggtgaagaattgcctcctgcccctgagagagtacttcaagtatttcagccagaatagtctgcccctgggcggcccaagcagcggcgcccctcctcccagcggcggcagcccagccggctccccaacctctaccgaggagggcacctctgagtccgccacccccgagagcggccctggcacctccaccgagcccagcgagggcagcgcacccggcagccctgccggcagccccacctccacagaggagggaaccagcaccgagcccagcgaaggcagcgccccaggcaccagcaccgagcctagtgagggcggctctggcggcggcagcgcccaggagattaaacggatcaacaagatcagaagaagacttgtgaaagacagcaacaccaagaaggccggcaagacaggccccatgaaaaccctgctggttagagtgatgacacccgatctgagagagcggctggaaaacctgagaaagaagcctgaaaatatcccccagcccatcagcaatacatctagagccaacctgaataagctgctgaccgattacaccgaaatgaagaaggcgatcctgcatgtgtactgggaagagttccagaaggaccctgtgggcctgatgagccgggtggcccagcctgccagcaagaagatcgatcagaacaagctgaaacctgagatggacgagaagggcaacctgaccaccgccggctttgcctgctctcagtgtggccagcccctgttcgtgtacaagctggagcaggtgtctgagaagggcaaggcttacaccaactacttcggacggtgcaatgtggccgagcacgaaaagctgatcctgctggcccagctgaagcccgagaaggatagcgacgaagccgtgacatatagcctgggaaagtttgggcagagggccctggatttctacagcattcatgtgaccaaggagtccacccaccccgtgaagcccctggcccagatcgccggaaacagatacgcctccggacctgtgggaaaggccctgagcgacgcatgtatgggcacaatcgcctccttcctgtctaagtaccaggacatcatcatcgaacaccagaaggtggtgaagggcaaccagaagagactggagagcctgcgggagctggccggcaaggaaaacctggaataccctagcgtgaccctgccacctcagcctcacaccaaggagggcgttgatgcctacaacgaagtgatcgcccgggtgcgaatgtgggtgaacctgaacctgtggcagaagctgaagctaagcagagatgatgccaagcctctgctgagactgaagggattcccttcctttcctctggtcgagagacaggccaacgaagtggactggtgggacatggtgtgtaacgtgaagaagctgatcaacgagaaaaaggaggatggcaaggtgttttggcagaatctggctggctacaagagacaggaagccctgagaccatacctgagcagcgaggaagatcggaagaagggaaagaaattcgctcggtaccagctgggcgacctgctgctgcacctggaaaagaagcacggcgaggactggggaaaggtgtacgacgaggcctgggagcggattgacaagaaagtggaaggcctgagcaagcacatcaagctggaagaggaacggagaagcgaggacgcccagagcaaggccgccctgaccgactggctgcgggctaaggccagcttcgtgatcgagggcctgaaggaggccgacaaggacgagttctgcagatgcgagctgaagctgcagaagtggtacggggacctgcggggaaagcccttcgccatcgaagccgagaacagcatcctggacatcagcggcttcagcaagcagtacaactgtgccttcatctggcagaaggacggcgtgaagaagctgaacctgtacctgatcatcaactacttcaagggcggcaagctgcggttcaagaagatcaaacctgaagccttcgaagccaacagattctacaccgtgatcaacaaaaagagcggcgagatcgtgcccatggaggtgaacttcaacttcgacgaccccaacctgatcatcctgcctctggcctttggcaagagacagggcagagaattcatctggaacgacctgctgtccctggaaaccggcagcctgaagctggccaacggaagagtgatcgagaagacactgtacaacagaagaacccggcaggatgagcctgccctgttcgtggccctgaccttcgagcggcgggaggtcctggactcctccaatatcaaaccaatgaacctgatcggcgtggcaagaggcgaaaacatccccgccgtgatcgccctgaccgaccccgagggctgcccactgagccggtttaaggatagcctgggaaacccaacccacatcctgagaatcggcgagagctataaggagaagcagcggaccatccaggccaagaaggaggtggagcagcggagagccggcggctacagccggaagtacgccagcaaagccaagaatctggcagacgatatggtgagaaacaccgctagagatctgctgtactacgccgtgacccaggatgccatgctgatcttcgccaacctgagccggggcttcggccggcagggcaagcggaccttcatggccgagagacagtacacacggatggaggactggctgaccgccaagctggcctacgagggcctgagcaagacctacctgtccaagacactggcccagtacacctccaagacatgcagcaactgtgggtttaccatcaccagcgccgactacgacagggtgctggagaagctgaagaagacagcaacaggctggatgaccacaattaacggcaaggagctgaaggtggagggccagattacctactacaacagatacaagagacagaacgtagtcaaggacctgtccgtcgagctggatagactgagcgaagaatctgtgaacaacgacatctcctcctggacaaagggcagaagcggagaagctctgagcctcctgaagaaaagattctcccatagacccgtgcaggagaagttcgtgtgcctgaactgcggcttcgagacacacgcagccgagcaagccgccctgaacatcgccagatcctggctgttcctgcggagccaggagtacaagaaataccagacaaacaagacaaccggcaacaccgataagagagccttcgtcgagacctggcagtccttttaccggaagaagcttaaggaggtgtggaaacctgccgtgcggtctggcggatctggcggaggctccacaagcatgaacgtggaggtggtgaaggtgatgccccaggacctggtgaccttcaaggacgtggccatcgacttcagccaggaggagtggcagtggatgaaccccgcccagaagaggctgtacaggagcatgatgctggagaactaccagagcctggtgagcctgggcctgtgcatcagcaagccctacgtgatcagcctgctggagcagggcagggagccctgggagatgaccagcgagatgaccaggaccagccccaagaaaaagagaaaagtctaagctgccttctgcggggcttgccttctggccatgcccttcttctctcccttgcacctgtacctcttggtctttgaataaagcctgagtaggaaggctagcaaaaaaaaaaaaaaaaaaaaaaaaaaaaaaaaaaaaaaaaaaaaaaaaaaaaaaaaaaaaaaaaaaaaaaaaaaaaaaaa

SEQ ID NO: 2675 - RNA, 5419 nt, synthetic construct
  source 1..5419: mol_type = other RNA
aggaaataagagagaaaagaagagtaagaagaaatataagagccaccatggcccctaagaagaagcgtaaagtgagccgggtgaacggcagcggcagcggcggcggcatgaaccacgaccaggagttcgacccccctaaggtgtaccctcccgtccccgccgagaagagaaagcccatccgggtcctgagcctgttcgatggcatcgccaccggtctgctggtgctgaaggacctgggcatccaggtggataggtacattgcctccgaggtgtgcgaggactccatcaccgtgggaatggtgcgtcatcagggcaagatcatgtacgtgggcgacgtgcggagcgtgacacagaagcatatccaggagtggggccctttcgacctggtgatcggcggcagcccttgcaatgacctgagcatcgtgaacccagcccggaagggcctgtacgagggaaccggcagactgttcttcgagttttacagactgctgcacgacgcccggcctaaggaaggcgacgaccggcccttcttttggctgttcgagaatgtggtggccatgggagtcagcgacaagcgggatattagccggttcctggagagcaaccccgtgatgatcgatgccaaggaagtgagcgccgcccaccgggccagatacttctggggcaatctgcctggcatgaacagacccctggccagcaccgtgaacgacaagctggagctgcaggagtgcctggagcacggccggatcgccaagttcagcaaggtgagaaccatcaccacccgaagcaacagcatcaaacaaggcaaggaccagcactttcctgtgttcatgaacgagaaggaggacatcctgtggtgtaccgagatggagagagtgttcgggttcccagtccactacacagatgtcagcaacatgtctagactggccagacagagactgctgggaagaagctggtccgtccctgtgatcagacacctgttcgcccctctgaaggagtacttcgcctgcgtgagcagcggcaacagcaacgccaacagccggggccccagcttctctagcggcctggtgccactgtccctgagagggagccacatgggccccatggagatctacaaaaccgtgagcgcctggaagcggcagcctgtgcgcgtgctgagcctgtttcggaatatcgataaagtcctgaaaagcctgggattcctggagagcggctctggctccggcggtggcaccctgaagtacgtggaggatgtgacaaacgtggtcagacgggatgtggagaagtggggccccttcgatctggtgtacggcagcacccaacccctgggcagctcttgtgaccggtgccctggctggtacatgtttcagttccaccggatcctgcagtacgccctgccgagacaggagtcccagcggccattcttttggattttcatggacaacttgctgctgaccgaggatgaccaggaaactaccactcggttcctgcagaccgaagccgtgaccctgcaggacgtgagaggccgggactaccagaacgccatgcgggtgtggtccaacatccctggactgaaaagcaagcacgcacctctgacccctaaagaagaggagtacctgcaggcccaggtgcggagcagaagcaagctggacgcccctaaggtggatctgctggtgaagaattgcctcctgcccctgagagagtacttcaagtatttcagccagaatagtctgcccctgggcggcccaagcagcggcgcccctcctcccagcggcggcagcccagccggctccccaacctctaccgaggagggcacctctgagtccgccacccccgagagcggccctggcacctccaccgagcccagcgagggcagcgcacccggcagccctgccggcagccccacctccacagaggagggaaccagcaccgagcccagcgaaggcagcgccccaggcaccagcaccgagcctagtgagggcggctctggcggcggcagcgcccaggagattaaacggatcaacaagatcagaagaagacttgtgaaagacagcaacaccaagaaggccggcaagacaggccccatgaaaaccctgctggttagagtgatgacacccgatctgagagagcggctggaaaacctgagaaagaagcctgaaaatatcccccagcccatcagcaatacatctagagccaacctgaataagctgctgaccgattacaccgaaatgaagaaggcgatcctgcatgtgtactgggaagagttccagaaggaccctgtgggcctgatgagccgggtggcccagcctgccagcaagaagatcgatcagaacaagctgaaacctgagatggacgagaagggcaacctgaccaccgccggctttgcctgctctcagtgtggccagcccctgttcgtgtacaagctggagcaggtgtctgagaagggcaaggcttacaccaactacttcggacggtgcaatgtggccgagcacgaaaagctgatcctgctggcccagctgaagcccgagaaggatagcgacgaagccgtgacatatagcctgggaaagtttgggcagagggccctggatttctacagcattcatgtgaccaaggagtccacccaccccgtgaagcccctggcccagatcgccggaaacagatacgcctccggacctgtgggaaaggccctgagcgacgcatgtatgggcacaatcgcctccttcctgtctaagtaccaggacatcatcatcgaacaccagaaggtggtgaagggcaaccagaagagactggagagcctgcgggagctggccggcaaggaaaacctggaataccctagcgtgaccctgccacctcagcctcacaccaaggagggcgttgatgcctacaacgaagtgatcgcccgggtgcgaatgtgggtgaacctgaacctgtggcagaagctgaagctaagcagagatgatgccaagcctctgctgagactgaagggattcccttcctttcctctggtcgagagacaggccaacgaagtggactggtgggacatggtgtgtaacgtgaagaagctgatcaacgagaaaaaggaggatggcaaggtgttttggcagaatctggctggctacaagagacaggaagccctgagaccatacctgagcagcgaggaagatcggaagaagggaaagaaattcgctcggtaccagctgggcgacctgctgctgcacctggaaaagaagcacggcgaggactggggaaaggtgtacgacgaggcctgggagcggattgacaagaaagtggaaggcctgagcaagcacatcaagctggaagaggaacggagaagcgaggacgcccagagcaaggccgccctgaccgactggctgcgggctaaggccagcttcgtgatcgagggcctgaaggaggccgacaaggacgagttctgcagatgcgagctgaagctgcagaagtggtacggggacctgcggggaaagcccttcgccatcgaagccgagaacagcatcctggacatcagcggcttcagcaagcagtacaactgtgccttcatctggcagaaggacggcgtgaagaagctgaacctgtacctgatcatcaactacttcaagggcggcaagctgcggttcaagaagatcaaacctgaagccttcgaagccaacagattctacaccgtgatcaacaaaaagagcggcgagatcgtgcccatggaggtgaacttcaacttcgacgaccccaacctgatcatcctgcctctggcctttggcaagagacagggcagagaattcatctggaacgacctgctgtccctggaaaccggcagcctgaagctggccaacggaagagtgatcgagaagacactgtacaacagaagaacccggcaggatgagcctgccctgttcgtggccctgaccttcgagcggcgggaggtcctggactcctccaatatcaaaccaatgaacctgatcggcgtggcaagaggcgaaaacatccccgccgtgatcgccctgaccgaccccgagggctgcccactgagccggtttaaggatagcctgggaaacccaacccacatcctgagaatcggcgagagctataaggagaagcagcggaccatccaggccaagaaggaggtggagcagcggagagccggcggctacagccggaagtacgccagcaaagccaagaatctggcagacgatatggtgagaaacaccgctagagatctgctgtactacgccgtgacccaggatgccatgctgatcttcgccaacctgagccggggcttcggccggcagggcaagcggaccttcatggccgagagacagtacacacggatggaggactggctgaccgccaagctggcctacgagggcctgagcaagacctacctgtccaagacactggcccagtacacctccaagacatgcagcaactgtgggtttaccatcaccagcgccgactacgacagggtgctggagaagctgaagaagacagcaacaggctggatgaccacaattaacggcaaggagctgaaggtggagggccagattacctactacaacagatacaagagacagaacgtagtcaaggacctgtccgtcgagctggatagactgagcgaagaatctgtgaacaacgacatctcctcctggacaaagggcagaagcggagaagctctgagcctcctgaagaaaagattctcccatagacccgtgcaggagaagttcgtgtgcctgaactgcggcttcgagacacacgcagccgagcaagccgccctgaacatcgccagatcctggctgttcctgcggagccaggagtacaagaaataccagacaaacaagacaaccggcaacaccgataagagagccttcgtcgagacctggcagtccttttaccggaagaagcttaaggaggtgtggaaacctgccgtgcggtctggcggatctggcggaggctccacaagcgcccacatggccttcagggacgtggccgtggacttcacccaggaggagtggatgctgctgagccccgcccagaggagcctgtacagggaggtgatgctggagaactacagcaacatggtgagcctgggcatccccttcagcaagcccaagctgatcacccagctggagcagggcaaggagacctggagggaggagaggaagtgcccccccgccacctgcagcgccgagccccagcccgagctgaccagccccaagaaaaagagaaaagtctaagctgccttctgcggggcttgccttctggccatgcccttcttctctcccttgcacctgtacctcttggtctttgaataaagcctgagtaggaaggctagcaaaaaaaaaaaaaaaaaaaaaaaaaaaaaaaaaaaaaaaaaaaaaaaaaaaaaaaaaaaaaaaaaaaaaaaaaaaaaaaa

SEQ ID NO: 2676 - RNA, 5419 nt, synthetic construct
  source 1..5419: mol_type = other RNA
aggaaataagagagaaaagaagagtaagaagaaatataagagccaccatggcccctaagaagaagcgtaaagtgagccgggtgaacggcagcggcagcggcggcggcatgaaccacgaccaggagttcgacccccctaaggtgtaccctcccgtccccgccgagaagagaaagcccatccgggtcctgagcctgttcgatggcatcgccaccggtctgctggtgctgaaggacctgggcatccaggtggataggtacattgcctccgaggtgtgcgaggactccatcaccgtgggaatggtgcgtcatcagggcaagatcatgtacgtgggcgacgtgcggagcgtgacacagaagcatatccaggagtggggccctttcgacctggtgatcggcggcagcccttgcaatgacctgagcatcgtgaacccagcccggaagggcctgtacgagggaaccggcagactgttcttcgagttttacagactgctgcacgacgcccggcctaaggaaggcgacgaccggcccttcttttggctgttcgagaatgtggtggccatgggagtcagcgacaagcgggatattagccggttcctggagagcaaccccgtgatgatcgatgccaaggaagtgagcgccgcccaccgggccagatacttctggggcaatctgcctggcatgaacagacccctggccagcaccgtgaacgacaagctggagctgcaggagtgcctggagcacggccggatcgccaagttcagcaaggtgagaaccatcaccacccgaagcaacagcatcaaacaaggcaaggaccagcactttcctgtgttcatgaacgagaaggaggacatcctgtggtgtaccgagatggagagagtgttcgggttcccagtccactacacagatgtcagcaacatgtctagactggccagacagagactgctgggaagaagctggtccgtccctgtgatcagacacctgttcgcccctctgaaggagtacttcgcctgcgtgagcagcggcaacagcaacgccaacagccggggccccagcttctctagcggcctggtgccactgtccctgagagggagccacatgggccccatggagatctacaaaaccgtgagcgcctggaagcggcagcctgtgcgcgtgctgagcctgtttcggaatatcgataaagtcctgaaaagcctgggattcctggagagcggctctggctccggcggtggcaccctgaagtacgtggaggatgtgacaaacgtggtcagacgggatgtggagaagtggggccccttcgatctggtgtacggcagcacccaacccctgggcagctcttgtgaccggtgccctggctggtacatgtttcagttccaccggatcctgcagtacgccctgccgagacaggagtcccagcggccattcttttggattttcatggacaacttgctgctgaccgaggatgaccaggaaactaccactcggttcctgcagaccgaagccgtgaccctgcaggacgtgagaggccgggactaccagaacgccatgcgggtgtggtccaacatccctggactgaaaagcaagcacgcacctctgacccctaaagaagaggagtacctgcaggcccaggtgcggagcagaagcaagctggacgcccctaaggtggatctgctggtgaagaattgcctcctgcccctgagagagtacttcaagtatttcagccagaatagtctgcccctgggcggcccaagcagcggcgcccctcctcccagcggcggcagcccagccggctccccaacctctaccgaggagggcacctctgagtccgccacccccgagagcggccctggcacctccaccgagcccagcgagggcagcgcacccggcagccctgccggcagccccacctccacagaggagggaaccagcaccgagcccagcgaaggcagcgccccaggcaccagcaccgagcctagtgagggcggctctggcggcggcagcgcccaggagattaaacggatcaacaagatcagaagaagacttgtgaaagacagcaacaccaagaaggccggcaagacaggccccatgaaaaccctgctggttagagtgatgacacccgatctgagagagcggctggaaaacctgagaaagaagcctgaaaatatcccccagcccatcagcaatacatctagagccaacctgaataagctgctgaccgattacaccgaaatgaagaaggcgatcctgcatgtgtactgggaagagttccagaaggaccctgtgggcctgatgagccgggtggcccagcctgccagcaagaagatcgatcagaacaagctgaaacctgagatggacgagaagggcaacctgaccaccgccggctttgcctgctctcagtgtggccagcccctgttcgtgtacaagctggagcaggtgtctgagaagggcaaggcttacaccaactacttcggacggtgcaatgtggccgagcacgaaaagctgatcctgctggcccagctgaagcccgagaaggatagcgacgaagccgtgacatatagcctgggaaagtttgggcagagggccctggatttctacagcattcatgtgaccaaggagtccacccaccccgtgaagcccctggcccagatcgccggaaacagatacgcctccggacctgtgggaaaggccctgagcgacgcatgtatgggcacaatcgcctccttcctgtctaagtaccaggacatcatcatcgaacaccagaaggtggtgaagggcaaccagaagagactggagagcctgcgggagctggccggcaaggaaaacctggaataccctagcgtgaccctgccacctcagcctcacaccaaggagggcgttgatgcctacaacgaagtgatcgcccgggtgcgaatgtgggtgaacctgaacctgtggcagaagctgaagctaagcagagatgatgccaagcctctgctgagactgaagggattcccttcctttcctctggtcgagagacaggccaacgaagtggactggtgggacatggtgtgtaacgtgaagaagctgatcaacgagaaaaaggaggatggcaaggtgttttggcagaatctggctggctacaagagacaggaagccctgagaccatacctgagcagcgaggaagatcggaagaagggaaagaaattcgctcggtaccagctgggcgacctgctgctgcacctggaaaagaagcacggcgaggactggggaaaggtgtacgacgaggcctgggagcggattgacaagaaagtggaaggcctgagcaagcacatcaagctggaagaggaacggagaagcgaggacgcccagagcaaggccgccctgaccgactggctgcgggctaaggccagcttcgtgatcgagggcctgaaggaggccgacaaggacgagttctgcagatgcgagctgaagctgcagaagtggtacggggacctgcggggaaagcccttcgccatcgaagccgagaacagcatcctggacatcagcggcttcagcaagcagtacaactgtgccttcatctggcagaaggacggcgtgaagaagctgaacctgtacctgatcatcaactacttcaagggcggcaagctgcggttcaagaagatcaaacctgaagccttcgaagccaacagattctacaccgtgatcaacaaaaagagcggcgagatcgtgcccatggaggtgaacttcaacttcgacgaccccaacctgatcatcctgcctctggcctttggcaagagacagggcagagaattcatctggaacgacctgctgtccctggaaaccggcagcctgaagctggccaacggaagagtgatcgagaagacactgtacaacagaagaacccggcaggatgagcctgccctgttcgtggccctgaccttcgagcggcgggaggtcctggactcctccaatatcaaaccaatgaacctgatcggcgtggcaagaggcgaaaacatccccgccgtgatcgccctgaccgaccccgagggctgcccactgagccggtttaaggatagcctgggaaacccaacccacatcctgagaatcggcgagagctataaggagaagcagcggaccatccaggccaagaaggaggtggagcagcggagagccggcggctacagccggaagtacgccagcaaagccaagaatctggcagacgatatggtgagaaacaccgctagagatctgctgtactacgccgtgacccaggatgccatgctgatcttcgccaacctgagccggggcttcggccggcagggcaagcggaccttcatggccgagagacagtacacacggatggaggactggctgaccgccaagctggcctacgagggcctgagcaagacctacctgtccaagacactggcccagtacacctccaagacatgcagcaactgtgggtttaccatcaccagcgccgactacgacagggtgctggagaagctgaagaagacagcaacaggctggatgaccacaattaacggcaaggagctgaaggtggagggccagattacctactacaacagatacaagagacagaacgtagtcaaggacctgtccgtcgagctggatagactgagcgaagaatctgtgaacaacgacatctcctcctggacaaagggcagaagcggagaagctctgagcctcctgaagaaaagattctcccatagacccgtgcaggagaagttcgtgtgcctgaactgcggcttcgagacacacgcagccgagcaagccgccctgaacatcgccagatcctggctgttcctgcggagccaggagtacaagaaataccagacaaacaagacaaccggcaacaccgataagagagccttcgtcgagacctggcagtccttttaccggaagaagcttaaggaggtgtggaaacctgccgtgcggtctggcggatctggcggaggctccacaagcttccagggcagcgtgaccttcagggacgtggccatcgacttcagccaggaggagtgggcctggctgcagcccgcccagagggacctgtacaggcacgtgatgctggagaactacggccacctggtgagcctgggcctgaacatcagcaagcccgacgtggtgagcctgctggagcagggcaaggagccctggctgggcaagggcgacgtgaggaccgacttcttccccgtgagcgagagcaacaccagccccaagaaaaagagaaaagtctaagctgccttctgcggggcttgccttctggccatgcccttcttctctcccttgcacctgtacctcttggtctttgaataaagcctgagtaggaaggctagcaaaaaaaaaaaaaaaaaaaaaaaaaaaaaaaaaaaaaaaaaaaaaaaaaaaaaaaaaaaaaaaaaaaaaaaaaaaaaaaa

SEQ ID NO: 2677 - RNA, 5419 nt, synthetic construct
  source 1..5419: mol_type = other RNA
aggaaataagagagaaaagaagagtaagaagaaatataagagccaccatggcccctaagaagaagcgtaaagtgagccgggtgaacggcagcggcagcggcggcggcatgaaccacgaccaggagttcgacccccctaaggtgtaccctcccgtccccgccgagaagagaaagcccatccgggtcctgagcctgttcgatggcatcgccaccggtctgctggtgctgaaggacctgggcatccaggtggataggtacattgcctccgaggtgtgcgaggactccatcaccgtgggaatggtgcgtcatcagggcaagatcatgtacgtgggcgacgtgcggagcgtgacacagaagcatatccaggagtggggccctttcgacctggtgatcggcggcagcccttgcaatgacctgagcatcgtgaacccagcccggaagggcctgtacgagggaaccggcagactgttcttcgagttttacagactgctgcacgacgcccggcctaaggaaggcgacgaccggcccttcttttggctgttcgagaatgtggtggccatgggagtcagcgacaagcgggatattagccggttcctggagagcaaccccgtgatgatcgatgccaaggaagtgagcgccgcccaccgggccagatacttctggggcaatctgcctggcatgaacagacccctggccagcaccgtgaacgacaagctggagctgcaggagtgcctggagcacggccggatcgccaagttcagcaaggtgagaaccatcaccacccgaagcaacagcatcaaacaaggcaaggaccagcactttcctgtgttcatgaacgagaaggaggacatcctgtggtgtaccgagatggagagagtgttcgggttcccagtccactacacagatgtcagcaacatgtctagactggccagacagagactgctgggaagaagctggtccgtccctgtgatcagacacctgttcgcccctctgaaggagtacttcgcctgcgtgagcagcggcaacagcaacgccaacagccggggccccagcttctctagcggcctggtgccactgtccctgagagggagccacatgggccccatggagatctacaaaaccgtgagcgcctggaagcggcagcctgtgcgcgtgctgagcctgtttcggaatatcgataaagtcctgaaaagcctgggattcctggagagcggctctggctccggcggtggcaccctgaagtacgtggaggatgtgacaaacgtggtcagacgggatgtggagaagtggggccccttcgatctggtgtacggcagcacccaacccctgggcagctcttgtgaccggtgccctggctggtacatgtttcagttccaccggatcctgcagtacgccctgccgagacaggagtcccagcggccattcttttggattttcatggacaacttgctgctgaccgaggatgaccaggaaactaccactcggttcctgcagaccgaagccgtgaccctgcaggacgtgagaggccgggactaccagaacgccatgcgggtgtggtccaacatccctggactgaaaagcaagcacgcacctctgacccctaaagaagaggagtacctgcaggcccaggtgcggagcagaagcaagctggacgcccctaaggtggatctgctggtgaagaattgcctcctgcccctgagagagtacttcaagtatttcagccagaatagtctgcccctgggcggcccaagcagcggcgcccctcctcccagcggcggcagcccagccggctccccaacctctaccgaggagggcacctctgagtccgccacccccgagagcggccctggcacctccaccgagcccagcgagggcagcgcacccggcagccctgccggcagccccacctccacagaggagggaaccagcaccgagcccagcgaaggcagcgccccaggcaccagcaccgagcctagtgagggcggctctggcggcggcagcgcccaggagattaaacggatcaacaagatcagaagaagacttgtgaaagacagcaacaccaagaaggccggcaagacaggccccatgaaaaccctgctggttagagtgatgacacccgatctgagagagcggctggaaaacctgagaaagaagcctgaaaatatcccccagcccatcagcaatacatctagagccaacctgaataagctgctgaccgattacaccgaaatgaagaaggcgatcctgcatgtgtactgggaagagttccagaaggaccctgtgggcctgatgagccgggtggcccagcctgccagcaagaagatcgatcagaacaagctgaaacctgagatggacgagaagggcaacctgaccaccgccggctttgcctgctctcagtgtggccagcccctgttcgtgtacaagctggagcaggtgtctgagaagggcaaggcttacaccaactacttcggacggtgcaatgtggccgagcacgaaaagctgatcctgctggcccagctgaagcccgagaaggatagcgacgaagccgtgacatatagcctgggaaagtttgggcagagggccctggatttctacagcattcatgtgaccaaggagtccacccaccccgtgaagcccctggcccagatcgccggaaacagatacgcctccggacctgtgggaaaggccctgagcgacgcatgtatgggcacaatcgcctccttcctgtctaagtaccaggacatcatcatcgaacaccagaaggtggtgaagggcaaccagaagagactggagagcctgcgggagctggccggcaaggaaaacctggaataccctagcgtgaccctgccacctcagcctcacaccaaggagggcgttgatgcctacaacgaagtgatcgcccgggtgcgaatgtgggtgaacctgaacctgtggcagaagctgaagctaagcagagatgatgccaagcctctgctgagactgaagggattcccttcctttcctctggtcgagagacaggccaacgaagtggactggtgggacatggtgtgtaacgtgaagaagctgatcaacgagaaaaaggaggatggcaaggtgttttggcagaatctggctggctacaagagacaggaagccctgagaccatacctgagcagcgaggaagatcggaagaagggaaagaaattcgctcggtaccagctgggcgacctgctgctgcacctggaaaagaagcacggcgaggactggggaaaggtgtacgacgaggcctgggagcggattgacaagaaagtggaaggcctgagcaagcacatcaagctggaagaggaacggagaagcgaggacgcccagagcaaggccgccctgaccgactggctgcgggctaaggccagcttcgtgatcgagggcctgaaggaggccgacaaggacgagttctgcagatgcgagctgaagctgcagaagtggtacggggacctgcggggaaagcccttcgccatcgaagccgagaacagcatcctggacatcagcggcttcagcaagcagtacaactgtgccttcatctggcagaaggacggcgtgaagaagctgaacctgtacctgatcatcaactacttcaagggcggcaagctgcggttcaagaagatcaaacctgaagccttcgaagccaacagattctacaccgtgatcaacaaaaagagcggcgagatcgtgcccatggaggtgaacttcaacttcgacgaccccaacctgatcatcctgcctctggcctttggcaagagacagggcagagaattcatctggaacgacctgctgtccctggaaaccggcagcctgaagctggccaacggaagagtgatcgagaagacactgtacaacagaagaacccggcaggatgagcctgccctgttcgtggccctgaccttcgagcggcgggaggtcctggactcctccaatatcaaaccaatgaacctgatcggcgtggcaagaggcgaaaacatccccgccgtgatcgccctgaccgaccccgagggctgcccactgagccggtttaaggatagcctgggaaacccaacccacatcctgagaatcggcgagagctataaggagaagcagcggaccatccaggccaagaaggaggtggagcagcggagagccggcggctacagccggaagtacgccagcaaagccaagaatctggcagacgatatggtgagaaacaccgctagagatctgctgtactacgccgtgacccaggatgccatgctgatcttcgccaacctgagccggggcttcggccggcagggcaagcggaccttcatggccgagagacagtacacacggatggaggactggctgaccgccaagctggcctacgagggcctgagcaagacctacctgtccaagacactggcccagtacacctccaagacatgcagcaactgtgggtttaccatcaccagcgccgactacgacagggtgctggagaagctgaagaagacagcaacaggctggatgaccacaattaacggcaaggagctgaaggtggagggccagattacctactacaacagatacaagagacagaacgtagtcaaggacctgtccgtcgagctggatagactgagcgaagaatctgtgaacaacgacatctcctcctggacaaagggcagaagcggagaagctctgagcctcctgaagaaaagattctcccatagacccgtgcaggagaagttcgtgtgcctgaactgcggcttcgagacacacgcagccgagcaagccgccctgaacatcgccagatcctggctgttcctgcggagccaggagtacaagaaataccagacaaacaagacaaccggcaacaccgataagagagccttcgtcgagacctggcagtccttttaccggaagaagcttaaggaggtgtggaaacctgccgtgcggtctggcggatctggcggaggctccacaagcgagcaggagagcgtgagcttcaaggacgtgaccatcgacttcagcagggaggagtggcagcagctggacttcgcccagaagagcctgtacagggacgtgatgctggagaactacttcaacctgatcagcgtgggctgccaggtgcccaagcccgaggtgatcttcaacctggagcaggtggagaacagctgcatgctgcacaggaagatcagcaggcagagctgcctggacggcgacatcggcaccagccccaagaaaaagagaaaagtctaagctgccttctgcggggcttgccttctggccatgcccttcttctctcccttgcacctgtacctcttggtctttgaataaagcctgagtaggaaggctagcaaaaaaaaaaaaaaaaaaaaaaaaaaaaaaaaaaaaaaaaaaaaaaaaaaaaaaaaaaaaaaaaaaaaaaaaaaaaaaaa

SEQ ID NO: 2678 - RNA, 5419 nt, synthetic construct
  source 1..5419: mol_type = other RNA
aggaaataagagagaaaagaagagtaagaagaaatataagagccaccatggcccctaagaagaagcgtaaagtgagccgggtgaacggcagcggcagcggcggcggcatgaaccacgaccaggagttcgacccccctaaggtgtaccctcccgtccccgccgagaagagaaagcccatccgggtcctgagcctgttcgatggcatcgccaccggtctgctggtgctgaaggacctgggcatccaggtggataggtacattgcctccgaggtgtgcgaggactccatcaccgtgggaatggtgcgtcatcagggcaagatcatgtacgtgggcgacgtgcggagcgtgacacagaagcatatccaggagtggggccctttcgacctggtgatcggcggcagcccttgcaatgacctgagcatcgtgaacccagcccggaagggcctgtacgagggaaccggcagactgttcttcgagttttacagactgctgcacgacgcccggcctaaggaaggcgacgaccggcccttcttttggctgttcgagaatgtggtggccatgggagtcagcgacaagcgggatattagccggttcctggagagcaaccccgtgatgatcgatgccaaggaagtgagcgccgcccaccgggccagatacttctggggcaatctgcctggcatgaacagacccctggccagcaccgtgaacgacaagctggagctgcaggagtgcctggagcacggccggatcgccaagttcagcaaggtgagaaccatcaccacccgaagcaacagcatcaaacaaggcaaggaccagcactttcctgtgttcatgaacgagaaggaggacatcctgtggtgtaccgagatggagagagtgttcgggttcccagtccactacacagatgtcagcaacatgtctagactggccagacagagactgctgggaagaagctggtccgtccctgtgatcagacacctgttcgcccctctgaaggagtacttcgcctgcgtgagcagcggcaacagcaacgccaacagccggggccccagcttctctagcggcctggtgccactgtccctgagagggagccacatgggccccatggagatctacaaaaccgtgagcgcctggaagcggcagcctgtgcgcgtgctgagcctgtttcggaatatcgataaagtcctgaaaagcctgggattcctggagagcggctctggctccggcggtggcaccctgaagtacgtggaggatgtgacaaacgtggtcagacgggatgtggagaagtggggccccttcgatctggtgtacggcagcacccaacccctgggcagctcttgtgaccggtgccctggctggtacatgtttcagttccaccggatcctgcagtacgccctgccgagacaggagtcccagcggccattcttttggattttcatggacaacttgctgctgaccgaggatgaccaggaaactaccactcggttcctgcagaccgaagccgtgaccctgcaggacgtgagaggccgggactaccagaacgccatgcgggtgtggtccaacatccctggactgaaaagcaagcacgcacctctgacccctaaagaagaggagtacctgcaggcccaggtgcggagcagaagcaagctggacgcccctaaggtggatctgctggtgaagaattgcctcctgcccctgagagagtacttcaagtatttcagccagaatagtctgcccctgggcggcccaagcagcggcgcccctcctcccagcggcggcagcccagccggctccccaacctctaccgaggagggcacctctgagtccgccacccccgagagcggccctggcacctccaccgagcccagcgagggcagcgcacccggcagccctgccggcagccccacctccacagaggagggaaccagcaccgagcccagcgaaggcagcgccccaggcaccagcaccgagcctagtgagggcggctctggcggcggcagcgcccaggagattaaacggatcaacaagatcagaagaagacttgtgaaagacagcaacaccaagaaggccggcaagacaggccccatgaaaaccctgctggttagagtgatgacacccgatctgagagagcggctggaaaacctgagaaagaagcctgaaaatatcccccagcccatcagcaatacatctagagccaacctgaataagctgctgaccgattacaccgaaatgaagaaggcgatcctgcatgtgtactgggaagagttccagaaggaccctgtgggcctgatgagccgggtggcccagcctgccagcaagaagatcgatcagaacaagctgaaacctgagatggacgagaagggcaacctgaccaccgccggctttgcctgctctcagtgtggccagcccctgttcgtgtacaagctggagcaggtgtctgagaagggcaaggcttacaccaactacttcggacggtgcaatgtggccgagcacgaaaagctgatcctgctggcccagctgaagcccgagaaggatagcgacgaagccgtgacatatagcctgggaaagtttgggcagagggccctggatttctacagcattcatgtgaccaaggagtccacccaccccgtgaagcccctggcccagatcgccggaaacagatacgcctccggacctgtgggaaaggccctgagcgacgcatgtatgggcacaatcgcctccttcctgtctaagtaccaggacatcatcatcgaacaccagaaggtggtgaagggcaaccagaagagactggagagcctgcgggagctggccggcaaggaaaacctggaataccctagcgtgaccctgccacctcagcctcacaccaaggagggcgttgatgcctacaacgaagtgatcgcccgggtgcgaatgtgggtgaacctgaacctgtggcagaagctgaagctaagcagagatgatgccaagcctctgctgagactgaagggattcccttcctttcctctggtcgagagacaggccaacgaagtggactggtgggacatggtgtgtaacgtgaagaagctgatcaacgagaaaaaggaggatggcaaggtgttttggcagaatctggctggctacaagagacaggaagccctgagaccatacctgagcagcgaggaagatcggaagaagggaaagaaattcgctcggtaccagctgggcgacctgctgctgcacctggaaaagaagcacggcgaggactggggaaaggtgtacgacgaggcctgggagcggattgacaagaaagtggaaggcctgagcaagcacatcaagctggaagaggaacggagaagcgaggacgcccagagcaaggccgccctgaccgactggctgcgggctaaggccagcttcgtgatcgagggcctgaaggaggccgacaaggacgagttctgcagatgcgagctgaagctgcagaagtggtacggggacctgcggggaaagcccttcgccatcgaagccgagaacagcatcctggacatcagcggcttcagcaagcagtacaactgtgccttcatctggcagaaggacggcgtgaagaagctgaacctgtacctgatcatcaactacttcaagggcggcaagctgcggttcaagaagatcaaacctgaagccttcgaagccaacagattctacaccgtgatcaacaaaaagagcggcgagatcgtgcccatggaggtgaacttcaacttcgacgaccccaacctgatcatcctgcctctggcctttggcaagagacagggcagagaattcatctggaacgacctgctgtccctggaaaccggcagcctgaagctggccaacggaagagtgatcgagaagacactgtacaacagaagaacccggcaggatgagcctgccctgttcgtggccctgaccttcgagcggcgggaggtcctggactcctccaatatcaaaccaatgaacctgatcggcgtggcaagaggcgaaaacatccccgccgtgatcgccctgaccgaccccgagggctgcccactgagccggtttaaggatagcctgggaaacccaacccacatcctgagaatcggcgagagctataaggagaagcagcggaccatccaggccaagaaggaggtggagcagcggagagccggcggctacagccggaagtacgccagcaaagccaagaatctggcagacgatatggtgagaaacaccgctagagatctgctgtactacgccgtgacccaggatgccatgctgatcttcgccaacctgagccggggcttcggccggcagggcaagcggaccttcatggccgagagacagtacacacggatggaggactggctgaccgccaagctggcctacgagggcctgagcaagacctacctgtccaagacactggcccagtacacctccaagacatgcagcaactgtgggtttaccatcaccagcgccgactacgacagggtgctggagaagctgaagaagacagcaacaggctggatgaccacaattaacggcaaggagctgaaggtggagggccagattacctactacaacagatacaagagacagaacgtagtcaaggacctgtccgtcgagctggatagactgagcgaagaatctgtgaacaacgacatctcctcctggacaaagggcagaagcggagaagctctgagcctcctgaagaaaagattctcccatagacccgtgcaggagaagttcgtgtgcctgaactgcggcttcgagacacacgcagccgagcaagccgccctgaacatcgccagatcctggctgttcctgcggagccaggagtacaagaaataccagacaaacaagacaaccggcaacaccgataagagagccttcgtcgagacctggcagtccttttaccggaagaagcttaaggaggtgtggaaacctgccgtgcggtctggcggatctggcggaggctccacaagcatggccgccggccagcccgaggccaggccccaggtgagcctgaccttcgaggacgtggccgtgctgttcaccagggacgagtggaggaagctggcccccagccagaggaacctgtacagggacgtgatgctggagaactacaggaacctggtgagcctgggcctgcccttcaccaagcccaaggtgatcagcctgctgcagcagggcgaggacccctggaaggtggagaaggactgcttcggcaccagccccaagaaaaagagaaaagtctaagctgccttctgcggggcttgccttctggccatgcccttcttctctcccttgcacctgtacctcttggtctttgaataaagcctgagtaggaaggctagcaaaaaaaaaaaaaaaaaaaaaaaaaaaaaaaaaaaaaaaaaaaaaaaaaaaaaaaaaaaaaaaaaaaaaaaaaaaaaaaa

SEQ ID NO: 2679 - RNA, 5419 nt, synthetic construct
  source 1..5419: mol_type = other RNA
aggaaataagagagaaaagaagagtaagaagaaatataagagccaccatggcccctaagaagaagcgtaaagtgagccgggtgaacggcagcggcagcggcggcggcatgaaccacgaccaggagttcgacccccctaaggtgtaccctcccgtccccgccgagaagagaaagcccatccgggtcctgagcctgttcgatggcatcgccaccggtctgctggtgctgaaggacctgggcatccaggtggataggtacattgcctccgaggtgtgcgaggactccatcaccgtgggaatggtgcgtcatcagggcaagatcatgtacgtgggcgacgtgcggagcgtgacacagaagcatatccaggagtggggccctttcgacctggtgatcggcggcagcccttgcaatgacctgagcatcgtgaacccagcccggaagggcctgtacgagggaaccggcagactgttcttcgagttttacagactgctgcacgacgcccggcctaaggaaggcgacgaccggcccttcttttggctgttcgagaatgtggtggccatgggagtcagcgacaagcgggatattagccggttcctggagagcaaccccgtgatgatcgatgccaaggaagtgagcgccgcccaccgggccagatacttctggggcaatctgcctggcatgaacagacccctggccagcaccgtgaacgacaagctggagctgcaggagtgcctggagcacggccggatcgccaagttcagcaaggtgagaaccatcaccacccgaagcaacagcatcaaacaaggcaaggaccagcactttcctgtgttcatgaacgagaaggaggacatcctgtggtgtaccgagatggagagagtgttcgggttcccagtccactacacagatgtcagcaacatgtctagactggccagacagagactgctgggaagaagctggtccgtccctgtgatcagacacctgttcgcccctctgaaggagtacttcgcctgcgtgagcagcggcaacagcaacgccaacagccggggccccagcttctctagcggcctggtgccactgtccctgagagggagccacatgggccccatggagatctacaaaaccgtgagcgcctggaagcggcagcctgtgcgcgtgctgagcctgtttcggaatatcgataaagtcctgaaaagcctgggattcctggagagcggctctggctccggcggtggcaccctgaagtacgtggaggatgtgacaaacgtggtcagacgggatgtggagaagtggggccccttcgatctggtgtacggcagcacccaacccctgggcagctcttgtgaccggtgccctggctggtacatgtttcagttccaccggatcctgcagtacgccctgccgagacaggagtcccagcggccattcttttggattttcatggacaacttgctgctgaccgaggatgaccaggaaactaccactcggttcctgcagaccgaagccgtgaccctgcaggacgtgagaggccgggactaccagaacgccatgcgggtgtggtccaacatccctggactgaaaagcaagcacgcacctctgacccctaaagaagaggagtacctgcaggcccaggtgcggagcagaagcaagctggacgcccctaaggtggatctgctggtgaagaattgcctcctgcccctgagagagtacttcaagtatttcagccagaatagtctgcccctgggcggcccaagcagcggcgcccctcctcccagcggcggcagcccagccggctccccaacctctaccgaggagggcacctctgagtccgccacccccgagagcggccctggcacctccaccgagcccagcgagggcagcgcacccggcagccctgccggcagccccacctccacagaggagggaaccagcaccgagcccagcgaaggcagcgccccaggcaccagcaccgagcctagtgagggcggctctggcggcggcagcgcccaggagattaaacggatcaacaagatcagaagaagacttgtgaaagacagcaacaccaagaaggccggcaagacaggccccatgaaaaccctgctggttagagtgatgacacccgatctgagagagcggctggaaaacctgagaaagaagcctgaaaatatcccccagcccatcagcaatacatctagagccaacctgaataagctgctgaccgattacaccgaaatgaagaaggcgatcctgcatgtgtactgggaagagttccagaaggaccctgtgggcctgatgagccgggtggcccagcctgccagcaagaagatcgatcagaacaagctgaaacctgagatggacgagaagggcaacctgaccaccgccggctttgcctgctctcagtgtggccagcccctgttcgtgtacaagctggagcaggtgtctgagaagggcaaggcttacaccaactacttcggacggtgcaatgtggccgagcacgaaaagctgatcctgctggcccagctgaagcccgagaaggatagcgacgaagccgtgacatatagcctgggaaagtttgggcagagggccctggatttctacagcattcatgtgaccaaggagtccacccaccccgtgaagcccctggcccagatcgccggaaacagatacgcctccggacctgtgggaaaggccctgagcgacgcatgtatgggcacaatcgcctccttcctgtctaagtaccaggacatcatcatcgaacaccagaaggtggtgaagggcaaccagaagagactggagagcctgcgggagctggccggcaaggaaaacctggaataccctagcgtgaccctgccacctcagcctcacaccaaggagggcgttgatgcctacaacgaagtgatcgcccgggtgcgaatgtgggtgaacctgaacctgtggcagaagctgaagctaagcagagatgatgccaagcctctgctgagactgaagggattcccttcctttcctctggtcgagagacaggccaacgaagtggactggtgggacatggtgtgtaacgtgaagaagctgatcaacgagaaaaaggaggatggcaaggtgttttggcagaatctggctggctacaagagacaggaagccctgagaccatacctgagcagcgaggaagatcggaagaagggaaagaaattcgctcggtaccagctgggcgacctgctgctgcacctggaaaagaagcacggcgaggactggggaaaggtgtacgacgaggcctgggagcggattgacaagaaagtggaaggcctgagcaagcacatcaagctggaagaggaacggagaagcgaggacgcccagagcaaggccgccctgaccgactggctgcgggctaaggccagcttcgtgatcgagggcctgaaggaggccgacaaggacgagttctgcagatgcgagctgaagctgcagaagtggtacggggacctgcggggaaagcccttcgccatcgaagccgagaacagcatcctggacatcagcggcttcagcaagcagtacaactgtgccttcatctggcagaaggacggcgtgaagaagctgaacctgtacctgatcatcaactacttcaagggcggcaagctgcggttcaagaagatcaaacctgaagccttcgaagccaacagattctacaccgtgatcaacaaaaagagcggcgagatcgtgcccatggaggtgaacttcaacttcgacgaccccaacctgatcatcctgcctctggcctttggcaagagacagggcagagaattcatctggaacgacctgctgtccctggaaaccggcagcctgaagctggccaacggaagagtgatcgagaagacactgtacaacagaagaacccggcaggatgagcctgccctgttcgtggccctgaccttcgagcggcgggaggtcctggactcctccaatatcaaaccaatgaacctgatcggcgtggcaagaggcgaaaacatccccgccgtgatcgccctgaccgaccccgagggctgcccactgagccggtttaaggatagcctgggaaacccaacccacatcctgagaatcggcgagagctataaggagaagcagcggaccatccaggccaagaaggaggtggagcagcggagagccggcggctacagccggaagtacgccagcaaagccaagaatctggcagacgatatggtgagaaacaccgctagagatctgctgtactacgccgtgacccaggatgccatgctgatcttcgccaacctgagccggggcttcggccggcagggcaagcggaccttcatggccgagagacagtacacacggatggaggactggctgaccgccaagctggcctacgagggcctgagcaagacctacctgtccaagacactggcccagtacacctccaagacatgcagcaactgtgggtttaccatcaccagcgccgactacgacagggtgctggagaagctgaagaagacagcaacaggctggatgaccacaattaacggcaaggagctgaaggtggagggccagattacctactacaacagatacaagagacagaacgtagtcaaggacctgtccgtcgagctggatagactgagcgaagaatctgtgaacaacgacatctcctcctggacaaagggcagaagcggagaagctctgagcctcctgaagaaaagattctcccatagacccgtgcaggagaagttcgtgtgcctgaactgcggcttcgagacacacgcagccgagcaagccgccctgaacatcgccagatcctggctgttcctgcggagccaggagtacaagaaataccagacaaacaagacaaccggcaacaccgataagagagccttcgtcgagacctggcagtccttttaccggaagaagcttaaggaggtgtggaaacctgccgtgcggtctggcggatctggcggaggctccacaagccagatgcccgtgaagttcgaggacatcgccgtgagcttcagccaggaggagtgggagtacctgaacgaggagcagaaggagctgtacagggaggtgatggaggagaactaccagaccctgatcagcctgggcaccggcagcccccccatcacccccgacatcatcagccacatcgagaggggcgaggagccctacatcagggaggagcccggcagcgaggagaggggccccgtgaggagcagcaccagccccaagaaaaagagaaaagtctaagctgccttctgcggggcttgccttctggccatgcccttcttctctcccttgcacctgtacctcttggtctttgaataaagcctgagtaggaaggctagcaaaaaaaaaaaaaaaaaaaaaaaaaaaaaaaaaaaaaaaaaaaaaaaaaaaaaaaaaaaaaaaaaaaaaaaaaaaaaaaa

SEQ ID NO: 2680 - RNA, 5419 nt, synthetic construct
  source 1..5419: mol_type = other RNA
aggaaataagagagaaaagaagagtaagaagaaatataagagccaccatggcccctaagaagaagcgtaaagtgagccgggtgaacggcagcggcagcggcggcggcatgaaccacgaccaggagttcgacccccctaaggtgtaccctcccgtccccgccgagaagagaaagcccatccgggtcctgagcctgttcgatggcatcgccaccggtctgctggtgctgaaggacctgggcatccaggtggataggtacattgcctccgaggtgtgcgaggactccatcaccgtgggaatggtgcgtcatcagggcaagatcatgtacgtgggcgacgtgcggagcgtgacacagaagcatatccaggagtggggccctttcgacctggtgatcggcggcagcccttgcaatgacctgagcatcgtgaacccagcccggaagggcctgtacgagggaaccggcagactgttcttcgagttttacagactgctgcacgacgcccggcctaaggaaggcgacgaccggcccttcttttggctgttcgagaatgtggtggccatgggagtcagcgacaagcgggatattagccggttcctggagagcaaccccgtgatgatcgatgccaaggaagtgagcgccgcccaccgggccagatacttctggggcaatctgcctggcatgaacagacccctggccagcaccgtgaacgacaagctggagctgcaggagtgcctggagcacggccggatcgccaagttcagcaaggtgagaaccatcaccacccgaagcaacagcatcaaacaaggcaaggaccagcactttcctgtgttcatgaacgagaaggaggacatcctgtggtgtaccgagatggagagagtgttcgggttcccagtccactacacagatgtcagcaacatgtctagactggccagacagagactgctgggaagaagctggtccgtccctgtgatcagacacctgttcgcccctctgaaggagtacttcgcctgcgtgagcagcggcaacagcaacgccaacagccggggccccagcttctctagcggcctggtgccactgtccctgagagggagccacatgggccccatggagatctacaaaaccgtgagcgcctggaagcggcagcctgtgcgcgtgctgagcctgtttcggaatatcgataaagtcctgaaaagcctgggattcctggagagcggctctggctccggcggtggcaccctgaagtacgtggaggatgtgacaaacgtggtcagacgggatgtggagaagtggggccccttcgatctggtgtacggcagcacccaacccctgggcagctcttgtgaccggtgccctggctggtacatgtttcagttccaccggatcctgcagtacgccctgccgagacaggagtcccagcggccattcttttggattttcatggacaacttgctgctgaccgaggatgaccaggaaactaccactcggttcctgcagaccgaagccgtgaccctgcaggacgtgagaggccgggactaccagaacgccatgcgggtgtggtccaacatccctggactgaaaagcaagcacgcacctctgacccctaaagaagaggagtacctgcaggcccaggtgcggagcagaagcaagctggacgcccctaaggtggatctgctggtgaagaattgcctcctgcccctgagagagtacttcaagtatttcagccagaatagtctgcccctgggcggcccaagcagcggcgcccctcctcccagcggcggcagcccagccggctccccaacctctaccgaggagggcacctctgagtccgccacccccgagagcggccctggcacctccaccgagcccagcgagggcagcgcacccggcagccctgccggcagccccacctccacagaggagggaaccagcaccgagcccagcgaaggcagcgccccaggcaccagcaccgagcctagtgagggcggctctggcggcggcagcgcccaggagattaaacggatcaacaagatcagaagaagacttgtgaaagacagcaacaccaagaaggccggcaagacaggccccatgaaaaccctgctggttagagtgatgacacccgatctgagagagcggctggaaaacctgagaaagaagcctgaaaatatcccccagcccatcagcaatacatctagagccaacctgaataagctgctgaccgattacaccgaaatgaagaaggcgatcctgcatgtgtactgggaagagttccagaaggaccctgtgggcctgatgagccgggtggcccagcctgccagcaagaagatcgatcagaacaagctgaaacctgagatggacgagaagggcaacctgaccaccgccggctttgcctgctctcagtgtggccagcccctgttcgtgtacaagctggagcaggtgtctgagaagggcaaggcttacaccaactacttcggacggtgcaatgtggccgagcacgaaaagctgatcctgctggcccagctgaagcccgagaaggatagcgacgaagccgtgacatatagcctgggaaagtttgggcagagggccctggatttctacagcattcatgtgaccaaggagtccacccaccccgtgaagcccctggcccagatcgccggaaacagatacgcctccggacctgtgggaaaggccctgagcgacgcatgtatgggcacaatcgcctccttcctgtctaagtaccaggacatcatcatcgaacaccagaaggtggtgaagggcaaccagaagagactggagagcctgcgggagctggccggcaaggaaaacctggaataccctagcgtgaccctgccacctcagcctcacaccaaggagggcgttgatgcctacaacgaagtgatcgcccgggtgcgaatgtgggtgaacctgaacctgtggcagaagctgaagctaagcagagatgatgccaagcctctgctgagactgaagggattcccttcctttcctctggtcgagagacaggccaacgaagtggactggtgggacatggtgtgtaacgtgaagaagctgatcaacgagaaaaaggaggatggcaaggtgttttggcagaatctggctggctacaagagacaggaagccctgagaccatacctgagcagcgaggaagatcggaagaagggaaagaaattcgctcggtaccagctgggcgacctgctgctgcacctggaaaagaagcacggcgaggactggggaaaggtgtacgacgaggcctgggagcggattgacaagaaagtggaaggcctgagcaagcacatcaagctggaagaggaacggagaagcgaggacgcccagagcaaggccgccctgaccgactggctgcgggctaaggccagcttcgtgatcgagggcctgaaggaggccgacaaggacgagttctgcagatgcgagctgaagctgcagaagtggtacggggacctgcggggaaagcccttcgccatcgaagccgagaacagcatcctggacatcagcggcttcagcaagcagtacaactgtgccttcatctggcagaaggacggcgtgaagaagctgaacctgtacctgatcatcaactacttcaagggcggcaagctgcggttcaagaagatcaaacctgaagccttcgaagccaacagattctacaccgtgatcaacaaaaagagcggcgagatcgtgcccatggaggtgaacttcaacttcgacgaccccaacctgatcatcctgcctctggcctttggcaagagacagggcagagaattcatctggaacgacctgctgtccctggaaaccggcagcctgaagctggccaacggaagagtgatcgagaagacactgtacaacagaagaacccggcaggatgagcctgccctgttcgtggccctgaccttcgagcggcgggaggtcctggactcctccaatatcaaaccaatgaacctgatcggcgtggcaagaggcgaaaacatccccgccgtgatcgccctgaccgaccccgagggctgcccactgagccggtttaaggatagcctgggaaacccaacccacatcctgagaatcggcgagagctataaggagaagcagcggaccatccaggccaagaaggaggtggagcagcggagagccggcggctacagccggaagtacgccagcaaagccaagaatctggcagacgatatggtgagaaacaccgctagagatctgctgtactacgccgtgacccaggatgccatgctgatcttcgccaacctgagccggggcttcggccggcagggcaagcggaccttcatggccgagagacagtacacacggatggaggactggctgaccgccaagctggcctacgagggcctgagcaagacctacctgtccaagacactggcccagtacacctccaagacatgcagcaactgtgggtttaccatcaccagcgccgactacgacagggtgctggagaagctgaagaagacagcaacaggctggatgaccacaattaacggcaaggagctgaaggtggagggccagattacctactacaacagatacaagagacagaacgtagtcaaggacctgtccgtcgagctggatagactgagcgaagaatctgtgaacaacgacatctcctcctggacaaagggcagaagcggagaagctctgagcctcctgaagaaaagattctcccatagacccgtgcaggagaagttcgtgtgcctgaactgcggcttcgagacacacgcagccgagcaagccgccctgaacatcgccagatcctggctgttcctgcggagccaggagtacaagaaataccagacaaacaagacaaccggcaacaccgataagagagccttcgtcgagacctggcagtccttttaccggaagaagcttaaggaggtgtggaaacctgccgtgcggtctggcggatctggcggaggctccacaagcgccagcgcccaggtgaccttcgaggacatcgccgtgagcttctgccacgaggagtggaggtacctggacgagggccagaaggagctgtacaaggaggtgatgaaggagaactacgagaccctgatcagcctgggcttcctgtgcgagaagcccagcctgatcagcaagatcgagcaggaggaggacccctgcgtgagggaccagcagaacagcagggagaggaggaggaggctgaagaacttcaccagccccaagaaaaagagaaaagtctaagctgccttctgcggggcttgccttctggccatgcccttcttctctcccttgcacctgtacctcttggtctttgaataaagcctgagtaggaaggctagcaaaaaaaaaaaaaaaaaaaaaaaaaaaaaaaaaaaaaaaaaaaaaaaaaaaaaaaaaaaaaaaaaaaaaaaaaaaaaaaa

SEQ ID NO: 2681 - RNA, 5419 nt, synthetic construct
  source 1..5419: mol_type = other RNA
aggaaataagagagaaaagaagagtaagaagaaatataagagccaccatggcccctaagaagaagcgtaaagtgagccgggtgaacggcagcggcagcggcggcggcatgaaccacgaccaggagttcgacccccctaaggtgtaccctcccgtccccgccgagaagagaaagcccatccgggtcctgagcctgttcgatggcatcgccaccggtctgctggtgctgaaggacctgggcatccaggtggataggtacattgcctccgaggtgtgcgaggactccatcaccgtgggaatggtgcgtcatcagggcaagatcatgtacgtgggcgacgtgcggagcgtgacacagaagcatatccaggagtggggccctttcgacctggtgatcggcggcagcccttgcaatgacctgagcatcgtgaacccagcccggaagggcctgtacgagggaaccggcagactgttcttcgagttttacagactgctgcacgacgcccggcctaaggaaggcgacgaccggcccttcttttggctgttcgagaatgtggtggccatgggagtcagcgacaagcgggatattagccggttcctggagagcaaccccgtgatgatcgatgccaaggaagtgagcgccgcccaccgggccagatacttctggggcaatctgcctggcatgaacagacccctggccagcaccgtgaacgacaagctggagctgcaggagtgcctggagcacggccggatcgccaagttcagcaaggtgagaaccatcaccacccgaagcaacagcatcaaacaaggcaaggaccagcactttcctgtgttcatgaacgagaaggaggacatcctgtggtgtaccgagatggagagagtgttcgggttcccagtccactacacagatgtcagcaacatgtctagactggccagacagagactgctgggaagaagctggtccgtccctgtgatcagacacctgttcgcccctctgaaggagtacttcgcctgcgtgagcagcggcaacagcaacgccaacagccggggccccagcttctctagcggcctggtgccactgtccctgagagggagccacatgggccccatggagatctacaaaaccgtgagcgcctggaagcggcagcctgtgcgcgtgctgagcctgtttcggaatatcgataaagtcctgaaaagcctgggattcctggagagcggctctggctccggcggtggcaccctgaagtacgtggaggatgtgacaaacgtggtcagacgggatgtggagaagtggggccccttcgatctggtgtacggcagcacccaacccctgggcagctcttgtgaccggtgccctggctggtacatgtttcagttccaccggatcctgcagtacgccctgccgagacaggagtcccagcggccattcttttggattttcatggacaacttgctgctgaccgaggatgaccaggaaactaccactcggttcctgcagaccgaagccgtgaccctgcaggacgtgagaggccgggactaccagaacgccatgcgggtgtggtccaacatccctggactgaaaagcaagcacgcacctctgacccctaaagaagaggagtacctgcaggcccaggtgcggagcagaagcaagctggacgcccctaaggtggatctgctggtgaagaattgcctcctgcccctgagagagtacttcaagtatttcagccagaatagtctgcccctgggcggcccaagcagcggcgcccctcctcccagcggcggcagcccagccggctccccaacctctaccgaggagggcacctctgagtccgccacccccgagagcggccctggcacctccaccgagcccagcgagggcagcgcacccggcagccctgccggcagccccacctccacagaggagggaaccagcaccgagcccagcgaaggcagcgccccaggcaccagcaccgagcctagtgagggcggctctggcggcggcagcgcccaggagattaaacggatcaacaagatcagaagaagacttgtgaaagacagcaacaccaagaaggccggcaagacaggccccatgaaaaccctgctggttagagtgatgacacccgatctgagagagcggctggaaaacctgagaaagaagcctgaaaatatcccccagcccatcagcaatacatctagagccaacctgaataagctgctgaccgattacaccgaaatgaagaaggcgatcctgcatgtgtactgggaagagttccagaaggaccctgtgggcctgatgagccgggtggcccagcctgccagcaagaagatcgatcagaacaagctgaaacctgagatggacgagaagggcaacctgaccaccgccggctttgcctgctctcagtgtggccagcccctgttcgtgtacaagctggagcaggtgtctgagaagggcaaggcttacaccaactacttcggacggtgcaatgtggccgagcacgaaaagctgatcctgctggcccagctgaagcccgagaaggatagcgacgaagccgtgacatatagcctgggaaagtttgggcagagggccctggatttctacagcattcatgtgaccaaggagtccacccaccccgtgaagcccctggcccagatcgccggaaacagatacgcctccggacctgtgggaaaggccctgagcgacgcatgtatgggcacaatcgcctccttcctgtctaagtaccaggacatcatcatcgaacaccagaaggtggtgaagggcaaccagaagagactggagagcctgcgggagctggccggcaaggaaaacctggaataccctagcgtgaccctgccacctcagcctcacaccaaggagggcgttgatgcctacaacgaagtgatcgcccgggtgcgaatgtgggtgaacctgaacctgtggcagaagctgaagctaagcagagatgatgccaagcctctgctgagactgaagggattcccttcctttcctctggtcgagagacaggccaacgaagtggactggtgggacatggtgtgtaacgtgaagaagctgatcaacgagaaaaaggaggatggcaaggtgttttggcagaatctggctggctacaagagacaggaagccctgagaccatacctgagcagcgaggaagatcggaagaagggaaagaaattcgctcggtaccagctgggcgacctgctgctgcacctggaaaagaagcacggcgaggactggggaaaggtgtacgacgaggcctgggagcggattgacaagaaagtggaaggcctgagcaagcacatcaagctggaagaggaacggagaagcgaggacgcccagagcaaggccgccctgaccgactggctgcgggctaaggccagcttcgtgatcgagggcctgaaggaggccgacaaggacgagttctgcagatgcgagctgaagctgcagaagtggtacggggacctgcggggaaagcccttcgccatcgaagccgagaacagcatcctggacatcagcggcttcagcaagcagtacaactgtgccttcatctggcagaaggacggcgtgaagaagctgaacctgtacctgatcatcaactacttcaagggcggcaagctgcggttcaagaagatcaaacctgaagccttcgaagccaacagattctacaccgtgatcaacaaaaagagcggcgagatcgtgcccatggaggtgaacttcaacttcgacgaccccaacctgatcatcctgcctctggcctttggcaagagacagggcagagaattcatctggaacgacctgctgtccctggaaaccggcagcctgaagctggccaacggaagagtgatcgagaagacactgtacaacagaagaacccggcaggatgagcctgccctgttcgtggccctgaccttcgagcggcgggaggtcctggactcctccaatatcaaaccaatgaacctgatcggcgtggcaagaggcgaaaacatccccgccgtgatcgccctgaccgaccccgagggctgcccactgagccggtttaaggatagcctgggaaacccaacccacatcctgagaatcggcgagagctataaggagaagcagcggaccatccaggccaagaaggaggtggagcagcggagagccggcggctacagccggaagtacgccagcaaagccaagaatctggcagacgatatggtgagaaacaccgctagagatctgctgtactacgccgtgacccaggatgccatgctgatcttcgccaacctgagccggggcttcggccggcagggcaagcggaccttcatggccgagagacagtacacacggatggaggactggctgaccgccaagctggcctacgagggcctgagcaagacctacctgtccaagacactggcccagtacacctccaagacatgcagcaactgtgggtttaccatcaccagcgccgactacgacagggtgctggagaagctgaagaagacagcaacaggctggatgaccacaattaacggcaaggagctgaaggtggagggccagattacctactacaacagatacaagagacagaacgtagtcaaggacctgtccgtcgagctggatagactgagcgaagaatctgtgaacaacgacatctcctcctggacaaagggcagaagcggagaagctctgagcctcctgaagaaaagattctcccatagacccgtgcaggagaagttcgtgtgcctgaactgcggcttcgagacacacgcagccgagcaagccgccctgaacatcgccagatcctggctgttcctgcggagccaggagtacaagaaataccagacaaacaagacaaccggcaacaccgataagagagccttcgtcgagacctggcagtccttttaccggaagaagcttaaggaggtgtggaaacctgccgtgcggtctggcggatctggcggaggctccacaagcagccagggcctggtgaccttcggcgacgtggccgtggacttcagccaggaggagtgggcctggctgagcaccacccagaggaccctgtacaggaaggtgaccctggagaactacaggaacctggccagcctgggcctgtgcgtgagcaagcccgccgtgatcagcctgctggagcagggcaaggagccctggatcgtgaagaggaagatgaccaggggcggctgccccgacctgaacgccgtgaccagccccaagaaaaagagaaaagtctaagctgccttctgcggggcttgccttctggccatgcccttcttctctcccttgcacctgtacctcttggtctttgaataaagcctgagtaggaaggctagcaaaaaaaaaaaaaaaaaaaaaaaaaaaaaaaaaaaaaaaaaaaaaaaaaaaaaaaaaaaaaaaaaaaaaaaaaaaaaaaa

SEQ ID NO: 2682 - RNA, 5419 nt, synthetic construct
  source 1..5419: mol_type = other RNA
aggaaataagagagaaaagaagagtaagaagaaatataagagccaccatggcccctaagaagaagcgtaaagtgagccgggtgaacggcagcggcagcggcggcggcatgaaccacgaccaggagttcgacccccctaaggtgtaccctcccgtccccgccgagaagagaaagcccatccgggtcctgagcctgttcgatggcatcgccaccggtctgctggtgctgaaggacctgggcatccaggtggataggtacattgcctccgaggtgtgcgaggactccatcaccgtgggaatggtgcgtcatcagggcaagatcatgtacgtgggcgacgtgcggagcgtgacacagaagcatatccaggagtggggccctttcgacctggtgatcggcggcagcccttgcaatgacctgagcatcgtgaacccagcccggaagggcctgtacgagggaaccggcagactgttcttcgagttttacagactgctgcacgacgcccggcctaaggaaggcgacgaccggcccttcttttggctgttcgagaatgtggtggccatgggagtcagcgacaagcgggatattagccggttcctggagagcaaccccgtgatgatcgatgccaaggaagtgagcgccgcccaccgggccagatacttctggggcaatctgcctggcatgaacagacccctggccagcaccgtgaacgacaagctggagctgcaggagtgcctggagcacggccggatcgccaagttcagcaaggtgagaaccatcaccacccgaagcaacagcatcaaacaaggcaaggaccagcactttcctgtgttcatgaacgagaaggaggacatcctgtggtgtaccgagatggagagagtgttcgggttcccagtccactacacagatgtcagcaacatgtctagactggccagacagagactgctgggaagaagctggtccgtccctgtgatcagacacctgttcgcccctctgaaggagtacttcgcctgcgtgagcagcggcaacagcaacgccaacagccggggccccagcttctctagcggcctggtgccactgtccctgagagggagccacatgggccccatggagatctacaaaaccgtgagcgcctggaagcggcagcctgtgcgcgtgctgagcctgtttcggaatatcgataaagtcctgaaaagcctgggattcctggagagcggctctggctccggcggtggcaccctgaagtacgtggaggatgtgacaaacgtggtcagacgggatgtggagaagtggggccccttcgatctggtgtacggcagcacccaacccctgggcagctcttgtgaccggtgccctggctggtacatgtttcagttccaccggatcctgcagtacgccctgccgagacaggagtcccagcggccattcttttggattttcatggacaacttgctgctgaccgaggatgaccaggaaactaccactcggttcctgcagaccgaagccgtgaccctgcaggacgtgagaggccgggactaccagaacgccatgcgggtgtggtccaacatccctggactgaaaagcaagcacgcacctctgacccctaaagaagaggagtacctgcaggcccaggtgcggagcagaagcaagctggacgcccctaaggtggatctgctggtgaagaattgcctcctgcccctgagagagtacttcaagtatttcagccagaatagtctgcccctgggcggcccaagcagcggcgcccctcctcccagcggcggcagcccagccggctccccaacctctaccgaggagggcacctctgagtccgccacccccgagagcggccctggcacctccaccgagcccagcgagggcagcgcacccggcagccctgccggcagccccacctccacagaggagggaaccagcaccgagcccagcgaaggcagcgccccaggcaccagcaccgagcctagtgagggcggctctggcggcggcagcgcccaggagattaaacggatcaacaagatcagaagaagacttgtgaaagacagcaacaccaagaaggccggcaagacaggccccatgaaaaccctgctggttagagtgatgacacccgatctgagagagcggctggaaaacctgagaaagaagcctgaaaatatcccccagcccatcagcaatacatctagagccaacctgaataagctgctgaccgattacaccgaaatgaagaaggcgatcctgcatgtgtactgggaagagttccagaaggaccctgtgggcctgatgagccgggtggcccagcctgccagcaagaagatcgatcagaacaagctgaaacctgagatggacgagaagggcaacctgaccaccgccggctttgcctgctctcagtgtggccagcccctgttcgtgtacaagctggagcaggtgtctgagaagggcaaggcttacaccaactacttcggacggtgcaatgtggccgagcacgaaaagctgatcctgctggcccagctgaagcccgagaaggatagcgacgaagccgtgacatatagcctgggaaagtttgggcagagggccctggatttctacagcattcatgtgaccaaggagtccacccaccccgtgaagcccctggcccagatcgccggaaacagatacgcctccggacctgtgggaaaggccctgagcgacgcatgtatgggcacaatcgcctccttcctgtctaagtaccaggacatcatcatcgaacaccagaaggtggtgaagggcaaccagaagagactggagagcctgcgggagctggccggcaaggaaaacctggaataccctagcgtgaccctgccacctcagcctcacaccaaggagggcgttgatgcctacaacgaagtgatcgcccgggtgcgaatgtgggtgaacctgaacctgtggcagaagctgaagctaagcagagatgatgccaagcctctgctgagactgaagggattcccttcctttcctctggtcgagagacaggccaacgaagtggactggtgggacatggtgtgtaacgtgaagaagctgatcaacgagaaaaaggaggatggcaaggtgttttggcagaatctggctggctacaagagacaggaagccctgagaccatacctgagcagcgaggaagatcggaagaagggaaagaaattcgctcggtaccagctgggcgacctgctgctgcacctggaaaagaagcacggcgaggactggggaaaggtgtacgacgaggcctgggagcggattgacaagaaagtggaaggcctgagcaagcacatcaagctggaagaggaacggagaagcgaggacgcccagagcaaggccgccctgaccgactggctgcgggctaaggccagcttcgtgatcgagggcctgaaggaggccgacaaggacgagttctgcagatgcgagctgaagctgcagaagtggtacggggacctgcggggaaagcccttcgccatcgaagccgagaacagcatcctggacatcagcggcttcagcaagcagtacaactgtgccttcatctggcagaaggacggcgtgaagaagctgaacctgtacctgatcatcaactacttcaagggcggcaagctgcggttcaagaagatcaaacctgaagccttcgaagccaacagattctacaccgtgatcaacaaaaagagcggcgagatcgtgcccatggaggtgaacttcaacttcgacgaccccaacctgatcatcctgcctctggcctttggcaagagacagggcagagaattcatctggaacgacctgctgtccctggaaaccggcagcctgaagctggccaacggaagagtgatcgagaagacactgtacaacagaagaacccggcaggatgagcctgccctgttcgtggccctgaccttcgagcggcgggaggtcctggactcctccaatatcaaaccaatgaacctgatcggcgtggcaagaggcgaaaacatccccgccgtgatcgccctgaccgaccccgagggctgcccactgagccggtttaaggatagcctgggaaacccaacccacatcctgagaatcggcgagagctataaggagaagcagcggaccatccaggccaagaaggaggtggagcagcggagagccggcggctacagccggaagtacgccagcaaagccaagaatctggcagacgatatggtgagaaacaccgctagagatctgctgtactacgccgtgacccaggatgccatgctgatcttcgccaacctgagccggggcttcggccggcagggcaagcggaccttcatggccgagagacagtacacacggatggaggactggctgaccgccaagctggcctacgagggcctgagcaagacctacctgtccaagacactggcccagtacacctccaagacatgcagcaactgtgggtttaccatcaccagcgccgactacgacagggtgctggagaagctgaagaagacagcaacaggctggatgaccacaattaacggcaaggagctgaaggtggagggccagattacctactacaacagatacaagagacagaacgtagtcaaggacctgtccgtcgagctggatagactgagcgaagaatctgtgaacaacgacatctcctcctggacaaagggcagaagcggagaagctctgagcctcctgaagaaaagattctcccatagacccgtgcaggagaagttcgtgtgcctgaactgcggcttcgagacacacgcagccgagcaagccgccctgaacatcgccagatcctggctgttcctgcggagccaggagtacaagaaataccagacaaacaagacaaccggcaacaccgataagagagccttcgtcgagacctggcagtccttttaccggaagaagcttaaggaggtgtggaaacctgccgtgcggtctggcggatctggcggaggctccacaagcagcaaggtgcccgtgaccttcggcgacctggccatctacttcagccaggaggagtgggagtggctgagccccatccagaaggacctgtacgaggacgtgatgctggagaactaccagaacctggtgagcctgggcctgagcttcaggaggcccaacgtgatcaccctgctggagaagggcaaggccccctggatggtggagcccgccaggaagaggaggggcgtggacagcggcagcaagtgcaccagccccaagaaaaagagaaaagtctaagctgccttctgcggggcttgccttctggccatgcccttcttctctcccttgcacctgtacctcttggtctttgaataaagcctgagtaggaaggctagcaaaaaaaaaaaaaaaaaaaaaaaaaaaaaaaaaaaaaaaaaaaaaaaaaaaaaaaaaaaaaaaaaaaaaaaaaaaaaaaa

SEQ ID NO: 2683 - RNA, 5419 nt, synthetic construct
  source 1..5419: mol_type = other RNA
aggaaataagagagaaaagaagagtaagaagaaatataagagccaccatggcccctaagaagaagcgtaaagtgagccgggtgaacggcagcggcagcggcggcggcatgaaccacgaccaggagttcgacccccctaaggtgtaccctcccgtccccgccgagaagagaaagcccatccgggtcctgagcctgttcgatggcatcgccaccggtctgctggtgctgaaggacctgggcatccaggtggataggtacattgcctccgaggtgtgcgaggactccatcaccgtgggaatggtgcgtcatcagggcaagatcatgtacgtgggcgacgtgcggagcgtgacacagaagcatatccaggagtggggccctttcgacctggtgatcggcggcagcccttgcaatgacctgagcatcgtgaacccagcccggaagggcctgtacgagggaaccggcagactgttcttcgagttttacagactgctgcacgacgcccggcctaaggaaggcgacgaccggcccttcttttggctgttcgagaatgtggtggccatgggagtcagcgacaagcgggatattagccggttcctggagagcaaccccgtgatgatcgatgccaaggaagtgagcgccgcccaccgggccagatacttctggggcaatctgcctggcatgaacagacccctggccagcaccgtgaacgacaagctggagctgcaggagtgcctggagcacggccggatcgccaagttcagcaaggtgagaaccatcaccacccgaagcaacagcatcaaacaaggcaaggaccagcactttcctgtgttcatgaacgagaaggaggacatcctgtggtgtaccgagatggagagagtgttcgggttcccagtccactacacagatgtcagcaacatgtctagactggccagacagagactgctgggaagaagctggtccgtccctgtgatcagacacctgttcgcccctctgaaggagtacttcgcctgcgtgagcagcggcaacagcaacgccaacagccggggccccagcttctctagcggcctggtgccactgtccctgagagggagccacatgggccccatggagatctacaaaaccgtgagcgcctggaagcggcagcctgtgcgcgtgctgagcctgtttcggaatatcgataaagtcctgaaaagcctgggattcctggagagcggctctggctccggcggtggcaccctgaagtacgtggaggatgtgacaaacgtggtcagacgggatgtggagaagtggggccccttcgatctggtgtacggcagcacccaacccctgggcagctcttgtgaccggtgccctggctggtacatgtttcagttccaccggatcctgcagtacgccctgccgagacaggagtcccagcggccattcttttggattttcatggacaacttgctgctgaccgaggatgaccaggaaactaccactcggttcctgcagaccgaagccgtgaccctgcaggacgtgagaggccgggactaccagaacgccatgcgggtgtggtccaacatccctggactgaaaagcaagcacgcacctctgacccctaaagaagaggagtacctgcaggcccaggtgcggagcagaagcaagctggacgcccctaaggtggatctgctggtgaagaattgcctcctgcccctgagagagtacttcaagtatttcagccagaatagtctgcccctgggcggcccaagcagcggcgcccctcctcccagcggcggcagcccagccggctccccaacctctaccgaggagggcacctctgagtccgccacccccgagagcggccctggcacctccaccgagcccagcgagggcagcgcacccggcagccctgccggcagccccacctccacagaggagggaaccagcaccgagcccagcgaaggcagcgccccaggcaccagcaccgagcctagtgagggcggctctggcggcggcagcgcccaggagattaaacggatcaacaagatcagaagaagacttgtgaaagacagcaacaccaagaaggccggcaagacaggccccatgaaaaccctgctggttagagtgatgacacccgatctgagagagcggctggaaaacctgagaaagaagcctgaaaatatcccccagcccatcagcaatacatctagagccaacctgaataagctgctgaccgattacaccgaaatgaagaaggcgatcctgcatgtgtactgggaagagttccagaaggaccctgtgggcctgatgagccgggtggcccagcctgccagcaagaagatcgatcagaacaagctgaaacctgagatggacgagaagggcaacctgaccaccgccggctttgcctgctctcagtgtggccagcccctgttcgtgtacaagctggagcaggtgtctgagaagggcaaggcttacaccaactacttcggacggtgcaatgtggccgagcacgaaaagctgatcctgctggcccagctgaagcccgagaaggatagcgacgaagccgtgacatatagcctgggaaagtttgggcagagggccctggatttctacagcattcatgtgaccaaggagtccacccaccccgtgaagcccctggcccagatcgccggaaacagatacgcctccggacctgtgggaaaggccctgagcgacgcatgtatgggcacaatcgcctccttcctgtctaagtaccaggacatcatcatcgaacaccagaaggtggtgaagggcaaccagaagagactggagagcctgcgggagctggccggcaaggaaaacctggaataccctagcgtgaccctgccacctcagcctcacaccaaggagggcgttgatgcctacaacgaagtgatcgcccgggtgcgaatgtgggtgaacctgaacctgtggcagaagctgaagctaagcagagatgatgccaagcctctgctgagactgaagggattcccttcctttcctctggtcgagagacaggccaacgaagtggactggtgggacatggtgtgtaacgtgaagaagctgatcaacgagaaaaaggaggatggcaaggtgttttggcagaatctggctggctacaagagacaggaagccctgagaccatacctgagcagcgaggaagatcggaagaagggaaagaaattcgctcggtaccagctgggcgacctgctgctgcacctggaaaagaagcacggcgaggactggggaaaggtgtacgacgaggcctgggagcggattgacaagaaagtggaaggcctgagcaagcacatcaagctggaagaggaacggagaagcgaggacgcccagagcaaggccgccctgaccgactggctgcgggctaaggccagcttcgtgatcgagggcctgaaggaggccgacaaggacgagttctgcagatgcgagctgaagctgcagaagtggtacggggacctgcggggaaagcccttcgccatcgaagccgagaacagcatcctggacatcagcggcttcagcaagcagtacaactgtgccttcatctggcagaaggacggcgtgaagaagctgaacctgtacctgatcatcaactacttcaagggcggcaagctgcggttcaagaagatcaaacctgaagccttcgaagccaacagattctacaccgtgatcaacaaaaagagcggcgagatcgtgcccatggaggtgaacttcaacttcgacgaccccaacctgatcatcctgcctctggcctttggcaagagacagggcagagaattcatctggaacgacctgctgtccctggaaaccggcagcctgaagctggccaacggaagagtgatcgagaagacactgtacaacagaagaacccggcaggatgagcctgccctgttcgtggccctgaccttcgagcggcgggaggtcctggactcctccaatatcaaaccaatgaacctgatcggcgtggcaagaggcgaaaacatccccgccgtgatcgccctgaccgaccccgagggctgcccactgagccggtttaaggatagcctgggaaacccaacccacatcctgagaatcggcgagagctataaggagaagcagcggaccatccaggccaagaaggaggtggagcagcggagagccggcggctacagccggaagtacgccagcaaagccaagaatctggcagacgatatggtgagaaacaccgctagagatctgctgtactacgccgtgacccaggatgccatgctgatcttcgccaacctgagccggggcttcggccggcagggcaagcggaccttcatggccgagagacagtacacacggatggaggactggctgaccgccaagctggcctacgagggcctgagcaagacctacctgtccaagacactggcccagtacacctccaagacatgcagcaactgtgggtttaccatcaccagcgccgactacgacagggtgctggagaagctgaagaagacagcaacaggctggatgaccacaattaacggcaaggagctgaaggtggagggccagattacctactacaacagatacaagagacagaacgtagtcaaggacctgtccgtcgagctggatagactgagcgaagaatctgtgaacaacgacatctcctcctggacaaagggcagaagcggagaagctctgagcctcctgaagaaaagattctcccatagacccgtgcaggagaagttcgtgtgcctgaactgcggcttcgagacacacgcagccgagcaagccgccctgaacatcgccagatcctggctgttcctgcggagccaggagtacaagaaataccagacaaacaagacaaccggcaacaccgataagagagccttcgtcgagacctggcagtccttttaccggaagaagcttaaggaggtgtggaaacctgccgtgcggtctggcggatctggcggaggctccacaagcctgcaggagctgctgaccttcaaggacgtgagcgtggagttcagcgtggacgagtgggcctgcctggaccccgcccagcagaccctgtacagggacgtgatgctggagaactacaggcacctggtgttcctgggcctgacccccagcaagccccacctgatcacctgcctggagcagagcaaggagccctggaaggtgaaggcctaccagaccgtggtgaagcaccccgccgtgagcaaccacaccagccccaagaaaaagagaaaagtctaagctgccttctgcggggcttgccttctggccatgcccttcttctctcccttgcacctgtacctcttggtctttgaataaagcctgagtaggaaggctagcaaaaaaaaaaaaaaaaaaaaaaaaaaaaaaaaaaaaaaaaaaaaaaaaaaaaaaaaaaaaaaaaaaaaaaaaaaaaaaaa

SEQ ID NO: 2684 - RNA, 5416 nt, synthetic construct
  source 1..5416: mol_type = other RNA
aggaaataagagagaaaagaagagtaagaagaaatataagagccaccatggcccctaagaagaagcgtaaagtgagccgggtgaacggcagcggcagcggcggcggcatgaaccacgaccaggagttcgacccccctaaggtgtaccctcccgtccccgccgagaagagaaagcccatccgggtcctgagcctgttcgatggcatcgccaccggtctgctggtgctgaaggacctgggcatccaggtggataggtacattgcctccgaggtgtgcgaggactccatcaccgtgggaatggtgcgtcatcagggcaagatcatgtacgtgggcgacgtgcggagcgtgacacagaagcatatccaggagtggggccctttcgacctggtgatcggcggcagcccttgcaatgacctgagcatcgtgaacccagcccggaagggcctgtacgagggaaccggcagactgttcttcgagttttacagactgctgcacgacgcccggcctaaggaaggcgacgaccggcccttcttttggctgttcgagaatgtggtggccatgggagtcagcgacaagcgggatattagccggttcctggagagcaaccccgtgatgatcgatgccaaggaagtgagcgccgcccaccgggccagatacttctggggcaatctgcctggcatgaacagacccctggccagcaccgtgaacgacaagctggagctgcaggagtgcctggagcacggccggatcgccaagttcagcaaggtgagaaccatcaccacccgaagcaacagcatcaaacaaggcaaggaccagcactttcctgtgttcatgaacgagaaggaggacatcctgtggtgtaccgagatggagagagtgttcgggttcccagtccactacacagatgtcagcaacatgtctagactggccagacagagactgctgggaagaagctggtccgtccctgtgatcagacacctgttcgcccctctgaaggagtacttcgcctgcgtgagcagcggcaacagcaacgccaacagccggggccccagcttctctagcggcctggtgccactgtccctgagagggagccacatgggccccatggagatctacaaaaccgtgagcgcctggaagcggcagcctgtgcgcgtgctgagcctgtttcggaatatcgataaagtcctgaaaagcctgggattcctggagagcggctctggctccggcggtggcaccctgaagtacgtggaggatgtgacaaacgtggtcagacgggatgtggagaagtggggccccttcgatctggtgtacggcagcacccaacccctgggcagctcttgtgaccggtgccctggctggtacatgtttcagttccaccggatcctgcagtacgccctgccgagacaggagtcccagcggccattcttttggattttcatggacaacttgctgctgaccgaggatgaccaggaaactaccactcggttcctgcagaccgaagccgtgaccctgcaggacgtgagaggccgggactaccagaacgccatgcgggtgtggtccaacatccctggactgaaaagcaagcacgcacctctgacccctaaagaagaggagtacctgcaggcccaggtgcggagcagaagcaagctggacgcccctaaggtggatctgctggtgaagaattgcctcctgcccctgagagagtacttcaagtatttcagccagaatagtctgcccctgggcggcccaagcagcggcgcccctcctcccagcggcggcagcccagccggctccccaacctctaccgaggagggcacctctgagtccgccacccccgagagcggccctggcacctccaccgagcccagcgagggcagcgcacccggcagccctgccggcagccccacctccacagaggagggaaccagcaccgagcccagcgaaggcagcgccccaggcaccagcaccgagcctagtgagggcggctctggcggcggcagcgcccaggagattaaacggatcaacaagatcagaagaagacttgtgaaagacagcaacaccaagaaggccggcaagacaggccccatgaaaaccctgctggttagagtgatgacacccgatctgagagagcggctggaaaacctgagaaagaagcctgaaaatatcccccagcccatcagcaatacatctagagccaacctgaataagctgctgaccgattacaccgaaatgaagaaggcgatcctgcatgtgtactgggaagagttccagaaggaccctgtgggcctgatgagccgggtggcccagcctgccagcaagaagatcgatcagaacaagctgaaacctgagatggacgagaagggcaacctgaccaccgccggctttgcctgctctcagtgtggccagcccctgttcgtgtacaagctggagcaggtgtctgagaagggcaaggcttacaccaactacttcggacggtgcaatgtggccgagcacgaaaagctgatcctgctggcccagctgaagcccgagaaggatagcgacgaagccgtgacatatagcctgggaaagtttgggcagagggccctggatttctacagcattcatgtgaccaaggagtccacccaccccgtgaagcccctggcccagatcgccggaaacagatacgcctccggacctgtgggaaaggccctgagcgacgcatgtatgggcacaatcgcctccttcctgtctaagtaccaggacatcatcatcgaacaccagaaggtggtgaagggcaaccagaagagactggagagcctgcgggagctggccggcaaggaaaacctggaataccctagcgtgaccctgccacctcagcctcacaccaaggagggcgttgatgcctacaacgaagtgatcgcccgggtgcgaatgtgggtgaacctgaacctgtggcagaagctgaagctaagcagagatgatgccaagcctctgctgagactgaagggattcccttcctttcctctggtcgagagacaggccaacgaagtggactggtgggacatggtgtgtaacgtgaagaagctgatcaacgagaaaaaggaggatggcaaggtgttttggcagaatctggctggctacaagagacaggaagccctgagaccatacctgagcagcgaggaagatcggaagaagggaaagaaattcgctcggtaccagctgggcgacctgctgctgcacctggaaaagaagcacggcgaggactggggaaaggtgtacgacgaggcctgggagcggattgacaagaaagtggaaggcctgagcaagcacatcaagctggaagaggaacggagaagcgaggacgcccagagcaaggccgccctgaccgactggctgcgggctaaggccagcttcgtgatcgagggcctgaaggaggccgacaaggacgagttctgcagatgcgagctgaagctgcagaagtggtacggggacctgcggggaaagcccttcgccatcgaagccgagaacagcatcctggacatcagcggcttcagcaagcagtacaactgtgccttcatctggcagaaggacggcgtgaagaagctgaacctgtacctgatcatcaactacttcaagggcggcaagctgcggttcaagaagatcaaacctgaagccttcgaagccaacagattctacaccgtgatcaacaaaaagagcggcgagatcgtgcccatggaggtgaacttcaacttcgacgaccccaacctgatcatcctgcctctggcctttggcaagagacagggcagagaattcatctggaacgacctgctgtccctggaaaccggcagcctgaagctggccaacggaagagtgatcgagaagacactgtacaacagaagaacccggcaggatgagcctgccctgttcgtggccctgaccttcgagcggcgggaggtcctggactcctccaatatcaaaccaatgaacctgatcggcgtggcaagaggcgaaaacatccccgccgtgatcgccctgaccgaccccgagggctgcccactgagccggtttaaggatagcctgggaaacccaacccacatcctgagaatcggcgagagctataaggagaagcagcggaccatccaggccaagaaggaggtggagcagcggagagccggcggctacagccggaagtacgccagcaaagccaagaatctggcagacgatatggtgagaaacaccgctagagatctgctgtactacgccgtgacccaggatgccatgctgatcttcgccaacctgagccggggcttcggccggcagggcaagcggaccttcatggccgagagacagtacacacggatggaggactggctgaccgccaagctggcctacgagggcctgagcaagacctacctgtccaagacactggcccagtacacctccaagacatgcagcaactgtgggtttaccatcaccagcgccgactacgacagggtgctggagaagctgaagaagacagcaacaggctggatgaccacaattaacggcaaggagctgaaggtggagggccagattacctactacaacagatacaagagacagaacgtagtcaaggacctgtccgtcgagctggatagactgagcgaagaatctgtgaacaacgacatctcctcctggacaaagggcagaagcggagaagctctgagcctcctgaagaaaagattctcccatagacccgtgcaggagaagttcgtgtgcctgaactgcggcttcgagacacacgcagccgagcaagccgccctgaacatcgccagatcctggctgttcctgcggagccaggagtacaagaaataccagacaaacaagacaaccggcaacaccgataagagagccttcgtcgagacctggcagtccttttaccggaagaagcttaaggaggtgtggaaacctgccgtgcggtctggcggatctggcggaggctccacaagcaacgtggaggtggtgaaggtgatgccccaggacctggtgaccttcaaggacgtggccatcgacttcagccaggaggagtggcagtggatgaaccccgcccagaagagactgtacagaagcatgatgctggagaactaccagagcctggtgagcctgggcctgtgcatcagcaagccctacgtgatcagcctgctggagcagggcagagagccctgggagatgaccagcgagatgaccagaaccagccccaagaaaaagagaaaagtctaagctgccttctgcggggcttgccttctggccatgcccttcttctctcccttgcacctgtacctcttggtctttgaataaagcctgagtaggaaggctagcaaaaaaaaaaaaaaaaaaaaaaaaaaaaaaaaaaaaaaaaaaaaaaaaaaaaaaaaaaaaaaaaaaaaaaaaaaaaaaaa

SEQ ID NO: 2685 - RNA, 5419 nt, synthetic construct
  source 1..5419: mol_type = other RNA
aggaaataagagagaaaagaagagtaagaagaaatataagagccaccatggcccctaagaagaagcgtaaagtgagccgggtgaacggcagcggcagcggcggcggcatgaaccacgaccaggagttcgacccccctaaggtgtaccctcccgtccccgccgagaagagaaagcccatccgggtcctgagcctgttcgatggcatcgccaccggtctgctggtgctgaaggacctgggcatccaggtggataggtacattgcctccgaggtgtgcgaggactccatcaccgtgggaatggtgcgtcatcagggcaagatcatgtacgtgggcgacgtgcggagcgtgacacagaagcatatccaggagtggggccctttcgacctggtgatcggcggcagcccttgcaatgacctgagcatcgtgaacccagcccggaagggcctgtacgagggaaccggcagactgttcttcgagttttacagactgctgcacgacgcccggcctaaggaaggcgacgaccggcccttcttttggctgttcgagaatgtggtggccatgggagtcagcgacaagcgggatattagccggttcctggagagcaaccccgtgatgatcgatgccaaggaagtgagcgccgcccaccgggccagatacttctggggcaatctgcctggcatgaacagacccctggccagcaccgtgaacgacaagctggagctgcaggagtgcctggagcacggccggatcgccaagttcagcaaggtgagaaccatcaccacccgaagcaacagcatcaaacaaggcaaggaccagcactttcctgtgttcatgaacgagaaggaggacatcctgtggtgtaccgagatggagagagtgttcgggttcccagtccactacacagatgtcagcaacatgtctagactggccagacagagactgctgggaagaagctggtccgtccctgtgatcagacacctgttcgcccctctgaaggagtacttcgcctgcgtgagcagcggcaacagcaacgccaacagccggggccccagcttctctagcggcctggtgccactgtccctgagagggagccacatgggccccatggagatctacaaaaccgtgagcgcctggaagcggcagcctgtgcgcgtgctgagcctgtttcggaatatcgataaagtcctgaaaagcctgggattcctggagagcggctctggctccggcggtggcaccctgaagtacgtggaggatgtgacaaacgtggtcagacgggatgtggagaagtggggccccttcgatctggtgtacggcagcacccaacccctgggcagctcttgtgaccggtgccctggctggtacatgtttcagttccaccggatcctgcagtacgccctgccgagacaggagtcccagcggccattcttttggattttcatggacaacttgctgctgaccgaggatgaccaggaaactaccactcggttcctgcagaccgaagccgtgaccctgcaggacgtgagaggccgggactaccagaacgccatgcgggtgtggtccaacatccctggactgaaaagcaagcacgcacctctgacccctaaagaagaggagtacctgcaggcccaggtgcggagcagaagcaagctggacgcccctaaggtggatctgctggtgaagaattgcctcctgcccctgagagagtacttcaagtatttcagccagaatagtctgcccctgggcggcccaagcagcggcgcccctcctcccagcggcggcagcccagccggctccccaacctctaccgaggagggcacctctgagtccgccacccccgagagcggccctggcacctccaccgagcccagcgagggcagcgcacccggcagccctgccggcagccccacctccacagaggagggaaccagcaccgagcccagcgaaggcagcgccccaggcaccagcaccgagcctagtgagggcggctctggcggcggcagcgcccaggagattaaacggatcaacaagatcagaagaagacttgtgaaagacagcaacaccaagaaggccggcaagacaggccccatgaaaaccctgctggttagagtgatgacacccgatctgagagagcggctggaaaacctgagaaagaagcctgaaaatatcccccagcccatcagcaatacatctagagccaacctgaataagctgctgaccgattacaccgaaatgaagaaggcgatcctgcatgtgtactgggaagagttccagaaggaccctgtgggcctgatgagccgggtggcccagcctgccagcaagaagatcgatcagaacaagctgaaacctgagatggacgagaagggcaacctgaccaccgccggctttgcctgctctcagtgtggccagcccctgttcgtgtacaagctggagcaggtgtctgagaagggcaaggcttacaccaactacttcggacggtgcaatgtggccgagcacgaaaagctgatcctgctggcccagctgaagcccgagaaggatagcgacgaagccgtgacatatagcctgggaaagtttgggcagagggccctggatttctacagcattcatgtgaccaaggagtccacccaccccgtgaagcccctggcccagatcgccggaaacagatacgcctccggacctgtgggaaaggccctgagcgacgcatgtatgggcacaatcgcctccttcctgtctaagtaccaggacatcatcatcgaacaccagaaggtggtgaagggcaaccagaagagactggagagcctgcgggagctggccggcaaggaaaacctggaataccctagcgtgaccctgccacctcagcctcacaccaaggagggcgttgatgcctacaacgaagtgatcgcccgggtgcgaatgtgggtgaacctgaacctgtggcagaagctgaagctaagcagagatgatgccaagcctctgctgagactgaagggattcccttcctttcctctggtcgagagacaggccaacgaagtggactggtgggacatggtgtgtaacgtgaagaagctgatcaacgagaaaaaggaggatggcaaggtgttttggcagaatctggctggctacaagagacaggaagccctgagaccatacctgagcagcgaggaagatcggaagaagggaaagaaattcgctcggtaccagctgggcgacctgctgctgcacctggaaaagaagcacggcgaggactggggaaaggtgtacgacgaggcctgggagcggattgacaagaaagtggaaggcctgagcaagcacatcaagctggaagaggaacggagaagcgaggacgcccagagcaaggccgccctgaccgactggctgcgggctaaggccagcttcgtgatcgagggcctgaaggaggccgacaaggacgagttctgcagatgcgagctgaagctgcagaagtggtacggggacctgcggggaaagcccttcgccatcgaagccgagaacagcatcctggacatcagcggcttcagcaagcagtacaactgtgccttcatctggcagaaggacggcgtgaagaagctgaacctgtacctgatcatcaactacttcaagggcggcaagctgcggttcaagaagatcaaacctgaagccttcgaagccaacagattctacaccgtgatcaacaaaaagagcggcgagatcgtgcccatggaggtgaacttcaacttcgacgaccccaacctgatcatcctgcctctggcctttggcaagagacagggcagagaattcatctggaacgacctgctgtccctggaaaccggcagcctgaagctggccaacggaagagtgatcgagaagacactgtacaacagaagaacccggcaggatgagcctgccctgttcgtggccctgaccttcgagcggcgggaggtcctggactcctccaatatcaaaccaatgaacctgatcggcgtggcaagaggcgaaaacatccccgccgtgatcgccctgaccgaccccgagggctgcccactgagccggtttaaggatagcctgggaaacccaacccacatcctgagaatcggcgagagctataaggagaagcagcggaccatccaggccaagaaggaggtggagcagcggagagccggcggctacagccggaagtacgccagcaaagccaagaatctggcagacgatatggtgagaaacaccgctagagatctgctgtactacgccgtgacccaggatgccatgctgatcttcgccaacctgagccggggcttcggccggcagggcaagcggaccttcatggccgagagacagtacacacggatggaggactggctgaccgccaagctggcctacgagggcctgagcaagacctacctgtccaagacactggcccagtacacctccaagacatgcagcaactgtgggtttaccatcaccagcgccgactacgacagggtgctggagaagctgaagaagacagcaacaggctggatgaccacaattaacggcaaggagctgaaggtggagggccagattacctactacaacagatacaagagacagaacgtagtcaaggacctgtccgtcgagctggatagactgagcgaagaatctgtgaacaacgacatctcctcctggacaaagggcagaagcggagaagctctgagcctcctgaagaaaagattctcccatagacccgtgcaggagaagttcgtgtgcctgaactgcggcttcgagacacacgcagccgagcaagccgccctgaacatcgccagatcctggctgttcctgcggagccaggagtacaagaaataccagacaaacaagacaaccggcaacaccgataagagagccttcgtcgagacctggcagtccttttaccggaagaagcttaaggaggtgtggaaacctgccgtgcggtctggcggatctggcggaggctccacaagcttccaggagagcgtggccttcgaggacgtggccgtgtacttcacccagaaccagtggggcagcctggaccccgcccagagggccctgtacagcgaggtgatgctggagaactacgccaacgtggccagcctggtggccttccccttccccaagcccgccctgatcagccacctggagaagggcgaggccccctggggccccgacccctgggacgccgagatccccagcggcatcaaccagggcaccagccccaagaaaaagagaaaagtctaagctgccttctgcggggcttgccttctggccatgcccttcttctctcccttgcacctgtacctcttggtctttgaataaagcctgagtaggaaggctagcaaaaaaaaaaaaaaaaaaaaaaaaaaaaaaaaaaaaaaaaaaaaaaaaaaaaaaaaaaaaaaaaaaaaaaaaaaaaaaaa

SEQ ID NO: 2686 - RNA, 5419 nt, synthetic construct
  source 1..5419: mol_type = other RNA
aggaaataagagagaaaagaagagtaagaagaaatataagagccaccatggcccctaagaagaagcgtaaagtgagccgggtgaacggcagcggcagcggcggcggcatgaaccacgaccaggagttcgacccccctaaggtgtaccctcccgtccccgccgagaagagaaagcccatccgggtcctgagcctgttcgatggcatcgccaccggtctgctggtgctgaaggacctgggcatccaggtggataggtacattgcctccgaggtgtgcgaggactccatcaccgtgggaatggtgcgtcatcagggcaagatcatgtacgtgggcgacgtgcggagcgtgacacagaagcatatccaggagtggggccctttcgacctggtgatcggcggcagcccttgcaatgacctgagcatcgtgaacccagcccggaagggcctgtacgagggaaccggcagactgttcttcgagttttacagactgctgcacgacgcccggcctaaggaaggcgacgaccggcccttcttttggctgttcgagaatgtggtggccatgggagtcagcgacaagcgggatattagccggttcctggagagcaaccccgtgatgatcgatgccaaggaagtgagcgccgcccaccgggccagatacttctggggcaatctgcctggcatgaacagacccctggccagcaccgtgaacgacaagctggagctgcaggagtgcctggagcacggccggatcgccaagttcagcaaggtgagaaccatcaccacccgaagcaacagcatcaaacaaggcaaggaccagcactttcctgtgttcatgaacgagaaggaggacatcctgtggtgtaccgagatggagagagtgttcgggttcccagtccactacacagatgtcagcaacatgtctagactggccagacagagactgctgggaagaagctggtccgtccctgtgatcagacacctgttcgcccctctgaaggagtacttcgcctgcgtgagcagcggcaacagcaacgccaacagccggggccccagcttctctagcggcctggtgccactgtccctgagagggagccacatgggccccatggagatctacaaaaccgtgagcgcctggaagcggcagcctgtgcgcgtgctgagcctgtttcggaatatcgataaagtcctgaaaagcctgggattcctggagagcggctctggctccggcggtggcaccctgaagtacgtggaggatgtgacaaacgtggtcagacgggatgtggagaagtggggccccttcgatctggtgtacggcagcacccaacccctgggcagctcttgtgaccggtgccctggctggtacatgtttcagttccaccggatcctgcagtacgccctgccgagacaggagtcccagcggccattcttttggattttcatggacaacttgctgctgaccgaggatgaccaggaaactaccactcggttcctgcagaccgaagccgtgaccctgcaggacgtgagaggccgggactaccagaacgccatgcgggtgtggtccaacatccctggactgaaaagcaagcacgcacctctgacccctaaagaagaggagtacctgcaggcccaggtgcggagcagaagcaagctggacgcccctaaggtggatctgctggtgaagaattgcctcctgcccctgagagagtacttcaagtatttcagccagaatagtctgcccctgggcggcccaagcagcggcgcccctcctcccagcggcggcagcccagccggctccccaacctctaccgaggagggcacctctgagtccgccacccccgagagcggccctggcacctccaccgagcccagcgagggcagcgcacccggcagccctgccggcagccccacctccacagaggagggaaccagcaccgagcccagcgaaggcagcgccccaggcaccagcaccgagcctagtgagggcggctctggcggcggcagcgcccaggagattaaacggatcaacaagatcagaagaagacttgtgaaagacagcaacaccaagaaggccggcaagacaggccccatgaaaaccctgctggttagagtgatgacacccgatctgagagagcggctggaaaacctgagaaagaagcctgaaaatatcccccagcccatcagcaatacatctagagccaacctgaataagctgctgaccgattacaccgaaatgaagaaggcgatcctgcatgtgtactgggaagagttccagaaggaccctgtgggcctgatgagccgggtggcccagcctgccagcaagaagatcgatcagaacaagctgaaacctgagatggacgagaagggcaacctgaccaccgccggctttgcctgctctcagtgtggccagcccctgttcgtgtacaagctggagcaggtgtctgagaagggcaaggcttacaccaactacttcggacggtgcaatgtggccgagcacgaaaagctgatcctgctggcccagctgaagcccgagaaggatagcgacgaagccgtgacatatagcctgggaaagtttgggcagagggccctggatttctacagcattcatgtgaccaaggagtccacccaccccgtgaagcccctggcccagatcgccggaaacagatacgcctccggacctgtgggaaaggccctgagcgacgcatgtatgggcacaatcgcctccttcctgtctaagtaccaggacatcatcatcgaacaccagaaggtggtgaagggcaaccagaagagactggagagcctgcgggagctggccggcaaggaaaacctggaataccctagcgtgaccctgccacctcagcctcacaccaaggagggcgttgatgcctacaacgaagtgatcgcccgggtgcgaatgtgggtgaacctgaacctgtggcagaagctgaagctaagcagagatgatgccaagcctctgctgagactgaagggattcccttcctttcctctggtcgagagacaggccaacgaagtggactggtgggacatggtgtgtaacgtgaagaagctgatcaacgagaaaaaggaggatggcaaggtgttttggcagaatctggctggctacaagagacaggaagccctgagaccatacctgagcagcgaggaagatcggaagaagggaaagaaattcgctcggtaccagctgggcgacctgctgctgcacctggaaaagaagcacggcgaggactggggaaaggtgtacgacgaggcctgggagcggattgacaagaaagtggaaggcctgagcaagcacatcaagctggaagaggaacggagaagcgaggacgcccagagcaaggccgccctgaccgactggctgcgggctaaggccagcttcgtgatcgagggcctgaaggaggccgacaaggacgagttctgcagatgcgagctgaagctgcagaagtggtacggggacctgcggggaaagcccttcgccatcgaagccgagaacagcatcctggacatcagcggcttcagcaagcagtacaactgtgccttcatctggcagaaggacggcgtgaagaagctgaacctgtacctgatcatcaactacttcaagggcggcaagctgcggttcaagaagatcaaacctgaagccttcgaagccaacagattctacaccgtgatcaacaaaaagagcggcgagatcgtgcccatggaggtgaacttcaacttcgacgaccccaacctgatcatcctgcctctggcctttggcaagagacagggcagagaattcatctggaacgacctgctgtccctggaaaccggcagcctgaagctggccaacggaagagtgatcgagaagacactgtacaacagaagaacccggcaggatgagcctgccctgttcgtggccctgaccttcgagcggcgggaggtcctggactcctccaatatcaaaccaatgaacctgatcggcgtggcaagaggcgaaaacatccccgccgtgatcgccctgaccgaccccgagggctgcccactgagccggtttaaggatagcctgggaaacccaacccacatcctgagaatcggcgagagctataaggagaagcagcggaccatccaggccaagaaggaggtggagcagcggagagccggcggctacagccggaagtacgccagcaaagccaagaatctggcagacgatatggtgagaaacaccgctagagatctgctgtactacgccgtgacccaggatgccatgctgatcttcgccaacctgagccggggcttcggccggcagggcaagcggaccttcatggccgagagacagtacacacggatggaggactggctgaccgccaagctggcctacgagggcctgagcaagacctacctgtccaagacactggcccagtacacctccaagacatgcagcaactgtgggtttaccatcaccagcgccgactacgacagggtgctggagaagctgaagaagacagcaacaggctggatgaccacaattaacggcaaggagctgaaggtggagggccagattacctactacaacagatacaagagacagaacgtagtcaaggacctgtccgtcgagctggatagactgagcgaagaatctgtgaacaacgacatctcctcctggacaaagggcagaagcggagaagctctgagcctcctgaagaaaagattctcccatagacccgtgcaggagaagttcgtgtgcctgaactgcggcttcgagacacacgcagccgagcaagccgccctgaacatcgccagatcctggctgttcctgcggagccaggagtacaagaaataccagacaaacaagacaaccggcaacaccgataagagagccttcgtcgagacctggcagtccttttaccggaagaagcttaaggaggtgtggaaacctgccgtgcggtctggcggatctggcggaggctccacaagcccccagaagagcgtgaccttcgaggacgtggccgtgtacttcacccaggccgagtgggacggcctgagccccgcccagaggaccctgtacagggacgtgatgctggagaactacggcaacgtggccagcctgggcttccccctgctgaagcccgccgtgatcagccagctggagggcggcggcgagctgggcggccccagccccctggccgccggcaccggcctgaggggcctgtggaccgtgaccagccccaagaaaaagagaaaagtctaagctgccttctgcggggcttgccttctggccatgcccttcttctctcccttgcacctgtacctcttggtctttgaataaagcctgagtaggaaggctagcaaaaaaaaaaaaaaaaaaaaaaaaaaaaaaaaaaaaaaaaaaaaaaaaaaaaaaaaaaaaaaaaaaaaaaaaaaaaaaaa

SEQ ID NO: 2687 - RNA, 5419 nt, synthetic construct
  source 1..5419: mol_type = other RNA
aggaaataagagagaaaagaagagtaagaagaaatataagagccaccatggcccctaagaagaagcgtaaagtgagccgggtgaacggcagcggcagcggcggcggcatgaaccacgaccaggagttcgacccccctaaggtgtaccctcccgtccccgccgagaagagaaagcccatccgggtcctgagcctgttcgatggcatcgccaccggtctgctggtgctgaaggacctgggcatccaggtggataggtacattgcctccgaggtgtgcgaggactccatcaccgtgggaatggtgcgtcatcagggcaagatcatgtacgtgggcgacgtgcggagcgtgacacagaagcatatccaggagtggggccctttcgacctggtgatcggcggcagcccttgcaatgacctgagcatcgtgaacccagcccggaagggcctgtacgagggaaccggcagactgttcttcgagttttacagactgctgcacgacgcccggcctaaggaaggcgacgaccggcccttcttttggctgttcgagaatgtggtggccatgggagtcagcgacaagcgggatattagccggttcctggagagcaaccccgtgatgatcgatgccaaggaagtgagcgccgcccaccgggccagatacttctggggcaatctgcctggcatgaacagacccctggccagcaccgtgaacgacaagctggagctgcaggagtgcctggagcacggccggatcgccaagttcagcaaggtgagaaccatcaccacccgaagcaacagcatcaaacaaggcaaggaccagcactttcctgtgttcatgaacgagaaggaggacatcctgtggtgtaccgagatggagagagtgttcgggttcccagtccactacacagatgtcagcaacatgtctagactggccagacagagactgctgggaagaagctggtccgtccctgtgatcagacacctgttcgcccctctgaaggagtacttcgcctgcgtgagcagcggcaacagcaacgccaacagccggggccccagcttctctagcggcctggtgccactgtccctgagagggagccacatgggccccatggagatctacaaaaccgtgagcgcctggaagcggcagcctgtgcgcgtgctgagcctgtttcggaatatcgataaagtcctgaaaagcctgggattcctggagagcggctctggctccggcggtggcaccctgaagtacgtggaggatgtgacaaacgtggtcagacgggatgtggagaagtggggccccttcgatctggtgtacggcagcacccaacccctgggcagctcttgtgaccggtgccctggctggtacatgtttcagttccaccggatcctgcagtacgccctgccgagacaggagtcccagcggccattcttttggattttcatggacaacttgctgctgaccgaggatgaccaggaaactaccactcggttcctgcagaccgaagccgtgaccctgcaggacgtgagaggccgggactaccagaacgccatgcgggtgtggtccaacatccctggactgaaaagcaagcacgcacctctgacccctaaagaagaggagtacctgcaggcccaggtgcggagcagaagcaagctggacgcccctaaggtggatctgctggtgaagaattgcctcctgcccctgagagagtacttcaagtatttcagccagaatagtctgcccctgggcggcccaagcagcggcgcccctcctcccagcggcggcagcccagccggctccccaacctctaccgaggagggcacctctgagtccgccacccccgagagcggccctggcacctccaccgagcccagcgagggcagcgcacccggcagccctgccggcagccccacctccacagaggagggaaccagcaccgagcccagcgaaggcagcgccccaggcaccagcaccgagcctagtgagggcggctctggcggcggcagcgcccaggagattaaacggatcaacaagatcagaagaagacttgtgaaagacagcaacaccaagaaggccggcaagacaggccccatgaaaaccctgctggttagagtgatgacacccgatctgagagagcggctggaaaacctgagaaagaagcctgaaaatatcccccagcccatcagcaatacatctagagccaacctgaataagctgctgaccgattacaccgaaatgaagaaggcgatcctgcatgtgtactgggaagagttccagaaggaccctgtgggcctgatgagccgggtggcccagcctgccagcaagaagatcgatcagaacaagctgaaacctgagatggacgagaagggcaacctgaccaccgccggctttgcctgctctcagtgtggccagcccctgttcgtgtacaagctggagcaggtgtctgagaagggcaaggcttacaccaactacttcggacggtgcaatgtggccgagcacgaaaagctgatcctgctggcccagctgaagcccgagaaggatagcgacgaagccgtgacatatagcctgggaaagtttgggcagagggccctggatttctacagcattcatgtgaccaaggagtccacccaccccgtgaagcccctggcccagatcgccggaaacagatacgcctccggacctgtgggaaaggccctgagcgacgcatgtatgggcacaatcgcctccttcctgtctaagtaccaggacatcatcatcgaacaccagaaggtggtgaagggcaaccagaagagactggagagcctgcgggagctggccggcaaggaaaacctggaataccctagcgtgaccctgccacctcagcctcacaccaaggagggcgttgatgcctacaacgaagtgatcgcccgggtgcgaatgtgggtgaacctgaacctgtggcagaagctgaagctaagcagagatgatgccaagcctctgctgagactgaagggattcccttcctttcctctggtcgagagacaggccaacgaagtggactggtgggacatggtgtgtaacgtgaagaagctgatcaacgagaaaaaggaggatggcaaggtgttttggcagaatctggctggctacaagagacaggaagccctgagaccatacctgagcagcgaggaagatcggaagaagggaaagaaattcgctcggtaccagctgggcgacctgctgctgcacctggaaaagaagcacggcgaggactggggaaaggtgtacgacgaggcctgggagcggattgacaagaaagtggaaggcctgagcaagcacatcaagctggaagaggaacggagaagcgaggacgcccagagcaaggccgccctgaccgactggctgcgggctaaggccagcttcgtgatcgagggcctgaaggaggccgacaaggacgagttctgcagatgcgagctgaagctgcagaagtggtacggggacctgcggggaaagcccttcgccatcgaagccgagaacagcatcctggacatcagcggcttcagcaagcagtacaactgtgccttcatctggcagaaggacggcgtgaagaagctgaacctgtacctgatcatcaactacttcaagggcggcaagctgcggttcaagaagatcaaacctgaagccttcgaagccaacagattctacaccgtgatcaacaaaaagagcggcgagatcgtgcccatggaggtgaacttcaacttcgacgaccccaacctgatcatcctgcctctggcctttggcaagagacagggcagagaattcatctggaacgacctgctgtccctggaaaccggcagcctgaagctggccaacggaagagtgatcgagaagacactgtacaacagaagaacccggcaggatgagcctgccctgttcgtggccctgaccttcgagcggcgggaggtcctggactcctccaatatcaaaccaatgaacctgatcggcgtggcaagaggcgaaaacatccccgccgtgatcgccctgaccgaccccgagggctgcccactgagccggtttaaggatagcctgggaaacccaacccacatcctgagaatcggcgagagctataaggagaagcagcggaccatccaggccaagaaggaggtggagcagcggagagccggcggctacagccggaagtacgccagcaaagccaagaatctggcagacgatatggtgagaaacaccgctagagatctgctgtactacgccgtgacccaggatgccatgctgatcttcgccaacctgagccggggcttcggccggcagggcaagcggaccttcatggccgagagacagtacacacggatggaggactggctgaccgccaagctggcctacgagggcctgagcaagacctacctgtccaagacactggcccagtacacctccaagacatgcagcaactgtgggtttaccatcaccagcgccgactacgacagggtgctggagaagctgaagaagacagcaacaggctggatgaccacaattaacggcaaggagctgaaggtggagggccagattacctactacaacagatacaagagacagaacgtagtcaaggacctgtccgtcgagctggatagactgagcgaagaatctgtgaacaacgacatctcctcctggacaaagggcagaagcggagaagctctgagcctcctgaagaaaagattctcccatagacccgtgcaggagaagttcgtgtgcctgaactgcggcttcgagacacacgcagccgagcaagccgccctgaacatcgccagatcctggctgttcctgcggagccaggagtacaagaaataccagacaaacaagacaaccggcaacaccgataagagagccttcgtcgagacctggcagtccttttaccggaagaagcttaaggaggtgtggaaacctgccgtgcggtctggcggatctggcggaggctccacaagcatggccttcgaggacgtggccgtgtacttcagccaggaggagtgggtgttcctggacgccgcccagagggccctgtacaggcacgtgatgctggagaacttcgccctggtggacagcatcggcctgagcatcagcaggcccagggtgatcatccagctgcagaggggcgaggagccctgggtgagcaacaggaccaacaccggccccggcaggggcaccaggaggaggcccagcctgggcagcaccagccccaagaaaaagagaaaagtctaagctgccttctgcggggcttgccttctggccatgcccttcttctctcccttgcacctgtacctcttggtctttgaataaagcctgagtaggaaggctagcaaaaaaaaaaaaaaaaaaaaaaaaaaaaaaaaaaaaaaaaaaaaaaaaaaaaaaaaaaaaaaaaaaaaaaaaaaaaaaaa

SEQ ID NO: 2688 - RNA, 5419 nt, synthetic construct
  source 1..5419: mol_type = other RNA
aggaaataagagagaaaagaagagtaagaagaaatataagagccaccatggcccctaagaagaagcgtaaagtgagccgggtgaacggcagcggcagcggcggcggcatgaaccacgaccaggagttcgacccccctaaggtgtaccctcccgtccccgccgagaagagaaagcccatccgggtcctgagcctgttcgatggcatcgccaccggtctgctggtgctgaaggacctgggcatccaggtggataggtacattgcctccgaggtgtgcgaggactccatcaccgtgggaatggtgcgtcatcagggcaagatcatgtacgtgggcgacgtgcggagcgtgacacagaagcatatccaggagtggggccctttcgacctggtgatcggcggcagcccttgcaatgacctgagcatcgtgaacccagcccggaagggcctgtacgagggaaccggcagactgttcttcgagttttacagactgctgcacgacgcccggcctaaggaaggcgacgaccggcccttcttttggctgttcgagaatgtggtggccatgggagtcagcgacaagcgggatattagccggttcctggagagcaaccccgtgatgatcgatgccaaggaagtgagcgccgcccaccgggccagatacttctggggcaatctgcctggcatgaacagacccctggccagcaccgtgaacgacaagctggagctgcaggagtgcctggagcacggccggatcgccaagttcagcaaggtgagaaccatcaccacccgaagcaacagcatcaaacaaggcaaggaccagcactttcctgtgttcatgaacgagaaggaggacatcctgtggtgtaccgagatggagagagtgttcgggttcccagtccactacacagatgtcagcaacatgtctagactggccagacagagactgctgggaagaagctggtccgtccctgtgatcagacacctgttcgcccctctgaaggagtacttcgcctgcgtgagcagcggcaacagcaacgccaacagccggggccccagcttctctagcggcctggtgccactgtccctgagagggagccacatgggccccatggagatctacaaaaccgtgagcgcctggaagcggcagcctgtgcgcgtgctgagcctgtttcggaatatcgataaagtcctgaaaagcctgggattcctggagagcggctctggctccggcggtggcaccctgaagtacgtggaggatgtgacaaacgtggtcagacgggatgtggagaagtggggccccttcgatctggtgtacggcagcacccaacccctgggcagctcttgtgaccggtgccctggctggtacatgtttcagttccaccggatcctgcagtacgccctgccgagacaggagtcccagcggccattcttttggattttcatggacaacttgctgctgaccgaggatgaccaggaaactaccactcggttcctgcagaccgaagccgtgaccctgcaggacgtgagaggccgggactaccagaacgccatgcgggtgtggtccaacatccctggactgaaaagcaagcacgcacctctgacccctaaagaagaggagtacctgcaggcccaggtgcggagcagaagcaagctggacgcccctaaggtggatctgctggtgaagaattgcctcctgcccctgagagagtacttcaagtatttcagccagaatagtctgcccctgggcggcccaagcagcggcgcccctcctcccagcggcggcagcccagccggctccccaacctctaccgaggagggcacctctgagtccgccacccccgagagcggccctggcacctccaccgagcccagcgagggcagcgcacccggcagccctgccggcagccccacctccacagaggagggaaccagcaccgagcccagcgaaggcagcgccccaggcaccagcaccgagcctagtgagggcggctctggcggcggcagcgcccaggagattaaacggatcaacaagatcagaagaagacttgtgaaagacagcaacaccaagaaggccggcaagacaggccccatgaaaaccctgctggttagagtgatgacacccgatctgagagagcggctggaaaacctgagaaagaagcctgaaaatatcccccagcccatcagcaatacatctagagccaacctgaataagctgctgaccgattacaccgaaatgaagaaggcgatcctgcatgtgtactgggaagagttccagaaggaccctgtgggcctgatgagccgggtggcccagcctgccagcaagaagatcgatcagaacaagctgaaacctgagatggacgagaagggcaacctgaccaccgccggctttgcctgctctcagtgtggccagcccctgttcgtgtacaagctggagcaggtgtctgagaagggcaaggcttacaccaactacttcggacggtgcaatgtggccgagcacgaaaagctgatcctgctggcccagctgaagcccgagaaggatagcgacgaagccgtgacatatagcctgggaaagtttgggcagagggccctggatttctacagcattcatgtgaccaaggagtccacccaccccgtgaagcccctggcccagatcgccggaaacagatacgcctccggacctgtgggaaaggccctgagcgacgcatgtatgggcacaatcgcctccttcctgtctaagtaccaggacatcatcatcgaacaccagaaggtggtgaagggcaaccagaagagactggagagcctgcgggagctggccggcaaggaaaacctggaataccctagcgtgaccctgccacctcagcctcacaccaaggagggcgttgatgcctacaacgaagtgatcgcccgggtgcgaatgtgggtgaacctgaacctgtggcagaagctgaagctaagcagagatgatgccaagcctctgctgagactgaagggattcccttcctttcctctggtcgagagacaggccaacgaagtggactggtgggacatggtgtgtaacgtgaagaagctgatcaacgagaaaaaggaggatggcaaggtgttttggcagaatctggctggctacaagagacaggaagccctgagaccatacctgagcagcgaggaagatcggaagaagggaaagaaattcgctcggtaccagctgggcgacctgctgctgcacctggaaaagaagcacggcgaggactggggaaaggtgtacgacgaggcctgggagcggattgacaagaaagtggaaggcctgagcaagcacatcaagctggaagaggaacggagaagcgaggacgcccagagcaaggccgccctgaccgactggctgcgggctaaggccagcttcgtgatcgagggcctgaaggaggccgacaaggacgagttctgcagatgcgagctgaagctgcagaagtggtacggggacctgcggggaaagcccttcgccatcgaagccgagaacagcatcctggacatcagcggcttcagcaagcagtacaactgtgccttcatctggcagaaggacggcgtgaagaagctgaacctgtacctgatcatcaactacttcaagggcggcaagctgcggttcaagaagatcaaacctgaagccttcgaagccaacagattctacaccgtgatcaacaaaaagagcggcgagatcgtgcccatggaggtgaacttcaacttcgacgaccccaacctgatcatcctgcctctggcctttggcaagagacagggcagagaattcatctggaacgacctgctgtccctggaaaccggcagcctgaagctggccaacggaagagtgatcgagaagacactgtacaacagaagaacccggcaggatgagcctgccctgttcgtggccctgaccttcgagcggcgggaggtcctggactcctccaatatcaaaccaatgaacctgatcggcgtggcaagaggcgaaaacatccccgccgtgatcgccctgaccgaccccgagggctgcccactgagccggtttaaggatagcctgggaaacccaacccacatcctgagaatcggcgagagctataaggagaagcagcggaccatccaggccaagaaggaggtggagcagcggagagccggcggctacagccggaagtacgccagcaaagccaagaatctggcagacgatatggtgagaaacaccgctagagatctgctgtactacgccgtgacccaggatgccatgctgatcttcgccaacctgagccggggcttcggccggcagggcaagcggaccttcatggccgagagacagtacacacggatggaggactggctgaccgccaagctggcctacgagggcctgagcaagacctacctgtccaagacactggcccagtacacctccaagacatgcagcaactgtgggtttaccatcaccagcgccgactacgacagggtgctggagaagctgaagaagacagcaacaggctggatgaccacaattaacggcaaggagctgaaggtggagggccagattacctactacaacagatacaagagacagaacgtagtcaaggacctgtccgtcgagctggatagactgagcgaagaatctgtgaacaacgacatctcctcctggacaaagggcagaagcggagaagctctgagcctcctgaagaaaagattctcccatagacccgtgcaggagaagttcgtgtgcctgaactgcggcttcgagacacacgcagccgagcaagccgccctgaacatcgccagatcctggctgttcctgcggagccaggagtacaagaaataccagacaaacaagacaaccggcaacaccgataagagagccttcgtcgagacctggcagtccttttaccggaagaagcttaaggaggtgtggaaacctgccgtgcggtctggcggatctggcggaggctccacaagcgcccacggcagcgtgatgttcaacgacgtgagcatcgtgttcagccaggaggagtgggagtacctggacctggagcagagggacctgtacagggacgtgatgctggagaactacagcaacctggtgagcctgggctgcttcatcagcaagcccgacgtgatcagcctgctggagcagggcaaggagccctggaaggtggtgaggaagggcaggaggcagtaccccgacctggagaccaggtacaccagccccaagaaaaagagaaaagtctaagctgccttctgcggggcttgccttctggccatgcccttcttctctcccttgcacctgtacctcttggtctttgaataaagcctgagtaggaaggctagcaaaaaaaaaaaaaaaaaaaaaaaaaaaaaaaaaaaaaaaaaaaaaaaaaaaaaaaaaaaaaaaaaaaaaaaaaaaaaaaa

SEQ ID NO: 2689 - RNA, 5419 nt, synthetic construct
  source 1..5419: mol_type = other RNA
aggaaataagagagaaaagaagagtaagaagaaatataagagccaccatggcccctaagaagaagcgtaaagtgagccgggtgaacggcagcggcagcggcggcggcatgaaccacgaccaggagttcgacccccctaaggtgtaccctcccgtccccgccgagaagagaaagcccatccgggtcctgagcctgttcgatggcatcgccaccggtctgctggtgctgaaggacctgggcatccaggtggataggtacattgcctccgaggtgtgcgaggactccatcaccgtgggaatggtgcgtcatcagggcaagatcatgtacgtgggcgacgtgcggagcgtgacacagaagcatatccaggagtggggccctttcgacctggtgatcggcggcagcccttgcaatgacctgagcatcgtgaacccagcccggaagggcctgtacgagggaaccggcagactgttcttcgagttttacagactgctgcacgacgcccggcctaaggaaggcgacgaccggcccttcttttggctgttcgagaatgtggtggccatgggagtcagcgacaagcgggatattagccggttcctggagagcaaccccgtgatgatcgatgccaaggaagtgagcgccgcccaccgggccagatacttctggggcaatctgcctggcatgaacagacccctggccagcaccgtgaacgacaagctggagctgcaggagtgcctggagcacggccggatcgccaagttcagcaaggtgagaaccatcaccacccgaagcaacagcatcaaacaaggcaaggaccagcactttcctgtgttcatgaacgagaaggaggacatcctgtggtgtaccgagatggagagagtgttcgggttcccagtccactacacagatgtcagcaacatgtctagactggccagacagagactgctgggaagaagctggtccgtccctgtgatcagacacctgttcgcccctctgaaggagtacttcgcctgcgtgagcagcggcaacagcaacgccaacagccggggccccagcttctctagcggcctggtgccactgtccctgagagggagccacatgggccccatggagatctacaaaaccgtgagcgcctggaagcggcagcctgtgcgcgtgctgagcctgtttcggaatatcgataaagtcctgaaaagcctgggattcctggagagcggctctggctccggcggtggcaccctgaagtacgtggaggatgtgacaaacgtggtcagacgggatgtggagaagtggggccccttcgatctggtgtacggcagcacccaacccctgggcagctcttgtgaccggtgccctggctggtacatgtttcagttccaccggatcctgcagtacgccctgccgagacaggagtcccagcggccattcttttggattttcatggacaacttgctgctgaccgaggatgaccaggaaactaccactcggttcctgcagaccgaagccgtgaccctgcaggacgtgagaggccgggactaccagaacgccatgcgggtgtggtccaacatccctggactgaaaagcaagcacgcacctctgacccctaaagaagaggagtacctgcaggcccaggtgcggagcagaagcaagctggacgcccctaaggtggatctgctggtgaagaattgcctcctgcccctgagagagtacttcaagtatttcagccagaatagtctgcccctgggcggcccaagcagcggcgcccctcctcccagcggcggcagcccagccggctccccaacctctaccgaggagggcacctctgagtccgccacccccgagagcggccctggcacctccaccgagcccagcgagggcagcgcacccggcagccctgccggcagccccacctccacagaggagggaaccagcaccgagcccagcgaaggcagcgccccaggcaccagcaccgagcctagtgagggcggctctggcggcggcagcgcccaggagattaaacggatcaacaagatcagaagaagacttgtgaaagacagcaacaccaagaaggccggcaagacaggccccatgaaaaccctgctggttagagtgatgacacccgatctgagagagcggctggaaaacctgagaaagaagcctgaaaatatcccccagcccatcagcaatacatctagagccaacctgaataagctgctgaccgattacaccgaaatgaagaaggcgatcctgcatgtgtactgggaagagttccagaaggaccctgtgggcctgatgagccgggtggcccagcctgccagcaagaagatcgatcagaacaagctgaaacctgagatggacgagaagggcaacctgaccaccgccggctttgcctgctctcagtgtggccagcccctgttcgtgtacaagctggagcaggtgtctgagaagggcaaggcttacaccaactacttcggacggtgcaatgtggccgagcacgaaaagctgatcctgctggcccagctgaagcccgagaaggatagcgacgaagccgtgacatatagcctgggaaagtttgggcagagggccctggatttctacagcattcatgtgaccaaggagtccacccaccccgtgaagcccctggcccagatcgccggaaacagatacgcctccggacctgtgggaaaggccctgagcgacgcatgtatgggcacaatcgcctccttcctgtctaagtaccaggacatcatcatcgaacaccagaaggtggtgaagggcaaccagaagagactggagagcctgcgggagctggccggcaaggaaaacctggaataccctagcgtgaccctgccacctcagcctcacaccaaggagggcgttgatgcctacaacgaagtgatcgcccgggtgcgaatgtgggtgaacctgaacctgtggcagaagctgaagctaagcagagatgatgccaagcctctgctgagactgaagggattcccttcctttcctctggtcgagagacaggccaacgaagtggactggtgggacatggtgtgtaacgtgaagaagctgatcaacgagaaaaaggaggatggcaaggtgttttggcagaatctggctggctacaagagacaggaagccctgagaccatacctgagcagcgaggaagatcggaagaagggaaagaaattcgctcggtaccagctgggcgacctgctgctgcacctggaaaagaagcacggcgaggactggggaaaggtgtacgacgaggcctgggagcggattgacaagaaagtggaaggcctgagcaagcacatcaagctggaagaggaacggagaagcgaggacgcccagagcaaggccgccctgaccgactggctgcgggctaaggccagcttcgtgatcgagggcctgaaggaggccgacaaggacgagttctgcagatgcgagctgaagctgcagaagtggtacggggacctgcggggaaagcccttcgccatcgaagccgagaacagcatcctggacatcagcggcttcagcaagcagtacaactgtgccttcatctggcagaaggacggcgtgaagaagctgaacctgtacctgatcatcaactacttcaagggcggcaagctgcggttcaagaagatcaaacctgaagccttcgaagccaacagattctacaccgtgatcaacaaaaagagcggcgagatcgtgcccatggaggtgaacttcaacttcgacgaccccaacctgatcatcctgcctctggcctttggcaagagacagggcagagaattcatctggaacgacctgctgtccctggaaaccggcagcctgaagctggccaacggaagagtgatcgagaagacactgtacaacagaagaacccggcaggatgagcctgccctgttcgtggccctgaccttcgagcggcgggaggtcctggactcctccaatatcaaaccaatgaacctgatcggcgtggcaagaggcgaaaacatccccgccgtgatcgccctgaccgaccccgagggctgcccactgagccggtttaaggatagcctgggaaacccaacccacatcctgagaatcggcgagagctataaggagaagcagcggaccatccaggccaagaaggaggtggagcagcggagagccggcggctacagccggaagtacgccagcaaagccaagaatctggcagacgatatggtgagaaacaccgctagagatctgctgtactacgccgtgacccaggatgccatgctgatcttcgccaacctgagccggggcttcggccggcagggcaagcggaccttcatggccgagagacagtacacacggatggaggactggctgaccgccaagctggcctacgagggcctgagcaagacctacctgtccaagacactggcccagtacacctccaagacatgcagcaactgtgggtttaccatcaccagcgccgactacgacagggtgctggagaagctgaagaagacagcaacaggctggatgaccacaattaacggcaaggagctgaaggtggagggccagattacctactacaacagatacaagagacagaacgtagtcaaggacctgtccgtcgagctggatagactgagcgaagaatctgtgaacaacgacatctcctcctggacaaagggcagaagcggagaagctctgagcctcctgaagaaaagattctcccatagacccgtgcaggagaagttcgtgtgcctgaactgcggcttcgagacacacgcagccgagcaagccgccctgaacatcgccagatcctggctgttcctgcggagccaggagtacaagaaataccagacaaacaagacaaccggcaacaccgataagagagccttcgtcgagacctggcagtccttttaccggaagaagcttaaggaggtgtggaaacctgccgtgcggtctggcggatctggcggaggctccacaagcgcccacggcagcgtgatgttcaacgacgtgagcatcgtgttcagccaggaggagtgggagtacctggacctggagcagagggacctgtacagggacgtgatgctggagaactacagcaacctggtgagcctgggctgcttcatcagcaagcccgacgtgatcagcctgctggagcagggcaaggagccctggaaggtggtgaggaagggcaggaggaggtaccccgacctggagaccaggtacaccagccccaagaaaaagagaaaagtctaagctgccttctgcggggcttgccttctggccatgcccttcttctctcccttgcacctgtacctcttggtctttgaataaagcctgagtaggaaggctagcaaaaaaaaaaaaaaaaaaaaaaaaaaaaaaaaaaaaaaaaaaaaaaaaaaaaaaaaaaaaaaaaaaaaaaaaaaaaaaaa

SEQ ID NO: 2690 - RNA, 5419 nt, synthetic construct
  source 1..5419: mol_type = other RNA
aggaaataagagagaaaagaagagtaagaagaaatataagagccaccatggcccctaagaagaagcgtaaagtgagccgggtgaacggcagcggcagcggcggcggcatgaaccacgaccaggagttcgacccccctaaggtgtaccctcccgtccccgccgagaagagaaagcccatccgggtcctgagcctgttcgatggcatcgccaccggtctgctggtgctgaaggacctgggcatccaggtggataggtacattgcctccgaggtgtgcgaggactccatcaccgtgggaatggtgcgtcatcagggcaagatcatgtacgtgggcgacgtgcggagcgtgacacagaagcatatccaggagtggggccctttcgacctggtgatcggcggcagcccttgcaatgacctgagcatcgtgaacccagcccggaagggcctgtacgagggaaccggcagactgttcttcgagttttacagactgctgcacgacgcccggcctaaggaaggcgacgaccggcccttcttttggctgttcgagaatgtggtggccatgggagtcagcgacaagcgggatattagccggttcctggagagcaaccccgtgatgatcgatgccaaggaagtgagcgccgcccaccgggccagatacttctggggcaatctgcctggcatgaacagacccctggccagcaccgtgaacgacaagctggagctgcaggagtgcctggagcacggccggatcgccaagttcagcaaggtgagaaccatcaccacccgaagcaacagcatcaaacaaggcaaggaccagcactttcctgtgttcatgaacgagaaggaggacatcctgtggtgtaccgagatggagagagtgttcgggttcccagtccactacacagatgtcagcaacatgtctagactggccagacagagactgctgggaagaagctggtccgtccctgtgatcagacacctgttcgcccctctgaaggagtacttcgcctgcgtgagcagcggcaacagcaacgccaacagccggggccccagcttctctagcggcctggtgccactgtccctgagagggagccacatgggccccatggagatctacaaaaccgtgagcgcctggaagcggcagcctgtgcgcgtgctgagcctgtttcggaatatcgataaagtcctgaaaagcctgggattcctggagagcggctctggctccggcggtggcaccctgaagtacgtggaggatgtgacaaacgtggtcagacgggatgtggagaagtggggccccttcgatctggtgtacggcagcacccaacccctgggcagctcttgtgaccggtgccctggctggtacatgtttcagttccaccggatcctgcagtacgccctgccgagacaggagtcccagcggccattcttttggattttcatggacaacttgctgctgaccgaggatgaccaggaaactaccactcggttcctgcagaccgaagccgtgaccctgcaggacgtgagaggccgggactaccagaacgccatgcgggtgtggtccaacatccctggactgaaaagcaagcacgcacctctgacccctaaagaagaggagtacctgcaggcccaggtgcggagcagaagcaagctggacgcccctaaggtggatctgctggtgaagaattgcctcctgcccctgagagagtacttcaagtatttcagccagaatagtctgcccctgggcggcccaagcagcggcgcccctcctcccagcggcggcagcccagccggctccccaacctctaccgaggagggcacctctgagtccgccacccccgagagcggccctggcacctccaccgagcccagcgagggcagcgcacccggcagccctgccggcagccccacctccacagaggagggaaccagcaccgagcccagcgaaggcagcgccccaggcaccagcaccgagcctagtgagggcggctctggcggcggcagcgcccaggagattaaacggatcaacaagatcagaagaagacttgtgaaagacagcaacaccaagaaggccggcaagacaggccccatgaaaaccctgctggttagagtgatgacacccgatctgagagagcggctggaaaacctgagaaagaagcctgaaaatatcccccagcccatcagcaatacatctagagccaacctgaataagctgctgaccgattacaccgaaatgaagaaggcgatcctgcatgtgtactgggaagagttccagaaggaccctgtgggcctgatgagccgggtggcccagcctgccagcaagaagatcgatcagaacaagctgaaacctgagatggacgagaagggcaacctgaccaccgccggctttgcctgctctcagtgtggccagcccctgttcgtgtacaagctggagcaggtgtctgagaagggcaaggcttacaccaactacttcggacggtgcaatgtggccgagcacgaaaagctgatcctgctggcccagctgaagcccgagaaggatagcgacgaagccgtgacatatagcctgggaaagtttgggcagagggccctggatttctacagcattcatgtgaccaaggagtccacccaccccgtgaagcccctggcccagatcgccggaaacagatacgcctccggacctgtgggaaaggccctgagcgacgcatgtatgggcacaatcgcctccttcctgtctaagtaccaggacatcatcatcgaacaccagaaggtggtgaagggcaaccagaagagactggagagcctgcgggagctggccggcaaggaaaacctggaataccctagcgtgaccctgccacctcagcctcacaccaaggagggcgttgatgcctacaacgaagtgatcgcccgggtgcgaatgtgggtgaacctgaacctgtggcagaagctgaagctaagcagagatgatgccaagcctctgctgagactgaagggattcccttcctttcctctggtcgagagacaggccaacgaagtggactggtgggacatggtgtgtaacgtgaagaagctgatcaacgagaaaaaggaggatggcaaggtgttttggcagaatctggctggctacaagagacaggaagccctgagaccatacctgagcagcgaggaagatcggaagaagggaaagaaattcgctcggtaccagctgggcgacctgctgctgcacctggaaaagaagcacggcgaggactggggaaaggtgtacgacgaggcctgggagcggattgacaagaaagtggaaggcctgagcaagcacatcaagctggaagaggaacggagaagcgaggacgcccagagcaaggccgccctgaccgactggctgcgggctaaggccagcttcgtgatcgagggcctgaaggaggccgacaaggacgagttctgcagatgcgagctgaagctgcagaagtggtacggggacctgcggggaaagcccttcgccatcgaagccgagaacagcatcctggacatcagcggcttcagcaagcagtacaactgtgccttcatctggcagaaggacggcgtgaagaagctgaacctgtacctgatcatcaactacttcaagggcggcaagctgcggttcaagaagatcaaacctgaagccttcgaagccaacagattctacaccgtgatcaacaaaaagagcggcgagatcgtgcccatggaggtgaacttcaacttcgacgaccccaacctgatcatcctgcctctggcctttggcaagagacagggcagagaattcatctggaacgacctgctgtccctggaaaccggcagcctgaagctggccaacggaagagtgatcgagaagacactgtacaacagaagaacccggcaggatgagcctgccctgttcgtggccctgaccttcgagcggcgggaggtcctggactcctccaatatcaaaccaatgaacctgatcggcgtggcaagaggcgaaaacatccccgccgtgatcgccctgaccgaccccgagggctgcccactgagccggtttaaggatagcctgggaaacccaacccacatcctgagaatcggcgagagctataaggagaagcagcggaccatccaggccaagaaggaggtggagcagcggagagccggcggctacagccggaagtacgccagcaaagccaagaatctggcagacgatatggtgagaaacaccgctagagatctgctgtactacgccgtgacccaggatgccatgctgatcttcgccaacctgagccggggcttcggccggcagggcaagcggaccttcatggccgagagacagtacacacggatggaggactggctgaccgccaagctggcctacgagggcctgagcaagacctacctgtccaagacactggcccagtacacctccaagacatgcagcaactgtgggtttaccatcaccagcgccgactacgacagggtgctggagaagctgaagaagacagcaacaggctggatgaccacaattaacggcaaggagctgaaggtggagggccagattacctactacaacagatacaagagacagaacgtagtcaaggacctgtccgtcgagctggatagactgagcgaagaatctgtgaacaacgacatctcctcctggacaaagggcagaagcggagaagctctgagcctcctgaagaaaagattctcccatagacccgtgcaggagaagttcgtgtgcctgaactgcggcttcgagacacacgcagccgagcaagccgccctgaacatcgccagatcctggctgttcctgcggagccaggagtacaagaaataccagacaaacaagacaaccggcaacaccgataagagagccttcgtcgagacctggcagtccttttaccggaagaagcttaaggaggtgtggaaacctgccgtgcggtctggcggatctggcggaggctccacaagcgcccaccacctggtgatgttcagggacgtggccgtggacttcagccaggaggagtgggagtgcctgaacccctaccagaggaacctgtacagggacgtgatcctggagaactacagcaacctggtgagcgtggccggctgcagcatcagcaagcccgacgtgatcaccctgctggagcagggcaaggagccctggatggtggtgagggacgagaggaggaggagcctggacctggagagcaggaccagccccaagaaaaagagaaaagtctaagctgccttctgcggggcttgccttctggccatgcccttcttctctcccttgcacctgtacctcttggtctttgaataaagcctgagtaggaaggctagcaaaaaaaaaaaaaaaaaaaaaaaaaaaaaaaaaaaaaaaaaaaaaaaaaaaaaaaaaaaaaaaaaaaaaaaaaaaaaaaa

SEQ ID NO: 2691 - RNA, 5419 nt, synthetic construct
  source 1..5419: mol_type = other RNA
aggaaataagagagaaaagaagagtaagaagaaatataagagccaccatggcccctaagaagaagcgtaaagtgagccgggtgaacggcagcggcagcggcggcggcatgaaccacgaccaggagttcgacccccctaaggtgtaccctcccgtccccgccgagaagagaaagcccatccgggtcctgagcctgttcgatggcatcgccaccggtctgctggtgctgaaggacctgggcatccaggtggataggtacattgcctccgaggtgtgcgaggactccatcaccgtgggaatggtgcgtcatcagggcaagatcatgtacgtgggcgacgtgcggagcgtgacacagaagcatatccaggagtggggccctttcgacctggtgatcggcggcagcccttgcaatgacctgagcatcgtgaacccagcccggaagggcctgtacgagggaaccggcagactgttcttcgagttttacagactgctgcacgacgcccggcctaaggaaggcgacgaccggcccttcttttggctgttcgagaatgtggtggccatgggagtcagcgacaagcgggatattagccggttcctggagagcaaccccgtgatgatcgatgccaaggaagtgagcgccgcccaccgggccagatacttctggggcaatctgcctggcatgaacagacccctggccagcaccgtgaacgacaagctggagctgcaggagtgcctggagcacggccggatcgccaagttcagcaaggtgagaaccatcaccacccgaagcaacagcatcaaacaaggcaaggaccagcactttcctgtgttcatgaacgagaaggaggacatcctgtggtgtaccgagatggagagagtgttcgggttcccagtccactacacagatgtcagcaacatgtctagactggccagacagagactgctgggaagaagctggtccgtccctgtgatcagacacctgttcgcccctctgaaggagtacttcgcctgcgtgagcagcggcaacagcaacgccaacagccggggccccagcttctctagcggcctggtgccactgtccctgagagggagccacatgggccccatggagatctacaaaaccgtgagcgcctggaagcggcagcctgtgcgcgtgctgagcctgtttcggaatatcgataaagtcctgaaaagcctgggattcctggagagcggctctggctccggcggtggcaccctgaagtacgtggaggatgtgacaaacgtggtcagacgggatgtggagaagtggggccccttcgatctggtgtacggcagcacccaacccctgggcagctcttgtgaccggtgccctggctggtacatgtttcagttccaccggatcctgcagtacgccctgccgagacaggagtcccagcggccattcttttggattttcatggacaacttgctgctgaccgaggatgaccaggaaactaccactcggttcctgcagaccgaagccgtgaccctgcaggacgtgagaggccgggactaccagaacgccatgcgggtgtggtccaacatccctggactgaaaagcaagcacgcacctctgacccctaaagaagaggagtacctgcaggcccaggtgcggagcagaagcaagctggacgcccctaaggtggatctgctggtgaagaattgcctcctgcccctgagagagtacttcaagtatttcagccagaatagtctgcccctgggcggcccaagcagcggcgcccctcctcccagcggcggcagcccagccggctccccaacctctaccgaggagggcacctctgagtccgccacccccgagagcggccctggcacctccaccgagcccagcgagggcagcgcacccggcagccctgccggcagccccacctccacagaggagggaaccagcaccgagcccagcgaaggcagcgccccaggcaccagcaccgagcctagtgagggcggctctggcggcggcagcgcccaggagattaaacggatcaacaagatcagaagaagacttgtgaaagacagcaacaccaagaaggccggcaagacaggccccatgaaaaccctgctggttagagtgatgacacccgatctgagagagcggctggaaaacctgagaaagaagcctgaaaatatcccccagcccatcagcaatacatctagagccaacctgaataagctgctgaccgattacaccgaaatgaagaaggcgatcctgcatgtgtactgggaagagttccagaaggaccctgtgggcctgatgagccgggtggcccagcctgccagcaagaagatcgatcagaacaagctgaaacctgagatggacgagaagggcaacctgaccaccgccggctttgcctgctctcagtgtggccagcccctgttcgtgtacaagctggagcaggtgtctgagaagggcaaggcttacaccaactacttcggacggtgcaatgtggccgagcacgaaaagctgatcctgctggcccagctgaagcccgagaaggatagcgacgaagccgtgacatatagcctgggaaagtttgggcagagggccctggatttctacagcattcatgtgaccaaggagtccacccaccccgtgaagcccctggcccagatcgccggaaacagatacgcctccggacctgtgggaaaggccctgagcgacgcatgtatgggcacaatcgcctccttcctgtctaagtaccaggacatcatcatcgaacaccagaaggtggtgaagggcaaccagaagagactggagagcctgcgggagctggccggcaaggaaaacctggaataccctagcgtgaccctgccacctcagcctcacaccaaggagggcgttgatgcctacaacgaagtgatcgcccgggtgcgaatgtgggtgaacctgaacctgtggcagaagctgaagctaagcagagatgatgccaagcctctgctgagactgaagggattcccttcctttcctctggtcgagagacaggccaacgaagtggactggtgggacatggtgtgtaacgtgaagaagctgatcaacgagaaaaaggaggatggcaaggtgttttggcagaatctggctggctacaagagacaggaagccctgagaccatacctgagcagcgaggaagatcggaagaagggaaagaaattcgctcggtaccagctgggcgacctgctgctgcacctggaaaagaagcacggcgaggactggggaaaggtgtacgacgaggcctgggagcggattgacaagaaagtggaaggcctgagcaagcacatcaagctggaagaggaacggagaagcgaggacgcccagagcaaggccgccctgaccgactggctgcgggctaaggccagcttcgtgatcgagggcctgaaggaggccgacaaggacgagttctgcagatgcgagctgaagctgcagaagtggtacggggacctgcggggaaagcccttcgccatcgaagccgagaacagcatcctggacatcagcggcttcagcaagcagtacaactgtgccttcatctggcagaaggacggcgtgaagaagctgaacctgtacctgatcatcaactacttcaagggcggcaagctgcggttcaagaagatcaaacctgaagccttcgaagccaacagattctacaccgtgatcaacaaaaagagcggcgagatcgtgcccatggaggtgaacttcaacttcgacgaccccaacctgatcatcctgcctctggcctttggcaagagacagggcagagaattcatctggaacgacctgctgtccctggaaaccggcagcctgaagctggccaacggaagagtgatcgagaagacactgtacaacagaagaacccggcaggatgagcctgccctgttcgtggccctgaccttcgagcggcgggaggtcctggactcctccaatatcaaaccaatgaacctgatcggcgtggcaagaggcgaaaacatccccgccgtgatcgccctgaccgaccccgagggctgcccactgagccggtttaaggatagcctgggaaacccaacccacatcctgagaatcggcgagagctataaggagaagcagcggaccatccaggccaagaaggaggtggagcagcggagagccggcggctacagccggaagtacgccagcaaagccaagaatctggcagacgatatggtgagaaacaccgctagagatctgctgtactacgccgtgacccaggatgccatgctgatcttcgccaacctgagccggggcttcggccggcagggcaagcggaccttcatggccgagagacagtacacacggatggaggactggctgaccgccaagctggcctacgagggcctgagcaagacctacctgtccaagacactggcccagtacacctccaagacatgcagcaactgtgggtttaccatcaccagcgccgactacgacagggtgctggagaagctgaagaagacagcaacaggctggatgaccacaattaacggcaaggagctgaaggtggagggccagattacctactacaacagatacaagagacagaacgtagtcaaggacctgtccgtcgagctggatagactgagcgaagaatctgtgaacaacgacatctcctcctggacaaagggcagaagcggagaagctctgagcctcctgaagaaaagattctcccatagacccgtgcaggagaagttcgtgtgcctgaactgcggcttcgagacacacgcagccgagcaagccgccctgaacatcgccagatcctggctgttcctgcggagccaggagtacaagaaataccagacaaacaagacaaccggcaacaccgataagagagccttcgtcgagacctggcagtccttttaccggaagaagcttaaggaggtgtggaaacctgccgtgcggtctggcggatctggcggaggctccacaagcgcccacggcagcgtgatgttcagcgacgtgagcatcgacttcagccaggaggagtgggactacctggacctggagcagagggacctgtacagggacgtgatgctggagaactacagcaacctggtgagcctgggctgcttcgtgagcaagcccgacgtgatcagcctgctggagcagggcaaggagccctggaaggtggtgaggaagggcaggaggaggtaccccgacctggagaccaactacaccagccccaagaaaaagagaaaagtctaagctgccttctgcggggcttgccttctggccatgcccttcttctctcccttgcacctgtacctcttggtctttgaataaagcctgagtaggaaggctagcaaaaaaaaaaaaaaaaaaaaaaaaaaaaaaaaaaaaaaaaaaaaaaaaaaaaaaaaaaaaaaaaaaaaaaaaaaaaaaaa

SEQ ID NO: 2692 - RNA, 5419 nt, synthetic construct
  source 1..5419: mol_type = other RNA
aggaaataagagagaaaagaagagtaagaagaaatataagagccaccatggcccctaagaagaagcgtaaagtgagccgggtgaacggcagcggcagcggcggcggcatgaaccacgaccaggagttcgacccccctaaggtgtaccctcccgtccccgccgagaagagaaagcccatccgggtcctgagcctgttcgatggcatcgccaccggtctgctggtgctgaaggacctgggcatccaggtggataggtacattgcctccgaggtgtgcgaggactccatcaccgtgggaatggtgcgtcatcagggcaagatcatgtacgtgggcgacgtgcggagcgtgacacagaagcatatccaggagtggggccctttcgacctggtgatcggcggcagcccttgcaatgacctgagcatcgtgaacccagcccggaagggcctgtacgagggaaccggcagactgttcttcgagttttacagactgctgcacgacgcccggcctaaggaaggcgacgaccggcccttcttttggctgttcgagaatgtggtggccatgggagtcagcgacaagcgggatattagccggttcctggagagcaaccccgtgatgatcgatgccaaggaagtgagcgccgcccaccgggccagatacttctggggcaatctgcctggcatgaacagacccctggccagcaccgtgaacgacaagctggagctgcaggagtgcctggagcacggccggatcgccaagttcagcaaggtgagaaccatcaccacccgaagcaacagcatcaaacaaggcaaggaccagcactttcctgtgttcatgaacgagaaggaggacatcctgtggtgtaccgagatggagagagtgttcgggttcccagtccactacacagatgtcagcaacatgtctagactggccagacagagactgctgggaagaagctggtccgtccctgtgatcagacacctgttcgcccctctgaaggagtacttcgcctgcgtgagcagcggcaacagcaacgccaacagccggggccccagcttctctagcggcctggtgccactgtccctgagagggagccacatgggccccatggagatctacaaaaccgtgagcgcctggaagcggcagcctgtgcgcgtgctgagcctgtttcggaatatcgataaagtcctgaaaagcctgggattcctggagagcggctctggctccggcggtggcaccctgaagtacgtggaggatgtgacaaacgtggtcagacgggatgtggagaagtggggccccttcgatctggtgtacggcagcacccaacccctgggcagctcttgtgaccggtgccctggctggtacatgtttcagttccaccggatcctgcagtacgccctgccgagacaggagtcccagcggccattcttttggattttcatggacaacttgctgctgaccgaggatgaccaggaaactaccactcggttcctgcagaccgaagccgtgaccctgcaggacgtgagaggccgggactaccagaacgccatgcgggtgtggtccaacatccctggactgaaaagcaagcacgcacctctgacccctaaagaagaggagtacctgcaggcccaggtgcggagcagaagcaagctggacgcccctaaggtggatctgctggtgaagaattgcctcctgcccctgagagagtacttcaagtatttcagccagaatagtctgcccctgggcggcccaagcagcggcgcccctcctcccagcggcggcagcccagccggctccccaacctctaccgaggagggcacctctgagtccgccacccccgagagcggccctggcacctccaccgagcccagcgagggcagcgcacccggcagccctgccggcagccccacctccacagaggagggaaccagcaccgagcccagcgaaggcagcgccccaggcaccagcaccgagcctagtgagggcggctctggcggcggcagcgcccaggagattaaacggatcaacaagatcagaagaagacttgtgaaagacagcaacaccaagaaggccggcaagacaggccccatgaaaaccctgctggttagagtgatgacacccgatctgagagagcggctggaaaacctgagaaagaagcctgaaaatatcccccagcccatcagcaatacatctagagccaacctgaataagctgctgaccgattacaccgaaatgaagaaggcgatcctgcatgtgtactgggaagagttccagaaggaccctgtgggcctgatgagccgggtggcccagcctgccagcaagaagatcgatcagaacaagctgaaacctgagatggacgagaagggcaacctgaccaccgccggctttgcctgctctcagtgtggccagcccctgttcgtgtacaagctggagcaggtgtctgagaagggcaaggcttacaccaactacttcggacggtgcaatgtggccgagcacgaaaagctgatcctgctggcccagctgaagcccgagaaggatagcgacgaagccgtgacatatagcctgggaaagtttgggcagagggccctggatttctacagcattcatgtgaccaaggagtccacccaccccgtgaagcccctggcccagatcgccggaaacagatacgcctccggacctgtgggaaaggccctgagcgacgcatgtatgggcacaatcgcctccttcctgtctaagtaccaggacatcatcatcgaacaccagaaggtggtgaagggcaaccagaagagactggagagcctgcgggagctggccggcaaggaaaacctggaataccctagcgtgaccctgccacctcagcctcacaccaaggagggcgttgatgcctacaacgaagtgatcgcccgggtgcgaatgtgggtgaacctgaacctgtggcagaagctgaagctaagcagagatgatgccaagcctctgctgagactgaagggattcccttcctttcctctggtcgagagacaggccaacgaagtggactggtgggacatggtgtgtaacgtgaagaagctgatcaacgagaaaaaggaggatggcaaggtgttttggcagaatctggctggctacaagagacaggaagccctgagaccatacctgagcagcgaggaagatcggaagaagggaaagaaattcgctcggtaccagctgggcgacctgctgctgcacctggaaaagaagcacggcgaggactggggaaaggtgtacgacgaggcctgggagcggattgacaagaaagtggaaggcctgagcaagcacatcaagctggaagaggaacggagaagcgaggacgcccagagcaaggccgccctgaccgactggctgcgggctaaggccagcttcgtgatcgagggcctgaaggaggccgacaaggacgagttctgcagatgcgagctgaagctgcagaagtggtacggggacctgcggggaaagcccttcgccatcgaagccgagaacagcatcctggacatcagcggcttcagcaagcagtacaactgtgccttcatctggcagaaggacggcgtgaagaagctgaacctgtacctgatcatcaactacttcaagggcggcaagctgcggttcaagaagatcaaacctgaagccttcgaagccaacagattctacaccgtgatcaacaaaaagagcggcgagatcgtgcccatggaggtgaacttcaacttcgacgaccccaacctgatcatcctgcctctggcctttggcaagagacagggcagagaattcatctggaacgacctgctgtccctggaaaccggcagcctgaagctggccaacggaagagtgatcgagaagacactgtacaacagaagaacccggcaggatgagcctgccctgttcgtggccctgaccttcgagcggcgggaggtcctggactcctccaatatcaaaccaatgaacctgatcggcgtggcaagaggcgaaaacatccccgccgtgatcgccctgaccgaccccgagggctgcccactgagccggtttaaggatagcctgggaaacccaacccacatcctgagaatcggcgagagctataaggagaagcagcggaccatccaggccaagaaggaggtggagcagcggagagccggcggctacagccggaagtacgccagcaaagccaagaatctggcagacgatatggtgagaaacaccgctagagatctgctgtactacgccgtgacccaggatgccatgctgatcttcgccaacctgagccggggcttcggccggcagggcaagcggaccttcatggccgagagacagtacacacggatggaggactggctgaccgccaagctggcctacgagggcctgagcaagacctacctgtccaagacactggcccagtacacctccaagacatgcagcaactgtgggtttaccatcaccagcgccgactacgacagggtgctggagaagctgaagaagacagcaacaggctggatgaccacaattaacggcaaggagctgaaggtggagggccagattacctactacaacagatacaagagacagaacgtagtcaaggacctgtccgtcgagctggatagactgagcgaagaatctgtgaacaacgacatctcctcctggacaaagggcagaagcggagaagctctgagcctcctgaagaaaagattctcccatagacccgtgcaggagaagttcgtgtgcctgaactgcggcttcgagacacacgcagccgagcaagccgccctgaacatcgccagatcctggctgttcctgcggagccaggagtacaagaaataccagacaaacaagacaaccggcaacaccgataagagagccttcgtcgagacctggcagtccttttaccggaagaagcttaaggaggtgtggaaacctgccgtgcggtctggcggatctggcggaggctccacaagcttccaggtgagcgtgaccttccaggacgtggccgtggacttcagcagggacgagtggaagaggctggacgacgcccagaaggccctgtacagggacgtgatgctggagaactacgagaacctggtgagcctgggcctgcccgtgagcaagctggacgtgatcagcctgctggagaggagggaggcccccaggagggccaaggagagggtgcccagggacctgccccccgacagcatcagccagaccagccccaagaaaaagagaaaagtctaagctgccttctgcggggcttgccttctggccatgcccttcttctctcccttgcacctgtacctcttggtctttgaataaagcctgagtaggaaggctagcaaaaaaaaaaaaaaaaaaaaaaaaaaaaaaaaaaaaaaaaaaaaaaaaaaaaaaaaaaaaaaaaaaaaaaaaaaaaaaaa

SEQ ID NO: 2693 - RNA, 5419 nt, synthetic construct
  source 1..5419: mol_type = other RNA
aggaaataagagagaaaagaagagtaagaagaaatataagagccaccatggcccctaagaagaagcgtaaagtgagccgggtgaacggcagcggcagcggcggcggcatgaaccacgaccaggagttcgacccccctaaggtgtaccctcccgtccccgccgagaagagaaagcccatccgggtcctgagcctgttcgatggcatcgccaccggtctgctggtgctgaaggacctgggcatccaggtggataggtacattgcctccgaggtgtgcgaggactccatcaccgtgggaatggtgcgtcatcagggcaagatcatgtacgtgggcgacgtgcggagcgtgacacagaagcatatccaggagtggggccctttcgacctggtgatcggcggcagcccttgcaatgacctgagcatcgtgaacccagcccggaagggcctgtacgagggaaccggcagactgttcttcgagttttacagactgctgcacgacgcccggcctaaggaaggcgacgaccggcccttcttttggctgttcgagaatgtggtggccatgggagtcagcgacaagcgggatattagccggttcctggagagcaaccccgtgatgatcgatgccaaggaagtgagcgccgcccaccgggccagatacttctggggcaatctgcctggcatgaacagacccctggccagcaccgtgaacgacaagctggagctgcaggagtgcctggagcacggccggatcgccaagttcagcaaggtgagaaccatcaccacccgaagcaacagcatcaaacaaggcaaggaccagcactttcctgtgttcatgaacgagaaggaggacatcctgtggtgtaccgagatggagagagtgttcgggttcccagtccactacacagatgtcagcaacatgtctagactggccagacagagactgctgggaagaagctggtccgtccctgtgatcagacacctgttcgcccctctgaaggagtacttcgcctgcgtgagcagcggcaacagcaacgccaacagccggggccccagcttctctagcggcctggtgccactgtccctgagagggagccacatgggccccatggagatctacaaaaccgtgagcgcctggaagcggcagcctgtgcgcgtgctgagcctgtttcggaatatcgataaagtcctgaaaagcctgggattcctggagagcggctctggctccggcggtggcaccctgaagtacgtggaggatgtgacaaacgtggtcagacgggatgtggagaagtggggccccttcgatctggtgtacggcagcacccaacccctgggcagctcttgtgaccggtgccctggctggtacatgtttcagttccaccggatcctgcagtacgccctgccgagacaggagtcccagcggccattcttttggattttcatggacaacttgctgctgaccgaggatgaccaggaaactaccactcggttcctgcagaccgaagccgtgaccctgcaggacgtgagaggccgggactaccagaacgccatgcgggtgtggtccaacatccctggactgaaaagcaagcacgcacctctgacccctaaagaagaggagtacctgcaggcccaggtgcggagcagaagcaagctggacgcccctaaggtggatctgctggtgaagaattgcctcctgcccctgagagagtacttcaagtatttcagccagaatagtctgcccctgggcggcccaagcagcggcgcccctcctcccagcggcggcagcccagccggctccccaacctctaccgaggagggcacctctgagtccgccacccccgagagcggccctggcacctccaccgagcccagcgagggcagcgcacccggcagccctgccggcagccccacctccacagaggagggaaccagcaccgagcccagcgaaggcagcgccccaggcaccagcaccgagcctagtgagggcggctctggcggcggcagcgcccaggagattaaacggatcaacaagatcagaagaagacttgtgaaagacagcaacaccaagaaggccggcaagacaggccccatgaaaaccctgctggttagagtgatgacacccgatctgagagagcggctggaaaacctgagaaagaagcctgaaaatatcccccagcccatcagcaatacatctagagccaacctgaataagctgctgaccgattacaccgaaatgaagaaggcgatcctgcatgtgtactgggaagagttccagaaggaccctgtgggcctgatgagccgggtggcccagcctgccagcaagaagatcgatcagaacaagctgaaacctgagatggacgagaagggcaacctgaccaccgccggctttgcctgctctcagtgtggccagcccctgttcgtgtacaagctggagcaggtgtctgagaagggcaaggcttacaccaactacttcggacggtgcaatgtggccgagcacgaaaagctgatcctgctggcccagctgaagcccgagaaggatagcgacgaagccgtgacatatagcctgggaaagtttgggcagagggccctggatttctacagcattcatgtgaccaaggagtccacccaccccgtgaagcccctggcccagatcgccggaaacagatacgcctccggacctgtgggaaaggccctgagcgacgcatgtatgggcacaatcgcctccttcctgtctaagtaccaggacatcatcatcgaacaccagaaggtggtgaagggcaaccagaagagactggagagcctgcgggagctggccggcaaggaaaacctggaataccctagcgtgaccctgccacctcagcctcacaccaaggagggcgttgatgcctacaacgaagtgatcgcccgggtgcgaatgtgggtgaacctgaacctgtggcagaagctgaagctaagcagagatgatgccaagcctctgctgagactgaagggattcccttcctttcctctggtcgagagacaggccaacgaagtggactggtgggacatggtgtgtaacgtgaagaagctgatcaacgagaaaaaggaggatggcaaggtgttttggcagaatctggctggctacaagagacaggaagccctgagaccatacctgagcagcgaggaagatcggaagaagggaaagaaattcgctcggtaccagctgggcgacctgctgctgcacctggaaaagaagcacggcgaggactggggaaaggtgtacgacgaggcctgggagcggattgacaagaaagtggaaggcctgagcaagcacatcaagctggaagaggaacggagaagcgaggacgcccagagcaaggccgccctgaccgactggctgcgggctaaggccagcttcgtgatcgagggcctgaaggaggccgacaaggacgagttctgcagatgcgagctgaagctgcagaagtggtacggggacctgcggggaaagcccttcgccatcgaagccgagaacagcatcctggacatcagcggcttcagcaagcagtacaactgtgccttcatctggcagaaggacggcgtgaagaagctgaacctgtacctgatcatcaactacttcaagggcggcaagctgcggttcaagaagatcaaacctgaagccttcgaagccaacagattctacaccgtgatcaacaaaaagagcggcgagatcgtgcccatggaggtgaacttcaacttcgacgaccccaacctgatcatcctgcctctggcctttggcaagagacagggcagagaattcatctggaacgacctgctgtccctggaaaccggcagcctgaagctggccaacggaagagtgatcgagaagacactgtacaacagaagaacccggcaggatgagcctgccctgttcgtggccctgaccttcgagcggcgggaggtcctggactcctccaatatcaaaccaatgaacctgatcggcgtggcaagaggcgaaaacatccccgccgtgatcgccctgaccgaccccgagggctgcccactgagccggtttaaggatagcctgggaaacccaacccacatcctgagaatcggcgagagctataaggagaagcagcggaccatccaggccaagaaggaggtggagcagcggagagccggcggctacagccggaagtacgccagcaaagccaagaatctggcagacgatatggtgagaaacaccgctagagatctgctgtactacgccgtgacccaggatgccatgctgatcttcgccaacctgagccggggcttcggccggcagggcaagcggaccttcatggccgagagacagtacacacggatggaggactggctgaccgccaagctggcctacgagggcctgagcaagacctacctgtccaagacactggcccagtacacctccaagacatgcagcaactgtgggtttaccatcaccagcgccgactacgacagggtgctggagaagctgaagaagacagcaacaggctggatgaccacaattaacggcaaggagctgaaggtggagggccagattacctactacaacagatacaagagacagaacgtagtcaaggacctgtccgtcgagctggatagactgagcgaagaatctgtgaacaacgacatctcctcctggacaaagggcagaagcggagaagctctgagcctcctgaagaaaagattctcccatagacccgtgcaggagaagttcgtgtgcctgaactgcggcttcgagacacacgcagccgagcaagccgccctgaacatcgccagatcctggctgttcctgcggagccaggagtacaagaaataccagacaaacaagacaaccggcaacaccgataagagagccttcgtcgagacctggcagtccttttaccggaagaagcttaaggaggtgtggaaacctgccgtgcggtctggcggatctggcggaggctccacaagccaggccgaggtgaccttcgaggacgtggccgtgctgttcagcagggaggagtggggcaggctgagccccgcccagaggggcctgtacagggacgtgatgctggagacctacaggaacctggtgagcctgggcgccggccccgccggccccaagcccggcgtgatcacccagctggagaggggcgacgagccctgggtgctggacgcccagggcgccaagggcaaggagaggctgagggtgagcaccagccccaagaaaaagagaaaagtctaagctgccttctgcggggcttgccttctggccatgcccttcttctctcccttgcacctgtacctcttggtctttgaataaagcctgagtaggaaggctagcaaaaaaaaaaaaaaaaaaaaaaaaaaaaaaaaaaaaaaaaaaaaaaaaaaaaaaaaaaaaaaaaaaaaaaaaaaaaaaaa

SEQ ID NO: 2694 - RNA, 5419 nt, synthetic construct
  source 1..5419: mol_type = other RNA
aggaaataagagagaaaagaagagtaagaagaaatataagagccaccatggcccctaagaagaagcgtaaagtgagccgggtgaacggcagcggcagcggcggcggcatgaaccacgaccaggagttcgacccccctaaggtgtaccctcccgtccccgccgagaagagaaagcccatccgggtcctgagcctgttcgatggcatcgccaccggtctgctggtgctgaaggacctgggcatccaggtggataggtacattgcctccgaggtgtgcgaggactccatcaccgtgggaatggtgcgtcatcagggcaagatcatgtacgtgggcgacgtgcggagcgtgacacagaagcatatccaggagtggggccctttcgacctggtgatcggcggcagcccttgcaatgacctgagcatcgtgaacccagcccggaagggcctgtacgagggaaccggcagactgttcttcgagttttacagactgctgcacgacgcccggcctaaggaaggcgacgaccggcccttcttttggctgttcgagaatgtggtggccatgggagtcagcgacaagcgggatattagccggttcctggagagcaaccccgtgatgatcgatgccaaggaagtgagcgccgcccaccgggccagatacttctggggcaatctgcctggcatgaacagacccctggccagcaccgtgaacgacaagctggagctgcaggagtgcctggagcacggccggatcgccaagttcagcaaggtgagaaccatcaccacccgaagcaacagcatcaaacaaggcaaggaccagcactttcctgtgttcatgaacgagaaggaggacatcctgtggtgtaccgagatggagagagtgttcgggttcccagtccactacacagatgtcagcaacatgtctagactggccagacagagactgctgggaagaagctggtccgtccctgtgatcagacacctgttcgcccctctgaaggagtacttcgcctgcgtgagcagcggcaacagcaacgccaacagccggggccccagcttctctagcggcctggtgccactgtccctgagagggagccacatgggccccatggagatctacaaaaccgtgagcgcctggaagcggcagcctgtgcgcgtgctgagcctgtttcggaatatcgataaagtcctgaaaagcctgggattcctggagagcggctctggctccggcggtggcaccctgaagtacgtggaggatgtgacaaacgtggtcagacgggatgtggagaagtggggccccttcgatctggtgtacggcagcacccaacccctgggcagctcttgtgaccggtgccctggctggtacatgtttcagttccaccggatcctgcagtacgccctgccgagacaggagtcccagcggccattcttttggattttcatggacaacttgctgctgaccgaggatgaccaggaaactaccactcggttcctgcagaccgaagccgtgaccctgcaggacgtgagaggccgggactaccagaacgccatgcgggtgtggtccaacatccctggactgaaaagcaagcacgcacctctgacccctaaagaagaggagtacctgcaggcccaggtgcggagcagaagcaagctggacgcccctaaggtggatctgctggtgaagaattgcctcctgcccctgagagagtacttcaagtatttcagccagaatagtctgcccctgggcggcccaagcagcggcgcccctcctcccagcggcggcagcccagccggctccccaacctctaccgaggagggcacctctgagtccgccacccccgagagcggccctggcacctccaccgagcccagcgagggcagcgcacccggcagccctgccggcagccccacctccacagaggagggaaccagcaccgagcccagcgaaggcagcgccccaggcaccagcaccgagcctagtgagggcggctctggcggcggcagcgcccaggagattaaacggatcaacaagatcagaagaagacttgtgaaagacagcaacaccaagaaggccggcaagacaggccccatgaaaaccctgctggttagagtgatgacacccgatctgagagagcggctggaaaacctgagaaagaagcctgaaaatatcccccagcccatcagcaatacatctagagccaacctgaataagctgctgaccgattacaccgaaatgaagaaggcgatcctgcatgtgtactgggaagagttccagaaggaccctgtgggcctgatgagccgggtggcccagcctgccagcaagaagatcgatcagaacaagctgaaacctgagatggacgagaagggcaacctgaccaccgccggctttgcctgctctcagtgtggccagcccctgttcgtgtacaagctggagcaggtgtctgagaagggcaaggcttacaccaactacttcggacggtgcaatgtggccgagcacgaaaagctgatcctgctggcccagctgaagcccgagaaggatagcgacgaagccgtgacatatagcctgggaaagtttgggcagagggccctggatttctacagcattcatgtgaccaaggagtccacccaccccgtgaagcccctggcccagatcgccggaaacagatacgcctccggacctgtgggaaaggccctgagcgacgcatgtatgggcacaatcgcctccttcctgtctaagtaccaggacatcatcatcgaacaccagaaggtggtgaagggcaaccagaagagactggagagcctgcgggagctggccggcaaggaaaacctggaataccctagcgtgaccctgccacctcagcctcacaccaaggagggcgttgatgcctacaacgaagtgatcgcccgggtgcgaatgtgggtgaacctgaacctgtggcagaagctgaagctaagcagagatgatgccaagcctctgctgagactgaagggattcccttcctttcctctggtcgagagacaggccaacgaagtggactggtgggacatggtgtgtaacgtgaagaagctgatcaacgagaaaaaggaggatggcaaggtgttttggcagaatctggctggctacaagagacaggaagccctgagaccatacctgagcagcgaggaagatcggaagaagggaaagaaattcgctcggtaccagctgggcgacctgctgctgcacctggaaaagaagcacggcgaggactggggaaaggtgtacgacgaggcctgggagcggattgacaagaaagtggaaggcctgagcaagcacatcaagctggaagaggaacggagaagcgaggacgcccagagcaaggccgccctgaccgactggctgcgggctaaggccagcttcgtgatcgagggcctgaaggaggccgacaaggacgagttctgcagatgcgagctgaagctgcagaagtggtacggggacctgcggggaaagcccttcgccatcgaagccgagaacagcatcctggacatcagcggcttcagcaagcagtacaactgtgccttcatctggcagaaggacggcgtgaagaagctgaacctgtacctgatcatcaactacttcaagggcggcaagctgcggttcaagaagatcaaacctgaagccttcgaagccaacagattctacaccgtgatcaacaaaaagagcggcgagatcgtgcccatggaggtgaacttcaacttcgacgaccccaacctgatcatcctgcctctggcctttggcaagagacagggcagagaattcatctggaacgacctgctgtccctggaaaccggcagcctgaagctggccaacggaagagtgatcgagaagacactgtacaacagaagaacccggcaggatgagcctgccctgttcgtggccctgaccttcgagcggcgggaggtcctggactcctccaatatcaaaccaatgaacctgatcggcgtggcaagaggcgaaaacatccccgccgtgatcgccctgaccgaccccgagggctgcccactgagccggtttaaggatagcctgggaaacccaacccacatcctgagaatcggcgagagctataaggagaagcagcggaccatccaggccaagaaggaggtggagcagcggagagccggcggctacagccggaagtacgccagcaaagccaagaatctggcagacgatatggtgagaaacaccgctagagatctgctgtactacgccgtgacccaggatgccatgctgatcttcgccaacctgagccggggcttcggccggcagggcaagcggaccttcatggccgagagacagtacacacggatggaggactggctgaccgccaagctggcctacgagggcctgagcaagacctacctgtccaagacactggcccagtacacctccaagacatgcagcaactgtgggtttaccatcaccagcgccgactacgacagggtgctggagaagctgaagaagacagcaacaggctggatgaccacaattaacggcaaggagctgaaggtggagggccagattacctactacaacagatacaagagacagaacgtagtcaaggacctgtccgtcgagctggatagactgagcgaagaatctgtgaacaacgacatctcctcctggacaaagggcagaagcggagaagctctgagcctcctgaagaaaagattctcccatagacccgtgcaggagaagttcgtgtgcctgaactgcggcttcgagacacacgcagccgagcaagccgccctgaacatcgccagatcctggctgttcctgcggagccaggagtacaagaaataccagacaaacaagacaaccggcaacaccgataagagagccttcgtcgagacctggcagtccttttaccggaagaagcttaaggaggtgtggaaacctgccgtgcggtctggcggatctggcggaggctccacaagcggcaagatgagcgtgaccttcgaggacgtggccctgtacttcagccccgaggagtgggccaagctgagcggctgccagaggcagctgtaccaggaggtgatgctggagaactaccagatggtggccagcctgggctgggccaacgtgaagcccgagatcatctgcaagatggagagggaggagaccccctgcgtgcccgacgtgcccggcaagcagcagaggcaccagagccccgtgcccgtgaccagccccaagaaaaagagaaaagtctaagctgccttctgcggggcttgccttctggccatgcccttcttctctcccttgcacctgtacctcttggtctttgaataaagcctgagtaggaaggctagcaaaaaaaaaaaaaaaaaaaaaaaaaaaaaaaaaaaaaaaaaaaaaaaaaaaaaaaaaaaaaaaaaaaaaaaaaaaaaaaa

SEQ ID NO: 2695 - RNA, 5416 nt, synthetic construct
  source 1..5416: mol_type = other RNA
aggaaataagagagaaaagaagagtaagaagaaatataagagccaccatggcccctaagaagaagcgtaaagtgagccgggtgaacggcagcggcagcggcggcggcatgaaccacgaccaggagttcgacccccctaaggtgtaccctcccgtccccgccgagaagagaaagcccatccgggtcctgagcctgttcgatggcatcgccaccggtctgctggtgctgaaggacctgggcatccaggtggataggtacattgcctccgaggtgtgcgaggactccatcaccgtgggaatggtgcgtcatcagggcaagatcatgtacgtgggcgacgtgcggagcgtgacacagaagcatatccaggagtggggccctttcgacctggtgatcggcggcagcccttgcaatgacctgagcatcgtgaacccagcccggaagggcctgtacgagggaaccggcagactgttcttcgagttttacagactgctgcacgacgcccggcctaaggaaggcgacgaccggcccttcttttggctgttcgagaatgtggtggccatgggagtcagcgacaagcgggatattagccggttcctggagagcaaccccgtgatgatcgatgccaaggaagtgagcgccgcccaccgggccagatacttctggggcaatctgcctggcatgaacagacccctggccagcaccgtgaacgacaagctggagctgcaggagtgcctggagcacggccggatcgccaagttcagcaaggtgagaaccatcaccacccgaagcaacagcatcaaacaaggcaaggaccagcactttcctgtgttcatgaacgagaaggaggacatcctgtggtgtaccgagatggagagagtgttcgggttcccagtccactacacagatgtcagcaacatgtctagactggccagacagagactgctgggaagaagctggtccgtccctgtgatcagacacctgttcgcccctctgaaggagtacttcgcctgcgtgagcagcggcaacagcaacgccaacagccggggccccagcttctctagcggcctggtgccactgtccctgagagggagccacatgggccccatggagatctacaaaaccgtgagcgcctggaagcggcagcctgtgcgcgtgctgagcctgtttcggaatatcgataaagtcctgaaaagcctgggattcctggagagcggctctggctccggcggtggcaccctgaagtacgtggaggatgtgacaaacgtggtcagacgggatgtggagaagtggggccccttcgatctggtgtacggcagcacccaacccctgggcagctcttgtgaccggtgccctggctggtacatgtttcagttccaccggatcctgcagtacgccctgccgagacaggagtcccagcggccattcttttggattttcatggacaacttgctgctgaccgaggatgaccaggaaactaccactcggttcctgcagaccgaagccgtgaccctgcaggacgtgagaggccgggactaccagaacgccatgcgggtgtggtccaacatccctggactgaaaagcaagcacgcacctctgacccctaaagaagaggagtacctgcaggcccaggtgcggagcagaagcaagctggacgcccctaaggtggatctgctggtgaagaattgcctcctgcccctgagagagtacttcaagtatttcagccagaatagtctgcccctgggcggcccaagcagcggcgcccctcctcccagcggcggcagcccagccggctccccaacctctaccgaggagggcacctctgagtccgccacccccgagagcggccctggcacctccaccgagcccagcgagggcagcgcacccggcagccctgccggcagccccacctccacagaggagggaaccagcaccgagcccagcgaaggcagcgccccaggcaccagcaccgagcctagtgagggcggctctggcggcggcagcgcccaggagattaaacggatcaacaagatcagaagaagacttgtgaaagacagcaacaccaagaaggccggcaagacaggccccatgaaaaccctgctggttagagtgatgacacccgatctgagagagcggctggaaaacctgagaaagaagcctgaaaatatcccccagcccatcagcaatacatctagagccaacctgaataagctgctgaccgattacaccgaaatgaagaaggcgatcctgcatgtgtactgggaagagttccagaaggaccctgtgggcctgatgagccgggtggcccagcctgccagcaagaagatcgatcagaacaagctgaaacctgagatggacgagaagggcaacctgaccaccgccggctttgcctgctctcagtgtggccagcccctgttcgtgtacaagctggagcaggtgtctgagaagggcaaggcttacaccaactacttcggacggtgcaatgtggccgagcacgaaaagctgatcctgctggcccagctgaagcccgagaaggatagcgacgaagccgtgacatatagcctgggaaagtttgggcagagggccctggatttctacagcattcatgtgaccaaggagtccacccaccccgtgaagcccctggcccagatcgccggaaacagatacgcctccggacctgtgggaaaggccctgagcgacgcatgtatgggcacaatcgcctccttcctgtctaagtaccaggacatcatcatcgaacaccagaaggtggtgaagggcaaccagaagagactggagagcctgcgggagctggccggcaaggaaaacctggaataccctagcgtgaccctgccacctcagcctcacaccaaggagggcgttgatgcctacaacgaagtgatcgcccgggtgcgaatgtgggtgaacctgaacctgtggcagaagctgaagctaagcagagatgatgccaagcctctgctgagactgaagggattcccttcctttcctctggtcgagagacaggccaacgaagtggactggtgggacatggtgtgtaacgtgaagaagctgatcaacgagaaaaaggaggatggcaaggtgttttggcagaatctggctggctacaagagacaggaagccctgagaccatacctgagcagcgaggaagatcggaagaagggaaagaaattcgctcggtaccagctgggcgacctgctgctgcacctggaaaagaagcacggcgaggactggggaaaggtgtacgacgaggcctgggagcggattgacaagaaagtggaaggcctgagcaagcacatcaagctggaagaggaacggagaagcgaggacgcccagagcaaggccgccctgaccgactggctgcgggctaaggccagcttcgtgatcgagggcctgaaggaggccgacaaggacgagttctgcagatgcgagctgaagctgcagaagtggtacggggacctgcggggaaagcccttcgccatcgaagccgagaacagcatcctggacatcagcggcttcagcaagcagtacaactgtgccttcatctggcagaaggacggcgtgaagaagctgaacctgtacctgatcatcaactacttcaagggcggcaagctgcggttcaagaagatcaaacctgaagccttcgaagccaacagattctacaccgtgatcaacaaaaagagcggcgagatcgtgcccatggaggtgaacttcaacttcgacgaccccaacctgatcatcctgcctctggcctttggcaagagacagggcagagaattcatctggaacgacctgctgtccctggaaaccggcagcctgaagctggccaacggaagagtgatcgagaagacactgtacaacagaagaacccggcaggatgagcctgccctgttcgtggccctgaccttcgagcggcgggaggtcctggactcctccaatatcaaaccaatgaacctgatcggcgtggcaagaggcgaaaacatccccgccgtgatcgccctgaccgaccccgagggctgcccactgagccggtttaaggatagcctgggaaacccaacccacatcctgagaatcggcgagagctataaggagaagcagcggaccatccaggccaagaaggaggtggagcagcggagagccggcggctacagccggaagtacgccagcaaagccaagaatctggcagacgatatggtgagaaacaccgctagagatctgctgtactacgccgtgacccaggatgccatgctgatcttcgccaacctgagccggggcttcggccggcagggcaagcggaccttcatggccgagagacagtacacacggatggaggactggctgaccgccaagctggcctacgagggcctgagcaagacctacctgtccaagacactggcccagtacacctccaagacatgcagcaactgtgggtttaccatcaccagcgccgactacgacagggtgctggagaagctgaagaagacagcaacaggctggatgaccacaattaacggcaaggagctgaaggtggagggccagattacctactacaacagatacaagagacagaacgtagtcaaggacctgtccgtcgagctggatagactgagcgaagaatctgtgaacaacgacatctcctcctggacaaagggcagaagcggagaagctctgagcctcctgaagaaaagattctcccatagacccgtgcaggagaagttcgtgtgcctgaactgcggcttcgagacacacgcagccgagcaagccgccctgaacatcgccagatcctggctgttcctgcggagccaggagtacaagaaataccagacaaacaagacaaccggcaacaccgataagagagccttcgtcgagacctggcagtccttttaccggaagaagcttaaggaggtgtggaaacctgccgtgcggtctggcggatctggcggaggctccacaagcagagagagcctggaggacgaggtgacccccggcctgcccaccgccgagagccaggagctgctgaccttcaaggacatcagcatcgacttcacccaggaggagtggggccagctggcccccgcccaccagaacctgtacagagaggtgatgctggagaactacagcaacctggtgagcgtgggctaccagctgagcaagcccagcgtgatcagccagctggagaagggcgaggagccctggaccagccccaagaaaaagagaaaagtctaagctgccttctgcggggcttgccttctggccatgcccttcttctctcccttgcacctgtacctcttggtctttgaataaagcctgagtaggaaggctagcaaaaaaaaaaaaaaaaaaaaaaaaaaaaaaaaaaaaaaaaaaaaaaaaaaaaaaaaaaaaaaaaaaaaaaaaaaaaaaaa

SEQ ID NO: 2696 - RNA, 5419 nt, synthetic construct
  source 1..5419: mol_type = other RNA
aggaaataagagagaaaagaagagtaagaagaaatataagagccaccatggcccctaagaagaagcgtaaagtgagccgggtgaacggcagcggcagcggcggcggcatgaaccacgaccaggagttcgacccccctaaggtgtaccctcccgtccccgccgagaagagaaagcccatccgggtcctgagcctgttcgatggcatcgccaccggtctgctggtgctgaaggacctgggcatccaggtggataggtacattgcctccgaggtgtgcgaggactccatcaccgtgggaatggtgcgtcatcagggcaagatcatgtacgtgggcgacgtgcggagcgtgacacagaagcatatccaggagtggggccctttcgacctggtgatcggcggcagcccttgcaatgacctgagcatcgtgaacccagcccggaagggcctgtacgagggaaccggcagactgttcttcgagttttacagactgctgcacgacgcccggcctaaggaaggcgacgaccggcccttcttttggctgttcgagaatgtggtggccatgggagtcagcgacaagcgggatattagccggttcctggagagcaaccccgtgatgatcgatgccaaggaagtgagcgccgcccaccgggccagatacttctggggcaatctgcctggcatgaacagacccctggccagcaccgtgaacgacaagctggagctgcaggagtgcctggagcacggccggatcgccaagttcagcaaggtgagaaccatcaccacccgaagcaacagcatcaaacaaggcaaggaccagcactttcctgtgttcatgaacgagaaggaggacatcctgtggtgtaccgagatggagagagtgttcgggttcccagtccactacacagatgtcagcaacatgtctagactggccagacagagactgctgggaagaagctggtccgtccctgtgatcagacacctgttcgcccctctgaaggagtacttcgcctgcgtgagcagcggcaacagcaacgccaacagccggggccccagcttctctagcggcctggtgccactgtccctgagagggagccacatgggccccatggagatctacaaaaccgtgagcgcctggaagcggcagcctgtgcgcgtgctgagcctgtttcggaatatcgataaagtcctgaaaagcctgggattcctggagagcggctctggctccggcggtggcaccctgaagtacgtggaggatgtgacaaacgtggtcagacgggatgtggagaagtggggccccttcgatctggtgtacggcagcacccaacccctgggcagctcttgtgaccggtgccctggctggtacatgtttcagttccaccggatcctgcagtacgccctgccgagacaggagtcccagcggccattcttttggattttcatggacaacttgctgctgaccgaggatgaccaggaaactaccactcggttcctgcagaccgaagccgtgaccctgcaggacgtgagaggccgggactaccagaacgccatgcgggtgtggtccaacatccctggactgaaaagcaagcacgcacctctgacccctaaagaagaggagtacctgcaggcccaggtgcggagcagaagcaagctggacgcccctaaggtggatctgctggtgaagaattgcctcctgcccctgagagagtacttcaagtatttcagccagaatagtctgcccctgggcggcccaagcagcggcgcccctcctcccagcggcggcagcccagccggctccccaacctctaccgaggagggcacctctgagtccgccacccccgagagcggccctggcacctccaccgagcccagcgagggcagcgcacccggcagccctgccggcagccccacctccacagaggagggaaccagcaccgagcccagcgaaggcagcgccccaggcaccagcaccgagcctagtgagggcggctctggcggcggcagcgcccaggagattaaacggatcaacaagatcagaagaagacttgtgaaagacagcaacaccaagaaggccggcaagacaggccccatgaaaaccctgctggttagagtgatgacacccgatctgagagagcggctggaaaacctgagaaagaagcctgaaaatatcccccagcccatcagcaatacatctagagccaacctgaataagctgctgaccgattacaccgaaatgaagaaggcgatcctgcatgtgtactgggaagagttccagaaggaccctgtgggcctgatgagccgggtggcccagcctgccagcaagaagatcgatcagaacaagctgaaacctgagatggacgagaagggcaacctgaccaccgccggctttgcctgctctcagtgtggccagcccctgttcgtgtacaagctggagcaggtgtctgagaagggcaaggcttacaccaactacttcggacggtgcaatgtggccgagcacgaaaagctgatcctgctggcccagctgaagcccgagaaggatagcgacgaagccgtgacatatagcctgggaaagtttgggcagagggccctggatttctacagcattcatgtgaccaaggagtccacccaccccgtgaagcccctggcccagatcgccggaaacagatacgcctccggacctgtgggaaaggccctgagcgacgcatgtatgggcacaatcgcctccttcctgtctaagtaccaggacatcatcatcgaacaccagaaggtggtgaagggcaaccagaagagactggagagcctgcgggagctggccggcaaggaaaacctggaataccctagcgtgaccctgccacctcagcctcacaccaaggagggcgttgatgcctacaacgaagtgatcgcccgggtgcgaatgtgggtgaacctgaacctgtggcagaagctgaagctaagcagagatgatgccaagcctctgctgagactgaagggattcccttcctttcctctggtcgagagacaggccaacgaagtggactggtgggacatggtgtgtaacgtgaagaagctgatcaacgagaaaaaggaggatggcaaggtgttttggcagaatctggctggctacaagagacaggaagccctgagaccatacctgagcagcgaggaagatcggaagaagggaaagaaattcgctcggtaccagctgggcgacctgctgctgcacctggaaaagaagcacggcgaggactggggaaaggtgtacgacgaggcctgggagcggattgacaagaaagtggaaggcctgagcaagcacatcaagctggaagaggaacggagaagcgaggacgcccagagcaaggccgccctgaccgactggctgcgggctaaggccagcttcgtgatcgagggcctgaaggaggccgacaaggacgagttctgcagatgcgagctgaagctgcagaagtggtacggggacctgcggggaaagcccttcgccatcgaagccgagaacagcatcctggacatcagcggcttcagcaagcagtacaactgtgccttcatctggcagaaggacggcgtgaagaagctgaacctgtacctgatcatcaactacttcaagggcggcaagctgcggttcaagaagatcaaacctgaagccttcgaagccaacagattctacaccgtgatcaacaaaaagagcggcgagatcgtgcccatggaggtgaacttcaacttcgacgaccccaacctgatcatcctgcctctggcctttggcaagagacagggcagagaattcatctggaacgacctgctgtccctggaaaccggcagcctgaagctggccaacggaagagtgatcgagaagacactgtacaacagaagaacccggcaggatgagcctgccctgttcgtggccctgaccttcgagcggcgggaggtcctggactcctccaatatcaaaccaatgaacctgatcggcgtggcaagaggcgaaaacatccccgccgtgatcgccctgaccgaccccgagggctgcccactgagccggtttaaggatagcctgggaaacccaacccacatcctgagaatcggcgagagctataaggagaagcagcggaccatccaggccaagaaggaggtggagcagcggagagccggcggctacagccggaagtacgccagcaaagccaagaatctggcagacgatatggtgagaaacaccgctagagatctgctgtactacgccgtgacccaggatgccatgctgatcttcgccaacctgagccggggcttcggccggcagggcaagcggaccttcatggccgagagacagtacacacggatggaggactggctgaccgccaagctggcctacgagggcctgagcaagacctacctgtccaagacactggcccagtacacctccaagacatgcagcaactgtgggtttaccatcaccagcgccgactacgacagggtgctggagaagctgaagaagacagcaacaggctggatgaccacaattaacggcaaggagctgaaggtggagggccagattacctactacaacagatacaagagacagaacgtagtcaaggacctgtccgtcgagctggatagactgagcgaagaatctgtgaacaacgacatctcctcctggacaaagggcagaagcggagaagctctgagcctcctgaagaaaagattctcccatagacccgtgcaggagaagttcgtgtgcctgaactgcggcttcgagacacacgcagccgagcaagccgccctgaacatcgccagatcctggctgttcctgcggagccaggagtacaagaaataccagacaaacaagacaaccggcaacaccgataagagagccttcgtcgagacctggcagtccttttaccggaagaagcttaaggaggtgtggaaacctgccgtgcggtctggcggatctggcggaggctccacaagcgcccaccacctggtgatgttcagggacgtggccgtggacttcagcaaggaggagtgggagtgcctgaacagctaccagaggaacctgtacagggacgtgatcctggagaactacagcaacctggtgagcgtgggctgcagcatcagcaagcccgacgtgatcaccctgctggagcagggcaaggagccctggatggtggtgagggacgagaggaggaggaggagcctggacctggagagcaggaccagccccaagaaaaagagaaaagtctaagctgccttctgcggggcttgccttctggccatgcccttcttctctcccttgcacctgtacctcttggtctttgaataaagcctgagtaggaaggctagcaaaaaaaaaaaaaaaaaaaaaaaaaaaaaaaaaaaaaaaaaaaaaaaaaaaaaaaaaaaaaaaaaaaaaaaaaaaaaaaa

SEQ ID NO: 2697 - RNA, 5419 nt, synthetic construct
  source 1..5419: mol_type = other RNA
aggaaataagagagaaaagaagagtaagaagaaatataagagccaccatggcccctaagaagaagcgtaaagtgagccgggtgaacggcagcggcagcggcggcggcatgaaccacgaccaggagttcgacccccctaaggtgtaccctcccgtccccgccgagaagagaaagcccatccgggtcctgagcctgttcgatggcatcgccaccggtctgctggtgctgaaggacctgggcatccaggtggataggtacattgcctccgaggtgtgcgaggactccatcaccgtgggaatggtgcgtcatcagggcaagatcatgtacgtgggcgacgtgcggagcgtgacacagaagcatatccaggagtggggccctttcgacctggtgatcggcggcagcccttgcaatgacctgagcatcgtgaacccagcccggaagggcctgtacgagggaaccggcagactgttcttcgagttttacagactgctgcacgacgcccggcctaaggaaggcgacgaccggcccttcttttggctgttcgagaatgtggtggccatgggagtcagcgacaagcgggatattagccggttcctggagagcaaccccgtgatgatcgatgccaaggaagtgagcgccgcccaccgggccagatacttctggggcaatctgcctggcatgaacagacccctggccagcaccgtgaacgacaagctggagctgcaggagtgcctggagcacggccggatcgccaagttcagcaaggtgagaaccatcaccacccgaagcaacagcatcaaacaaggcaaggaccagcactttcctgtgttcatgaacgagaaggaggacatcctgtggtgtaccgagatggagagagtgttcgggttcccagtccactacacagatgtcagcaacatgtctagactggccagacagagactgctgggaagaagctggtccgtccctgtgatcagacacctgttcgcccctctgaaggagtacttcgcctgcgtgagcagcggcaacagcaacgccaacagccggggccccagcttctctagcggcctggtgccactgtccctgagagggagccacatgggccccatggagatctacaaaaccgtgagcgcctggaagcggcagcctgtgcgcgtgctgagcctgtttcggaatatcgataaagtcctgaaaagcctgggattcctggagagcggctctggctccggcggtggcaccctgaagtacgtggaggatgtgacaaacgtggtcagacgggatgtggagaagtggggccccttcgatctggtgtacggcagcacccaacccctgggcagctcttgtgaccggtgccctggctggtacatgtttcagttccaccggatcctgcagtacgccctgccgagacaggagtcccagcggccattcttttggattttcatggacaacttgctgctgaccgaggatgaccaggaaactaccactcggttcctgcagaccgaagccgtgaccctgcaggacgtgagaggccgggactaccagaacgccatgcgggtgtggtccaacatccctggactgaaaagcaagcacgcacctctgacccctaaagaagaggagtacctgcaggcccaggtgcggagcagaagcaagctggacgcccctaaggtggatctgctggtgaagaattgcctcctgcccctgagagagtacttcaagtatttcagccagaatagtctgcccctgggcggcccaagcagcggcgcccctcctcccagcggcggcagcccagccggctccccaacctctaccgaggagggcacctctgagtccgccacccccgagagcggccctggcacctccaccgagcccagcgagggcagcgcacccggcagccctgccggcagccccacctccacagaggagggaaccagcaccgagcccagcgaaggcagcgccccaggcaccagcaccgagcctagtgagggcggctctggcggcggcagcgcccaggagattaaacggatcaacaagatcagaagaagacttgtgaaagacagcaacaccaagaaggccggcaagacaggccccatgaaaaccctgctggttagagtgatgacacccgatctgagagagcggctggaaaacctgagaaagaagcctgaaaatatcccccagcccatcagcaatacatctagagccaacctgaataagctgctgaccgattacaccgaaatgaagaaggcgatcctgcatgtgtactgggaagagttccagaaggaccctgtgggcctgatgagccgggtggcccagcctgccagcaagaagatcgatcagaacaagctgaaacctgagatggacgagaagggcaacctgaccaccgccggctttgcctgctctcagtgtggccagcccctgttcgtgtacaagctggagcaggtgtctgagaagggcaaggcttacaccaactacttcggacggtgcaatgtggccgagcacgaaaagctgatcctgctggcccagctgaagcccgagaaggatagcgacgaagccgtgacatatagcctgggaaagtttgggcagagggccctggatttctacagcattcatgtgaccaaggagtccacccaccccgtgaagcccctggcccagatcgccggaaacagatacgcctccggacctgtgggaaaggccctgagcgacgcatgtatgggcacaatcgcctccttcctgtctaagtaccaggacatcatcatcgaacaccagaaggtggtgaagggcaaccagaagagactggagagcctgcgggagctggccggcaaggaaaacctggaataccctagcgtgaccctgccacctcagcctcacaccaaggagggcgttgatgcctacaacgaagtgatcgcccgggtgcgaatgtgggtgaacctgaacctgtggcagaagctgaagctaagcagagatgatgccaagcctctgctgagactgaagggattcccttcctttcctctggtcgagagacaggccaacgaagtggactggtgggacatggtgtgtaacgtgaagaagctgatcaacgagaaaaaggaggatggcaaggtgttttggcagaatctggctggctacaagagacaggaagccctgagaccatacctgagcagcgaggaagatcggaagaagggaaagaaattcgctcggtaccagctgggcgacctgctgctgcacctggaaaagaagcacggcgaggactggggaaaggtgtacgacgaggcctgggagcggattgacaagaaagtggaaggcctgagcaagcacatcaagctggaagaggaacggagaagcgaggacgcccagagcaaggccgccctgaccgactggctgcgggctaaggccagcttcgtgatcgagggcctgaaggaggccgacaaggacgagttctgcagatgcgagctgaagctgcagaagtggtacggggacctgcggggaaagcccttcgccatcgaagccgagaacagcatcctggacatcagcggcttcagcaagcagtacaactgtgccttcatctggcagaaggacggcgtgaagaagctgaacctgtacctgatcatcaactacttcaagggcggcaagctgcggttcaagaagatcaaacctgaagccttcgaagccaacagattctacaccgtgatcaacaaaaagagcggcgagatcgtgcccatggaggtgaacttcaacttcgacgaccccaacctgatcatcctgcctctggcctttggcaagagacagggcagagaattcatctggaacgacctgctgtccctggaaaccggcagcctgaagctggccaacggaagagtgatcgagaagacactgtacaacagaagaacccggcaggatgagcctgccctgttcgtggccctgaccttcgagcggcgggaggtcctggactcctccaatatcaaaccaatgaacctgatcggcgtggcaagaggcgaaaacatccccgccgtgatcgccctgaccgaccccgagggctgcccactgagccggtttaaggatagcctgggaaacccaacccacatcctgagaatcggcgagagctataaggagaagcagcggaccatccaggccaagaaggaggtggagcagcggagagccggcggctacagccggaagtacgccagcaaagccaagaatctggcagacgatatggtgagaaacaccgctagagatctgctgtactacgccgtgacccaggatgccatgctgatcttcgccaacctgagccggggcttcggccggcagggcaagcggaccttcatggccgagagacagtacacacggatggaggactggctgaccgccaagctggcctacgagggcctgagcaagacctacctgtccaagacactggcccagtacacctccaagacatgcagcaactgtgggtttaccatcaccagcgccgactacgacagggtgctggagaagctgaagaagacagcaacaggctggatgaccacaattaacggcaaggagctgaaggtggagggccagattacctactacaacagatacaagagacagaacgtagtcaaggacctgtccgtcgagctggatagactgagcgaagaatctgtgaacaacgacatctcctcctggacaaagggcagaagcggagaagctctgagcctcctgaagaaaagattctcccatagacccgtgcaggagaagttcgtgtgcctgaactgcggcttcgagacacacgcagccgagcaagccgccctgaacatcgccagatcctggctgttcctgcggagccaggagtacaagaaataccagacaaacaagacaaccggcaacaccgataagagagccttcgtcgagacctggcagtccttttaccggaagaagcttaaggaggtgtggaaacctgccgtgcggtctggcggatctggcggaggctccacaagcagccaggagcccgtgaccttcgaggacgtggccgtgtacttcacccagaaccagtgggccagcctggaccccatgcagagggccctgtacctggaggtgatgctggagaactacgccaacatcaccagcctggccgccctgcccttccccaagcccgacctgatcctgcagctggagcagggcgaggccccctgggacctggacccctggacccccctggagggcgaggccctggagggcgtgaccagccccaagaaaaagagaaaagtctaagctgccttctgcggggcttgccttctggccatgcccttcttctctcccttgcacctgtacctcttggtctttgaataaagcctgagtaggaaggctagcaaaaaaaaaaaaaaaaaaaaaaaaaaaaaaaaaaaaaaaaaaaaaaaaaaaaaaaaaaaaaaaaaaaaaaaaaaaaaaaa

SEQ ID NO: 2698 - RNA, 5419 nt, synthetic construct
  source 1..5419: mol_type = other RNA
aggaaataagagagaaaagaagagtaagaagaaatataagagccaccatggcccctaagaagaagcgtaaagtgagccgggtgaacggcagcggcagcggcggcggcatgaaccacgaccaggagttcgacccccctaaggtgtaccctcccgtccccgccgagaagagaaagcccatccgggtcctgagcctgttcgatggcatcgccaccggtctgctggtgctgaaggacctgggcatccaggtggataggtacattgcctccgaggtgtgcgaggactccatcaccgtgggaatggtgcgtcatcagggcaagatcatgtacgtgggcgacgtgcggagcgtgacacagaagcatatccaggagtggggccctttcgacctggtgatcggcggcagcccttgcaatgacctgagcatcgtgaacccagcccggaagggcctgtacgagggaaccggcagactgttcttcgagttttacagactgctgcacgacgcccggcctaaggaaggcgacgaccggcccttcttttggctgttcgagaatgtggtggccatgggagtcagcgacaagcgggatattagccggttcctggagagcaaccccgtgatgatcgatgccaaggaagtgagcgccgcccaccgggccagatacttctggggcaatctgcctggcatgaacagacccctggccagcaccgtgaacgacaagctggagctgcaggagtgcctggagcacggccggatcgccaagttcagcaaggtgagaaccatcaccacccgaagcaacagcatcaaacaaggcaaggaccagcactttcctgtgttcatgaacgagaaggaggacatcctgtggtgtaccgagatggagagagtgttcgggttcccagtccactacacagatgtcagcaacatgtctagactggccagacagagactgctgggaagaagctggtccgtccctgtgatcagacacctgttcgcccctctgaaggagtacttcgcctgcgtgagcagcggcaacagcaacgccaacagccggggccccagcttctctagcggcctggtgccactgtccctgagagggagccacatgggccccatggagatctacaaaaccgtgagcgcctggaagcggcagcctgtgcgcgtgctgagcctgtttcggaatatcgataaagtcctgaaaagcctgggattcctggagagcggctctggctccggcggtggcaccctgaagtacgtggaggatgtgacaaacgtggtcagacgggatgtggagaagtggggccccttcgatctggtgtacggcagcacccaacccctgggcagctcttgtgaccggtgccctggctggtacatgtttcagttccaccggatcctgcagtacgccctgccgagacaggagtcccagcggccattcttttggattttcatggacaacttgctgctgaccgaggatgaccaggaaactaccactcggttcctgcagaccgaagccgtgaccctgcaggacgtgagaggccgggactaccagaacgccatgcgggtgtggtccaacatccctggactgaaaagcaagcacgcacctctgacccctaaagaagaggagtacctgcaggcccaggtgcggagcagaagcaagctggacgcccctaaggtggatctgctggtgaagaattgcctcctgcccctgagagagtacttcaagtatttcagccagaatagtctgcccctgggcggcccaagcagcggcgcccctcctcccagcggcggcagcccagccggctccccaacctctaccgaggagggcacctctgagtccgccacccccgagagcggccctggcacctccaccgagcccagcgagggcagcgcacccggcagccctgccggcagccccacctccacagaggagggaaccagcaccgagcccagcgaaggcagcgccccaggcaccagcaccgagcctagtgagggcggctctggcggcggcagcgcccaggagattaaacggatcaacaagatcagaagaagacttgtgaaagacagcaacaccaagaaggccggcaagacaggccccatgaaaaccctgctggttagagtgatgacacccgatctgagagagcggctggaaaacctgagaaagaagcctgaaaatatcccccagcccatcagcaatacatctagagccaacctgaataagctgctgaccgattacaccgaaatgaagaaggcgatcctgcatgtgtactgggaagagttccagaaggaccctgtgggcctgatgagccgggtggcccagcctgccagcaagaagatcgatcagaacaagctgaaacctgagatggacgagaagggcaacctgaccaccgccggctttgcctgctctcagtgtggccagcccctgttcgtgtacaagctggagcaggtgtctgagaagggcaaggcttacaccaactacttcggacggtgcaatgtggccgagcacgaaaagctgatcctgctggcccagctgaagcccgagaaggatagcgacgaagccgtgacatatagcctgggaaagtttgggcagagggccctggatttctacagcattcatgtgaccaaggagtccacccaccccgtgaagcccctggcccagatcgccggaaacagatacgcctccggacctgtgggaaaggccctgagcgacgcatgtatgggcacaatcgcctccttcctgtctaagtaccaggacatcatcatcgaacaccagaaggtggtgaagggcaaccagaagagactggagagcctgcgggagctggccggcaaggaaaacctggaataccctagcgtgaccctgccacctcagcctcacaccaaggagggcgttgatgcctacaacgaagtgatcgcccgggtgcgaatgtgggtgaacctgaacctgtggcagaagctgaagctaagcagagatgatgccaagcctctgctgagactgaagggattcccttcctttcctctggtcgagagacaggccaacgaagtggactggtgggacatggtgtgtaacgtgaagaagctgatcaacgagaaaaaggaggatggcaaggtgttttggcagaatctggctggctacaagagacaggaagccctgagaccatacctgagcagcgaggaagatcggaagaagggaaagaaattcgctcggtaccagctgggcgacctgctgctgcacctggaaaagaagcacggcgaggactggggaaaggtgtacgacgaggcctgggagcggattgacaagaaagtggaaggcctgagcaagcacatcaagctggaagaggaacggagaagcgaggacgcccagagcaaggccgccctgaccgactggctgcgggctaaggccagcttcgtgatcgagggcctgaaggaggccgacaaggacgagttctgcagatgcgagctgaagctgcagaagtggtacggggacctgcggggaaagcccttcgccatcgaagccgagaacagcatcctggacatcagcggcttcagcaagcagtacaactgtgccttcatctggcagaaggacggcgtgaagaagctgaacctgtacctgatcatcaactacttcaagggcggcaagctgcggttcaagaagatcaaacctgaagccttcgaagccaacagattctacaccgtgatcaacaaaaagagcggcgagatcgtgcccatggaggtgaacttcaacttcgacgaccccaacctgatcatcctgcctctggcctttggcaagagacagggcagagaattcatctggaacgacctgctgtccctggaaaccggcagcctgaagctggccaacggaagagtgatcgagaagacactgtacaacagaagaacccggcaggatgagcctgccctgttcgtggccctgaccttcgagcggcgggaggtcctggactcctccaatatcaaaccaatgaacctgatcggcgtggcaagaggcgaaaacatccccgccgtgatcgccctgaccgaccccgagggctgcccactgagccggtttaaggatagcctgggaaacccaacccacatcctgagaatcggcgagagctataaggagaagcagcggaccatccaggccaagaaggaggtggagcagcggagagccggcggctacagccggaagtacgccagcaaagccaagaatctggcagacgatatggtgagaaacaccgctagagatctgctgtactacgccgtgacccaggatgccatgctgatcttcgccaacctgagccggggcttcggccggcagggcaagcggaccttcatggccgagagacagtacacacggatggaggactggctgaccgccaagctggcctacgagggcctgagcaagacctacctgtccaagacactggcccagtacacctccaagacatgcagcaactgtgggtttaccatcaccagcgccgactacgacagggtgctggagaagctgaagaagacagcaacaggctggatgaccacaattaacggcaaggagctgaaggtggagggccagattacctactacaacagatacaagagacagaacgtagtcaaggacctgtccgtcgagctggatagactgagcgaagaatctgtgaacaacgacatctcctcctggacaaagggcagaagcggagaagctctgagcctcctgaagaaaagattctcccatagacccgtgcaggagaagttcgtgtgcctgaactgcggcttcgagacacacgcagccgagcaagccgccctgaacatcgccagatcctggctgttcctgcggagccaggagtacaagaaataccagacaaacaagacaaccggcaacaccgataagagagccttcgtcgagacctggcagtccttttaccggaagaagcttaaggaggtgtggaaacctgccgtgcggtctggcggatctggcggaggctccacaagcctgcccggcctgatggccttcgaggacgtggccgtgtacttcagccaggaggagtggggcctgctggacgccgtgcagagggccctgtacaggcacgtgatgctggagaacttcgccctggtggccagcctgggcctgagcgccagccccccccacgtggtgatccagctgcagaggggcgaggagccctgggtgcccagcggcctggacatgaccagcgccaggaacggccacaggaggcccaccagccccaagaaaaagagaaaagtctaagctgccttctgcggggcttgccttctggccatgcccttcttctctcccttgcacctgtacctcttggtctttgaataaagcctgagtaggaaggctagcaaaaaaaaaaaaaaaaaaaaaaaaaaaaaaaaaaaaaaaaaaaaaaaaaaaaaaaaaaaaaaaaaaaaaaaaaaaaaaaa

SEQ ID NO: 2699 - RNA, 5419 nt, synthetic construct
  source 1..5419: mol_type = other RNA
aggaaataagagagaaaagaagagtaagaagaaatataagagccaccatggcccctaagaagaagcgtaaagtgagccgggtgaacggcagcggcagcggcggcggcatgaaccacgaccaggagttcgacccccctaaggtgtaccctcccgtccccgccgagaagagaaagcccatccgggtcctgagcctgttcgatggcatcgccaccggtctgctggtgctgaaggacctgggcatccaggtggataggtacattgcctccgaggtgtgcgaggactccatcaccgtgggaatggtgcgtcatcagggcaagatcatgtacgtgggcgacgtgcggagcgtgacacagaagcatatccaggagtggggccctttcgacctggtgatcggcggcagcccttgcaatgacctgagcatcgtgaacccagcccggaagggcctgtacgagggaaccggcagactgttcttcgagttttacagactgctgcacgacgcccggcctaaggaaggcgacgaccggcccttcttttggctgttcgagaatgtggtggccatgggagtcagcgacaagcgggatattagccggttcctggagagcaaccccgtgatgatcgatgccaaggaagtgagcgccgcccaccgggccagatacttctggggcaatctgcctggcatgaacagacccctggccagcaccgtgaacgacaagctggagctgcaggagtgcctggagcacggccggatcgccaagttcagcaaggtgagaaccatcaccacccgaagcaacagcatcaaacaaggcaaggaccagcactttcctgtgttcatgaacgagaaggaggacatcctgtggtgtaccgagatggagagagtgttcgggttcccagtccactacacagatgtcagcaacatgtctagactggccagacagagactgctgggaagaagctggtccgtccctgtgatcagacacctgttcgcccctctgaaggagtacttcgcctgcgtgagcagcggcaacagcaacgccaacagccggggccccagcttctctagcggcctggtgccactgtccctgagagggagccacatgggccccatggagatctacaaaaccgtgagcgcctggaagcggcagcctgtgcgcgtgctgagcctgtttcggaatatcgataaagtcctgaaaagcctgggattcctggagagcggctctggctccggcggtggcaccctgaagtacgtggaggatgtgacaaacgtggtcagacgggatgtggagaagtggggccccttcgatctggtgtacggcagcacccaacccctgggcagctcttgtgaccggtgccctggctggtacatgtttcagttccaccggatcctgcagtacgccctgccgagacaggagtcccagcggccattcttttggattttcatggacaacttgctgctgaccgaggatgaccaggaaactaccactcggttcctgcagaccgaagccgtgaccctgcaggacgtgagaggccgggactaccagaacgccatgcgggtgtggtccaacatccctggactgaaaagcaagcacgcacctctgacccctaaagaagaggagtacctgcaggcccaggtgcggagcagaagcaagctggacgcccctaaggtggatctgctggtgaagaattgcctcctgcccctgagagagtacttcaagtatttcagccagaatagtctgcccctgggcggcccaagcagcggcgcccctcctcccagcggcggcagcccagccggctccccaacctctaccgaggagggcacctctgagtccgccacccccgagagcggccctggcacctccaccgagcccagcgagggcagcgcacccggcagccctgccggcagccccacctccacagaggagggaaccagcaccgagcccagcgaaggcagcgccccaggcaccagcaccgagcctagtgagggcggctctggcggcggcagcgcccaggagattaaacggatcaacaagatcagaagaagacttgtgaaagacagcaacaccaagaaggccggcaagacaggccccatgaaaaccctgctggttagagtgatgacacccgatctgagagagcggctggaaaacctgagaaagaagcctgaaaatatcccccagcccatcagcaatacatctagagccaacctgaataagctgctgaccgattacaccgaaatgaagaaggcgatcctgcatgtgtactgggaagagttccagaaggaccctgtgggcctgatgagccgggtggcccagcctgccagcaagaagatcgatcagaacaagctgaaacctgagatggacgagaagggcaacctgaccaccgccggctttgcctgctctcagtgtggccagcccctgttcgtgtacaagctggagcaggtgtctgagaagggcaaggcttacaccaactacttcggacggtgcaatgtggccgagcacgaaaagctgatcctgctggcccagctgaagcccgagaaggatagcgacgaagccgtgacatatagcctgggaaagtttgggcagagggccctggatttctacagcattcatgtgaccaaggagtccacccaccccgtgaagcccctggcccagatcgccggaaacagatacgcctccggacctgtgggaaaggccctgagcgacgcatgtatgggcacaatcgcctccttcctgtctaagtaccaggacatcatcatcgaacaccagaaggtggtgaagggcaaccagaagagactggagagcctgcgggagctggccggcaaggaaaacctggaataccctagcgtgaccctgccacctcagcctcacaccaaggagggcgttgatgcctacaacgaagtgatcgcccgggtgcgaatgtgggtgaacctgaacctgtggcagaagctgaagctaagcagagatgatgccaagcctctgctgagactgaagggattcccttcctttcctctggtcgagagacaggccaacgaagtggactggtgggacatggtgtgtaacgtgaagaagctgatcaacgagaaaaaggaggatggcaaggtgttttggcagaatctggctggctacaagagacaggaagccctgagaccatacctgagcagcgaggaagatcggaagaagggaaagaaattcgctcggtaccagctgggcgacctgctgctgcacctggaaaagaagcacggcgaggactggggaaaggtgtacgacgaggcctgggagcggattgacaagaaagtggaaggcctgagcaagcacatcaagctggaagaggaacggagaagcgaggacgcccagagcaaggccgccctgaccgactggctgcgggctaaggccagcttcgtgatcgagggcctgaaggaggccgacaaggacgagttctgcagatgcgagctgaagctgcagaagtggtacggggacctgcggggaaagcccttcgccatcgaagccgagaacagcatcctggacatcagcggcttcagcaagcagtacaactgtgccttcatctggcagaaggacggcgtgaagaagctgaacctgtacctgatcatcaactacttcaagggcggcaagctgcggttcaagaagatcaaacctgaagccttcgaagccaacagattctacaccgtgatcaacaaaaagagcggcgagatcgtgcccatggaggtgaacttcaacttcgacgaccccaacctgatcatcctgcctctggcctttggcaagagacagggcagagaattcatctggaacgacctgctgtccctggaaaccggcagcctgaagctggccaacggaagagtgatcgagaagacactgtacaacagaagaacccggcaggatgagcctgccctgttcgtggccctgaccttcgagcggcgggaggtcctggactcctccaatatcaaaccaatgaacctgatcggcgtggcaagaggcgaaaacatccccgccgtgatcgccctgaccgaccccgagggctgcccactgagccggtttaaggatagcctgggaaacccaacccacatcctgagaatcggcgagagctataaggagaagcagcggaccatccaggccaagaaggaggtggagcagcggagagccggcggctacagccggaagtacgccagcaaagccaagaatctggcagacgatatggtgagaaacaccgctagagatctgctgtactacgccgtgacccaggatgccatgctgatcttcgccaacctgagccggggcttcggccggcagggcaagcggaccttcatggccgagagacagtacacacggatggaggactggctgaccgccaagctggcctacgagggcctgagcaagacctacctgtccaagacactggcccagtacacctccaagacatgcagcaactgtgggtttaccatcaccagcgccgactacgacagggtgctggagaagctgaagaagacagcaacaggctggatgaccacaattaacggcaaggagctgaaggtggagggccagattacctactacaacagatacaagagacagaacgtagtcaaggacctgtccgtcgagctggatagactgagcgaagaatctgtgaacaacgacatctcctcctggacaaagggcagaagcggagaagctctgagcctcctgaagaaaagattctcccatagacccgtgcaggagaagttcgtgtgcctgaactgcggcttcgagacacacgcagccgagcaagccgccctgaacatcgccagatcctggctgttcctgcggagccaggagtacaagaaataccagacaaacaagacaaccggcaacaccgataagagagccttcgtcgagacctggcagtccttttaccggaagaagcttaaggaggtgtggaaacctgccgtgcggtctggcggatctggcggaggctccacaagctgctaccaggacagcgtgaccttcgacgacgtggccgtggacttcacccaggaggagtggaccctgctggacagcacccagaggagcctgtacagcgacgtgatgctggagaactacaagaacctggccaccgtgggcggccagatcatcaagcccagcctgatcagctggctggagcaggaggagagcaggaccgtgcagggcggcgtgctgaggggcaggaagacccagtggaggggcaccaccagccccaagaaaaagagaaaagtctaagctgccttctgcggggcttgccttctggccatgcccttcttctctcccttgcacctgtacctcttggtctttgaataaagcctgagtaggaaggctagcaaaaaaaaaaaaaaaaaaaaaaaaaaaaaaaaaaaaaaaaaaaaaaaaaaaaaaaaaaaaaaaaaaaaaaaaaaaaaaaa

SEQ ID NO: 2700 - RNA, 5419 nt, synthetic construct
  source 1..5419: mol_type = other RNA
aggaaataagagagaaaagaagagtaagaagaaatataagagccaccatggcccctaagaagaagcgtaaagtgagccgggtgaacggcagcggcagcggcggcggcatgaaccacgaccaggagttcgacccccctaaggtgtaccctcccgtccccgccgagaagagaaagcccatccgggtcctgagcctgttcgatggcatcgccaccggtctgctggtgctgaaggacctgggcatccaggtggataggtacattgcctccgaggtgtgcgaggactccatcaccgtgggaatggtgcgtcatcagggcaagatcatgtacgtgggcgacgtgcggagcgtgacacagaagcatatccaggagtggggccctttcgacctggtgatcggcggcagcccttgcaatgacctgagcatcgtgaacccagcccggaagggcctgtacgagggaaccggcagactgttcttcgagttttacagactgctgcacgacgcccggcctaaggaaggcgacgaccggcccttcttttggctgttcgagaatgtggtggccatgggagtcagcgacaagcgggatattagccggttcctggagagcaaccccgtgatgatcgatgccaaggaagtgagcgccgcccaccgggccagatacttctggggcaatctgcctggcatgaacagacccctggccagcaccgtgaacgacaagctggagctgcaggagtgcctggagcacggccggatcgccaagttcagcaaggtgagaaccatcaccacccgaagcaacagcatcaaacaaggcaaggaccagcactttcctgtgttcatgaacgagaaggaggacatcctgtggtgtaccgagatggagagagtgttcgggttcccagtccactacacagatgtcagcaacatgtctagactggccagacagagactgctgggaagaagctggtccgtccctgtgatcagacacctgttcgcccctctgaaggagtacttcgcctgcgtgagcagcggcaacagcaacgccaacagccggggccccagcttctctagcggcctggtgccactgtccctgagagggagccacatgggccccatggagatctacaaaaccgtgagcgcctggaagcggcagcctgtgcgcgtgctgagcctgtttcggaatatcgataaagtcctgaaaagcctgggattcctggagagcggctctggctccggcggtggcaccctgaagtacgtggaggatgtgacaaacgtggtcagacgggatgtggagaagtggggccccttcgatctggtgtacggcagcacccaacccctgggcagctcttgtgaccggtgccctggctggtacatgtttcagttccaccggatcctgcagtacgccctgccgagacaggagtcccagcggccattcttttggattttcatggacaacttgctgctgaccgaggatgaccaggaaactaccactcggttcctgcagaccgaagccgtgaccctgcaggacgtgagaggccgggactaccagaacgccatgcgggtgtggtccaacatccctggactgaaaagcaagcacgcacctctgacccctaaagaagaggagtacctgcaggcccaggtgcggagcagaagcaagctggacgcccctaaggtggatctgctggtgaagaattgcctcctgcccctgagagagtacttcaagtatttcagccagaatagtctgcccctgggcggcccaagcagcggcgcccctcctcccagcggcggcagcccagccggctccccaacctctaccgaggagggcacctctgagtccgccacccccgagagcggccctggcacctccaccgagcccagcgagggcagcgcacccggcagccctgccggcagccccacctccacagaggagggaaccagcaccgagcccagcgaaggcagcgccccaggcaccagcaccgagcctagtgagggcggctctggcggcggcagcgcccaggagattaaacggatcaacaagatcagaagaagacttgtgaaagacagcaacaccaagaaggccggcaagacaggccccatgaaaaccctgctggttagagtgatgacacccgatctgagagagcggctggaaaacctgagaaagaagcctgaaaatatcccccagcccatcagcaatacatctagagccaacctgaataagctgctgaccgattacaccgaaatgaagaaggcgatcctgcatgtgtactgggaagagttccagaaggaccctgtgggcctgatgagccgggtggcccagcctgccagcaagaagatcgatcagaacaagctgaaacctgagatggacgagaagggcaacctgaccaccgccggctttgcctgctctcagtgtggccagcccctgttcgtgtacaagctggagcaggtgtctgagaagggcaaggcttacaccaactacttcggacggtgcaatgtggccgagcacgaaaagctgatcctgctggcccagctgaagcccgagaaggatagcgacgaagccgtgacatatagcctgggaaagtttgggcagagggccctggatttctacagcattcatgtgaccaaggagtccacccaccccgtgaagcccctggcccagatcgccggaaacagatacgcctccggacctgtgggaaaggccctgagcgacgcatgtatgggcacaatcgcctccttcctgtctaagtaccaggacatcatcatcgaacaccagaaggtggtgaagggcaaccagaagagactggagagcctgcgggagctggccggcaaggaaaacctggaataccctagcgtgaccctgccacctcagcctcacaccaaggagggcgttgatgcctacaacgaagtgatcgcccgggtgcgaatgtgggtgaacctgaacctgtggcagaagctgaagctaagcagagatgatgccaagcctctgctgagactgaagggattcccttcctttcctctggtcgagagacaggccaacgaagtggactggtgggacatggtgtgtaacgtgaagaagctgatcaacgagaaaaaggaggatggcaaggtgttttggcagaatctggctggctacaagagacaggaagccctgagaccatacctgagcagcgaggaagatcggaagaagggaaagaaattcgctcggtaccagctgggcgacctgctgctgcacctggaaaagaagcacggcgaggactggggaaaggtgtacgacgaggcctgggagcggattgacaagaaagtggaaggcctgagcaagcacatcaagctggaagaggaacggagaagcgaggacgcccagagcaaggccgccctgaccgactggctgcgggctaaggccagcttcgtgatcgagggcctgaaggaggccgacaaggacgagttctgcagatgcgagctgaagctgcagaagtggtacggggacctgcggggaaagcccttcgccatcgaagccgagaacagcatcctggacatcagcggcttcagcaagcagtacaactgtgccttcatctggcagaaggacggcgtgaagaagctgaacctgtacctgatcatcaactacttcaagggcggcaagctgcggttcaagaagatcaaacctgaagccttcgaagccaacagattctacaccgtgatcaacaaaaagagcggcgagatcgtgcccatggaggtgaacttcaacttcgacgaccccaacctgatcatcctgcctctggcctttggcaagagacagggcagagaattcatctggaacgacctgctgtccctggaaaccggcagcctgaagctggccaacggaagagtgatcgagaagacactgtacaacagaagaacccggcaggatgagcctgccctgttcgtggccctgaccttcgagcggcgggaggtcctggactcctccaatatcaaaccaatgaacctgatcggcgtggcaagaggcgaaaacatccccgccgtgatcgccctgaccgaccccgagggctgcccactgagccggtttaaggatagcctgggaaacccaacccacatcctgagaatcggcgagagctataaggagaagcagcggaccatccaggccaagaaggaggtggagcagcggagagccggcggctacagccggaagtacgccagcaaagccaagaatctggcagacgatatggtgagaaacaccgctagagatctgctgtactacgccgtgacccaggatgccatgctgatcttcgccaacctgagccggggcttcggccggcagggcaagcggaccttcatggccgagagacagtacacacggatggaggactggctgaccgccaagctggcctacgagggcctgagcaagacctacctgtccaagacactggcccagtacacctccaagacatgcagcaactgtgggtttaccatcaccagcgccgactacgacagggtgctggagaagctgaagaagacagcaacaggctggatgaccacaattaacggcaaggagctgaaggtggagggccagattacctactacaacagatacaagagacagaacgtagtcaaggacctgtccgtcgagctggatagactgagcgaagaatctgtgaacaacgacatctcctcctggacaaagggcagaagcggagaagctctgagcctcctgaagaaaagattctcccatagacccgtgcaggagaagttcgtgtgcctgaactgcggcttcgagacacacgcagccgagcaagccgccctgaacatcgccagatcctggctgttcctgcggagccaggagtacaagaaataccagacaaacaagacaaccggcaacaccgataagagagccttcgtcgagacctggcagtccttttaccggaagaagcttaaggaggtgtggaaacctgccgtgcggtctggcggatctggcggaggctccacaagccaggagcccgtgaccttcgaggacgtggccgtgtacttcacccagaaccagtgggccagcctggacagcgcccagagggccctgtacagggaggtgatgctggagaactacgccaacgtggccagcctggtggtgagccccttccccaggcccgacctgatcagccagctggagaggggcgaggccccctgggaccccgacccctgggaggccgaggacctgaggggcatctgccccggcggcaccagccccaagaaaaagagaaaagtctaagctgccttctgcggggcttgccttctggccatgcccttcttctctcccttgcacctgtacctcttggtctttgaataaagcctgagtaggaaggctagcaaaaaaaaaaaaaaaaaaaaaaaaaaaaaaaaaaaaaaaaaaaaaaaaaaaaaaaaaaaaaaaaaaaaaaaaaaaaaaaa

SEQ ID NO: 2701 - RNA, 5419 nt, synthetic construct
  source 1..5419: mol_type = other RNA
aggaaataagagagaaaagaagagtaagaagaaatataagagccaccatggcccctaagaagaagcgtaaagtgagccgggtgaacggcagcggcagcggcggcggcatgaaccacgaccaggagttcgacccccctaaggtgtaccctcccgtccccgccgagaagagaaagcccatccgggtcctgagcctgttcgatggcatcgccaccggtctgctggtgctgaaggacctgggcatccaggtggataggtacattgcctccgaggtgtgcgaggactccatcaccgtgggaatggtgcgtcatcagggcaagatcatgtacgtgggcgacgtgcggagcgtgacacagaagcatatccaggagtggggccctttcgacctggtgatcggcggcagcccttgcaatgacctgagcatcgtgaacccagcccggaagggcctgtacgagggaaccggcagactgttcttcgagttttacagactgctgcacgacgcccggcctaaggaaggcgacgaccggcccttcttttggctgttcgagaatgtggtggccatgggagtcagcgacaagcgggatattagccggttcctggagagcaaccccgtgatgatcgatgccaaggaagtgagcgccgcccaccgggccagatacttctggggcaatctgcctggcatgaacagacccctggccagcaccgtgaacgacaagctggagctgcaggagtgcctggagcacggccggatcgccaagttcagcaaggtgagaaccatcaccacccgaagcaacagcatcaaacaaggcaaggaccagcactttcctgtgttcatgaacgagaaggaggacatcctgtggtgtaccgagatggagagagtgttcgggttcccagtccactacacagatgtcagcaacatgtctagactggccagacagagactgctgggaagaagctggtccgtccctgtgatcagacacctgttcgcccctctgaaggagtacttcgcctgcgtgagcagcggcaacagcaacgccaacagccggggccccagcttctctagcggcctggtgccactgtccctgagagggagccacatgggccccatggagatctacaaaaccgtgagcgcctggaagcggcagcctgtgcgcgtgctgagcctgtttcggaatatcgataaagtcctgaaaagcctgggattcctggagagcggctctggctccggcggtggcaccctgaagtacgtggaggatgtgacaaacgtggtcagacgggatgtggagaagtggggccccttcgatctggtgtacggcagcacccaacccctgggcagctcttgtgaccggtgccctggctggtacatgtttcagttccaccggatcctgcagtacgccctgccgagacaggagtcccagcggccattcttttggattttcatggacaacttgctgctgaccgaggatgaccaggaaactaccactcggttcctgcagaccgaagccgtgaccctgcaggacgtgagaggccgggactaccagaacgccatgcgggtgtggtccaacatccctggactgaaaagcaagcacgcacctctgacccctaaagaagaggagtacctgcaggcccaggtgcggagcagaagcaagctggacgcccctaaggtggatctgctggtgaagaattgcctcctgcccctgagagagtacttcaagtatttcagccagaatagtctgcccctgggcggcccaagcagcggcgcccctcctcccagcggcggcagcccagccggctccccaacctctaccgaggagggcacctctgagtccgccacccccgagagcggccctggcacctccaccgagcccagcgagggcagcgcacccggcagccctgccggcagccccacctccacagaggagggaaccagcaccgagcccagcgaaggcagcgccccaggcaccagcaccgagcctagtgagggcggctctggcggcggcagcgcccaggagattaaacggatcaacaagatcagaagaagacttgtgaaagacagcaacaccaagaaggccggcaagacaggccccatgaaaaccctgctggttagagtgatgacacccgatctgagagagcggctggaaaacctgagaaagaagcctgaaaatatcccccagcccatcagcaatacatctagagccaacctgaataagctgctgaccgattacaccgaaatgaagaaggcgatcctgcatgtgtactgggaagagttccagaaggaccctgtgggcctgatgagccgggtggcccagcctgccagcaagaagatcgatcagaacaagctgaaacctgagatggacgagaagggcaacctgaccaccgccggctttgcctgctctcagtgtggccagcccctgttcgtgtacaagctggagcaggtgtctgagaagggcaaggcttacaccaactacttcggacggtgcaatgtggccgagcacgaaaagctgatcctgctggcccagctgaagcccgagaaggatagcgacgaagccgtgacatatagcctgggaaagtttgggcagagggccctggatttctacagcattcatgtgaccaaggagtccacccaccccgtgaagcccctggcccagatcgccggaaacagatacgcctccggacctgtgggaaaggccctgagcgacgcatgtatgggcacaatcgcctccttcctgtctaagtaccaggacatcatcatcgaacaccagaaggtggtgaagggcaaccagaagagactggagagcctgcgggagctggccggcaaggaaaacctggaataccctagcgtgaccctgccacctcagcctcacaccaaggagggcgttgatgcctacaacgaagtgatcgcccgggtgcgaatgtgggtgaacctgaacctgtggcagaagctgaagctaagcagagatgatgccaagcctctgctgagactgaagggattcccttcctttcctctggtcgagagacaggccaacgaagtggactggtgggacatggtgtgtaacgtgaagaagctgatcaacgagaaaaaggaggatggcaaggtgttttggcagaatctggctggctacaagagacaggaagccctgagaccatacctgagcagcgaggaagatcggaagaagggaaagaaattcgctcggtaccagctgggcgacctgctgctgcacctggaaaagaagcacggcgaggactggggaaaggtgtacgacgaggcctgggagcggattgacaagaaagtggaaggcctgagcaagcacatcaagctggaagaggaacggagaagcgaggacgcccagagcaaggccgccctgaccgactggctgcgggctaaggccagcttcgtgatcgagggcctgaaggaggccgacaaggacgagttctgcagatgcgagctgaagctgcagaagtggtacggggacctgcggggaaagcccttcgccatcgaagccgagaacagcatcctggacatcagcggcttcagcaagcagtacaactgtgccttcatctggcagaaggacggcgtgaagaagctgaacctgtacctgatcatcaactacttcaagggcggcaagctgcggttcaagaagatcaaacctgaagccttcgaagccaacagattctacaccgtgatcaacaaaaagagcggcgagatcgtgcccatggaggtgaacttcaacttcgacgaccccaacctgatcatcctgcctctggcctttggcaagagacagggcagagaattcatctggaacgacctgctgtccctggaaaccggcagcctgaagctggccaacggaagagtgatcgagaagacactgtacaacagaagaacccggcaggatgagcctgccctgttcgtggccctgaccttcgagcggcgggaggtcctggactcctccaatatcaaaccaatgaacctgatcggcgtggcaagaggcgaaaacatccccgccgtgatcgccctgaccgaccccgagggctgcccactgagccggtttaaggatagcctgggaaacccaacccacatcctgagaatcggcgagagctataaggagaagcagcggaccatccaggccaagaaggaggtggagcagcggagagccggcggctacagccggaagtacgccagcaaagccaagaatctggcagacgatatggtgagaaacaccgctagagatctgctgtactacgccgtgacccaggatgccatgctgatcttcgccaacctgagccggggcttcggccggcagggcaagcggaccttcatggccgagagacagtacacacggatggaggactggctgaccgccaagctggcctacgagggcctgagcaagacctacctgtccaagacactggcccagtacacctccaagacatgcagcaactgtgggtttaccatcaccagcgccgactacgacagggtgctggagaagctgaagaagacagcaacaggctggatgaccacaattaacggcaaggagctgaaggtggagggccagattacctactacaacagatacaagagacagaacgtagtcaaggacctgtccgtcgagctggatagactgagcgaagaatctgtgaacaacgacatctcctcctggacaaagggcagaagcggagaagctctgagcctcctgaagaaaagattctcccatagacccgtgcaggagaagttcgtgtgcctgaactgcggcttcgagacacacgcagccgagcaagccgccctgaacatcgccagatcctggctgttcctgcggagccaggagtacaagaaataccagacaaacaagacaaccggcaacaccgataagagagccttcgtcgagacctggcagtccttttaccggaagaagcttaaggaggtgtggaaacctgccgtgcggtctggcggatctggcggaggctccacaagcatgcccctgggcagcgagctgttcagggacgtggccatcgtgttcagccaggaggagtggcagtggctggcccccgcccagagggacctgtacagggacgtgatgctggagacctacagcaacctggtgagcctgggcctggccatcagcaagcccgacgtgatcagcttcctggagcagggcaaggagccctggatggtggagagggtggtggccggcggcctgtgccccgtgctggagagcaccagccccaagaaaaagagaaaagtctaagctgccttctgcggggcttgccttctggccatgcccttcttctctcccttgcacctgtacctcttggtctttgaataaagcctgagtaggaaggctagcaaaaaaaaaaaaaaaaaaaaaaaaaaaaaaaaaaaaaaaaaaaaaaaaaaaaaaaaaaaaaaaaaaaaaaaaaaaaaaaa

SEQ ID NO: 2702 - RNA, 5419 nt, synthetic construct
  source 1..5419: mol_type = other RNA
aggaaataagagagaaaagaagagtaagaagaaatataagagccaccatggcccctaagaagaagcgtaaagtgagccgggtgaacggcagcggcagcggcggcggcatgaaccacgaccaggagttcgacccccctaaggtgtaccctcccgtccccgccgagaagagaaagcccatccgggtcctgagcctgttcgatggcatcgccaccggtctgctggtgctgaaggacctgggcatccaggtggataggtacattgcctccgaggtgtgcgaggactccatcaccgtgggaatggtgcgtcatcagggcaagatcatgtacgtgggcgacgtgcggagcgtgacacagaagcatatccaggagtggggccctttcgacctggtgatcggcggcagcccttgcaatgacctgagcatcgtgaacccagcccggaagggcctgtacgagggaaccggcagactgttcttcgagttttacagactgctgcacgacgcccggcctaaggaaggcgacgaccggcccttcttttggctgttcgagaatgtggtggccatgggagtcagcgacaagcgggatattagccggttcctggagagcaaccccgtgatgatcgatgccaaggaagtgagcgccgcccaccgggccagatacttctggggcaatctgcctggcatgaacagacccctggccagcaccgtgaacgacaagctggagctgcaggagtgcctggagcacggccggatcgccaagttcagcaaggtgagaaccatcaccacccgaagcaacagcatcaaacaaggcaaggaccagcactttcctgtgttcatgaacgagaaggaggacatcctgtggtgtaccgagatggagagagtgttcgggttcccagtccactacacagatgtcagcaacatgtctagactggccagacagagactgctgggaagaagctggtccgtccctgtgatcagacacctgttcgcccctctgaaggagtacttcgcctgcgtgagcagcggcaacagcaacgccaacagccggggccccagcttctctagcggcctggtgccactgtccctgagagggagccacatgggccccatggagatctacaaaaccgtgagcgcctggaagcggcagcctgtgcgcgtgctgagcctgtttcggaatatcgataaagtcctgaaaagcctgggattcctggagagcggctctggctccggcggtggcaccctgaagtacgtggaggatgtgacaaacgtggtcagacgggatgtggagaagtggggccccttcgatctggtgtacggcagcacccaacccctgggcagctcttgtgaccggtgccctggctggtacatgtttcagttccaccggatcctgcagtacgccctgccgagacaggagtcccagcggccattcttttggattttcatggacaacttgctgctgaccgaggatgaccaggaaactaccactcggttcctgcagaccgaagccgtgaccctgcaggacgtgagaggccgggactaccagaacgccatgcgggtgtggtccaacatccctggactgaaaagcaagcacgcacctctgacccctaaagaagaggagtacctgcaggcccaggtgcggagcagaagcaagctggacgcccctaaggtggatctgctggtgaagaattgcctcctgcccctgagagagtacttcaagtatttcagccagaatagtctgcccctgggcggcccaagcagcggcgcccctcctcccagcggcggcagcccagccggctccccaacctctaccgaggagggcacctctgagtccgccacccccgagagcggccctggcacctccaccgagcccagcgagggcagcgcacccggcagccctgccggcagccccacctccacagaggagggaaccagcaccgagcccagcgaaggcagcgccccaggcaccagcaccgagcctagtgagggcggctctggcggcggcagcgcccaggagattaaacggatcaacaagatcagaagaagacttgtgaaagacagcaacaccaagaaggccggcaagacaggccccatgaaaaccctgctggttagagtgatgacacccgatctgagagagcggctggaaaacctgagaaagaagcctgaaaatatcccccagcccatcagcaatacatctagagccaacctgaataagctgctgaccgattacaccgaaatgaagaaggcgatcctgcatgtgtactgggaagagttccagaaggaccctgtgggcctgatgagccgggtggcccagcctgccagcaagaagatcgatcagaacaagctgaaacctgagatggacgagaagggcaacctgaccaccgccggctttgcctgctctcagtgtggccagcccctgttcgtgtacaagctggagcaggtgtctgagaagggcaaggcttacaccaactacttcggacggtgcaatgtggccgagcacgaaaagctgatcctgctggcccagctgaagcccgagaaggatagcgacgaagccgtgacatatagcctgggaaagtttgggcagagggccctggatttctacagcattcatgtgaccaaggagtccacccaccccgtgaagcccctggcccagatcgccggaaacagatacgcctccggacctgtgggaaaggccctgagcgacgcatgtatgggcacaatcgcctccttcctgtctaagtaccaggacatcatcatcgaacaccagaaggtggtgaagggcaaccagaagagactggagagcctgcgggagctggccggcaaggaaaacctggaataccctagcgtgaccctgccacctcagcctcacaccaaggagggcgttgatgcctacaacgaagtgatcgcccgggtgcgaatgtgggtgaacctgaacctgtggcagaagctgaagctaagcagagatgatgccaagcctctgctgagactgaagggattcccttcctttcctctggtcgagagacaggccaacgaagtggactggtgggacatggtgtgtaacgtgaagaagctgatcaacgagaaaaaggaggatggcaaggtgttttggcagaatctggctggctacaagagacaggaagccctgagaccatacctgagcagcgaggaagatcggaagaagggaaagaaattcgctcggtaccagctgggcgacctgctgctgcacctggaaaagaagcacggcgaggactggggaaaggtgtacgacgaggcctgggagcggattgacaagaaagtggaaggcctgagcaagcacatcaagctggaagaggaacggagaagcgaggacgcccagagcaaggccgccctgaccgactggctgcgggctaaggccagcttcgtgatcgagggcctgaaggaggccgacaaggacgagttctgcagatgcgagctgaagctgcagaagtggtacggggacctgcggggaaagcccttcgccatcgaagccgagaacagcatcctggacatcagcggcttcagcaagcagtacaactgtgccttcatctggcagaaggacggcgtgaagaagctgaacctgtacctgatcatcaactacttcaagggcggcaagctgcggttcaagaagatcaaacctgaagccttcgaagccaacagattctacaccgtgatcaacaaaaagagcggcgagatcgtgcccatggaggtgaacttcaacttcgacgaccccaacctgatcatcctgcctctggcctttggcaagagacagggcagagaattcatctggaacgacctgctgtccctggaaaccggcagcctgaagctggccaacggaagagtgatcgagaagacactgtacaacagaagaacccggcaggatgagcctgccctgttcgtggccctgaccttcgagcggcgggaggtcctggactcctccaatatcaaaccaatgaacctgatcggcgtggcaagaggcgaaaacatccccgccgtgatcgccctgaccgaccccgagggctgcccactgagccggtttaaggatagcctgggaaacccaacccacatcctgagaatcggcgagagctataaggagaagcagcggaccatccaggccaagaaggaggtggagcagcggagagccggcggctacagccggaagtacgccagcaaagccaagaatctggcagacgatatggtgagaaacaccgctagagatctgctgtactacgccgtgacccaggatgccatgctgatcttcgccaacctgagccggggcttcggccggcagggcaagcggaccttcatggccgagagacagtacacacggatggaggactggctgaccgccaagctggcctacgagggcctgagcaagacctacctgtccaagacactggcccagtacacctccaagacatgcagcaactgtgggtttaccatcaccagcgccgactacgacagggtgctggagaagctgaagaagacagcaacaggctggatgaccacaattaacggcaaggagctgaaggtggagggccagattacctactacaacagatacaagagacagaacgtagtcaaggacctgtccgtcgagctggatagactgagcgaagaatctgtgaacaacgacatctcctcctggacaaagggcagaagcggagaagctctgagcctcctgaagaaaagattctcccatagacccgtgcaggagaagttcgtgtgcctgaactgcggcttcgagacacacgcagccgagcaagccgccctgaacatcgccagatcctggctgttcctgcggagccaggagtacaagaaataccagacaaacaagacaaccggcaacaccgataagagagccttcgtcgagacctggcagtccttttaccggaagaagcttaaggaggtgtggaaacctgccgtgcggtctggcggatctggcggaggctccacaagcctggcccccgaggaccacggcagcagctacgagggcagcgtgagcttcagggacgtggccatcgacttcagcagggaggagtggaggcacctggacctgagccagaggaacctgtacagggacgtgatgctggagacctacagccacctgctgagcgtgggctaccaggtgcccgaggccgaggtggtgatgctggagcagggcaaggagccctgggccctgcagggcgagaggcccaggcacaccagccccaagaaaaagagaaaagtctaagctgccttctgcggggcttgccttctggccatgcccttcttctctcccttgcacctgtacctcttggtctttgaataaagcctgagtaggaaggctagcaaaaaaaaaaaaaaaaaaaaaaaaaaaaaaaaaaaaaaaaaaaaaaaaaaaaaaaaaaaaaaaaaaaaaaaaaaaaaaaa

SEQ ID NO: 2703 - RNA, 5419 nt, synthetic construct
  source 1..5419: mol_type = other RNA
aggaaataagagagaaaagaagagtaagaagaaatataagagccaccatggcccctaagaagaagcgtaaagtgagccgggtgaacggcagcggcagcggcggcggcatgaaccacgaccaggagttcgacccccctaaggtgtaccctcccgtccccgccgagaagagaaagcccatccgggtcctgagcctgttcgatggcatcgccaccggtctgctggtgctgaaggacctgggcatccaggtggataggtacattgcctccgaggtgtgcgaggactccatcaccgtgggaatggtgcgtcatcagggcaagatcatgtacgtgggcgacgtgcggagcgtgacacagaagcatatccaggagtggggccctttcgacctggtgatcggcggcagcccttgcaatgacctgagcatcgtgaacccagcccggaagggcctgtacgagggaaccggcagactgttcttcgagttttacagactgctgcacgacgcccggcctaaggaaggcgacgaccggcccttcttttggctgttcgagaatgtggtggccatgggagtcagcgacaagcgggatattagccggttcctggagagcaaccccgtgatgatcgatgccaaggaagtgagcgccgcccaccgggccagatacttctggggcaatctgcctggcatgaacagacccctggccagcaccgtgaacgacaagctggagctgcaggagtgcctggagcacggccggatcgccaagttcagcaaggtgagaaccatcaccacccgaagcaacagcatcaaacaaggcaaggaccagcactttcctgtgttcatgaacgagaaggaggacatcctgtggtgtaccgagatggagagagtgttcgggttcccagtccactacacagatgtcagcaacatgtctagactggccagacagagactgctgggaagaagctggtccgtccctgtgatcagacacctgttcgcccctctgaaggagtacttcgcctgcgtgagcagcggcaacagcaacgccaacagccggggccccagcttctctagcggcctggtgccactgtccctgagagggagccacatgggccccatggagatctacaaaaccgtgagcgcctggaagcggcagcctgtgcgcgtgctgagcctgtttcggaatatcgataaagtcctgaaaagcctgggattcctggagagcggctctggctccggcggtggcaccctgaagtacgtggaggatgtgacaaacgtggtcagacgggatgtggagaagtggggccccttcgatctggtgtacggcagcacccaacccctgggcagctcttgtgaccggtgccctggctggtacatgtttcagttccaccggatcctgcagtacgccctgccgagacaggagtcccagcggccattcttttggattttcatggacaacttgctgctgaccgaggatgaccaggaaactaccactcggttcctgcagaccgaagccgtgaccctgcaggacgtgagaggccgggactaccagaacgccatgcgggtgtggtccaacatccctggactgaaaagcaagcacgcacctctgacccctaaagaagaggagtacctgcaggcccaggtgcggagcagaagcaagctggacgcccctaaggtggatctgctggtgaagaattgcctcctgcccctgagagagtacttcaagtatttcagccagaatagtctgcccctgggcggcccaagcagcggcgcccctcctcccagcggcggcagcccagccggctccccaacctctaccgaggagggcacctctgagtccgccacccccgagagcggccctggcacctccaccgagcccagcgagggcagcgcacccggcagccctgccggcagccccacctccacagaggagggaaccagcaccgagcccagcgaaggcagcgccccaggcaccagcaccgagcctagtgagggcggctctggcggcggcagcgcccaggagattaaacggatcaacaagatcagaagaagacttgtgaaagacagcaacaccaagaaggccggcaagacaggccccatgaaaaccctgctggttagagtgatgacacccgatctgagagagcggctggaaaacctgagaaagaagcctgaaaatatcccccagcccatcagcaatacatctagagccaacctgaataagctgctgaccgattacaccgaaatgaagaaggcgatcctgcatgtgtactgggaagagttccagaaggaccctgtgggcctgatgagccgggtggcccagcctgccagcaagaagatcgatcagaacaagctgaaacctgagatggacgagaagggcaacctgaccaccgccggctttgcctgctctcagtgtggccagcccctgttcgtgtacaagctggagcaggtgtctgagaagggcaaggcttacaccaactacttcggacggtgcaatgtggccgagcacgaaaagctgatcctgctggcccagctgaagcccgagaaggatagcgacgaagccgtgacatatagcctgggaaagtttgggcagagggccctggatttctacagcattcatgtgaccaaggagtccacccaccccgtgaagcccctggcccagatcgccggaaacagatacgcctccggacctgtgggaaaggccctgagcgacgcatgtatgggcacaatcgcctccttcctgtctaagtaccaggacatcatcatcgaacaccagaaggtggtgaagggcaaccagaagagactggagagcctgcgggagctggccggcaaggaaaacctggaataccctagcgtgaccctgccacctcagcctcacaccaaggagggcgttgatgcctacaacgaagtgatcgcccgggtgcgaatgtgggtgaacctgaacctgtggcagaagctgaagctaagcagagatgatgccaagcctctgctgagactgaagggattcccttcctttcctctggtcgagagacaggccaacgaagtggactggtgggacatggtgtgtaacgtgaagaagctgatcaacgagaaaaaggaggatggcaaggtgttttggcagaatctggctggctacaagagacaggaagccctgagaccatacctgagcagcgaggaagatcggaagaagggaaagaaattcgctcggtaccagctgggcgacctgctgctgcacctggaaaagaagcacggcgaggactggggaaaggtgtacgacgaggcctgggagcggattgacaagaaagtggaaggcctgagcaagcacatcaagctggaagaggaacggagaagcgaggacgcccagagcaaggccgccctgaccgactggctgcgggctaaggccagcttcgtgatcgagggcctgaaggaggccgacaaggacgagttctgcagatgcgagctgaagctgcagaagtggtacggggacctgcggggaaagcccttcgccatcgaagccgagaacagcatcctggacatcagcggcttcagcaagcagtacaactgtgccttcatctggcagaaggacggcgtgaagaagctgaacctgtacctgatcatcaactacttcaagggcggcaagctgcggttcaagaagatcaaacctgaagccttcgaagccaacagattctacaccgtgatcaacaaaaagagcggcgagatcgtgcccatggaggtgaacttcaacttcgacgaccccaacctgatcatcctgcctctggcctttggcaagagacagggcagagaattcatctggaacgacctgctgtccctggaaaccggcagcctgaagctggccaacggaagagtgatcgagaagacactgtacaacagaagaacccggcaggatgagcctgccctgttcgtggccctgaccttcgagcggcgggaggtcctggactcctccaatatcaaaccaatgaacctgatcggcgtggcaagaggcgaaaacatccccgccgtgatcgccctgaccgaccccgagggctgcccactgagccggtttaaggatagcctgggaaacccaacccacatcctgagaatcggcgagagctataaggagaagcagcggaccatccaggccaagaaggaggtggagcagcggagagccggcggctacagccggaagtacgccagcaaagccaagaatctggcagacgatatggtgagaaacaccgctagagatctgctgtactacgccgtgacccaggatgccatgctgatcttcgccaacctgagccggggcttcggccggcagggcaagcggaccttcatggccgagagacagtacacacggatggaggactggctgaccgccaagctggcctacgagggcctgagcaagacctacctgtccaagacactggcccagtacacctccaagacatgcagcaactgtgggtttaccatcaccagcgccgactacgacagggtgctggagaagctgaagaagacagcaacaggctggatgaccacaattaacggcaaggagctgaaggtggagggccagattacctactacaacagatacaagagacagaacgtagtcaaggacctgtccgtcgagctggatagactgagcgaagaatctgtgaacaacgacatctcctcctggacaaagggcagaagcggagaagctctgagcctcctgaagaaaagattctcccatagacccgtgcaggagaagttcgtgtgcctgaactgcggcttcgagacacacgcagccgagcaagccgccctgaacatcgccagatcctggctgttcctgcggagccaggagtacaagaaataccagacaaacaagacaaccggcaacaccgataagagagccttcgtcgagacctggcagtccttttaccggaagaagcttaaggaggtgtggaaacctgccgtgcggtctggcggatctggcggaggctccacaagcgacgaggccctgatggccttcaaggacgtggccgtggccttcacccagaaggagtggaagctgctgagccccgcccagaggaccctgtacagggacgtgatgctggagaactacagccacatggtgagcctgggcatcgccttccccaagcccaagctgatcacccagctggagcagggcgaggagccctggagggaggagagcgagagcctgctggacctgtgccccgccgagcccaggaccaccagccccaagaaaaagagaaaagtctaagctgccttctgcggggcttgccttctggccatgcccttcttctctcccttgcacctgtacctcttggtctttgaataaagcctgagtaggaaggctagcaaaaaaaaaaaaaaaaaaaaaaaaaaaaaaaaaaaaaaaaaaaaaaaaaaaaaaaaaaaaaaaaaaaaaaaaaaaaaaaa

SEQ ID NO: 2704 - RNA, 5419 nt, synthetic construct
  source 1..5419: mol_type = other RNA
aggaaataagagagaaaagaagagtaagaagaaatataagagccaccatggcccctaagaagaagcgtaaagtgagccgggtgaacggcagcggcagcggcggcggcatgaaccacgaccaggagttcgacccccctaaggtgtaccctcccgtccccgccgagaagagaaagcccatccgggtcctgagcctgttcgatggcatcgccaccggtctgctggtgctgaaggacctgggcatccaggtggataggtacattgcctccgaggtgtgcgaggactccatcaccgtgggaatggtgcgtcatcagggcaagatcatgtacgtgggcgacgtgcggagcgtgacacagaagcatatccaggagtggggccctttcgacctggtgatcggcggcagcccttgcaatgacctgagcatcgtgaacccagcccggaagggcctgtacgagggaaccggcagactgttcttcgagttttacagactgctgcacgacgcccggcctaaggaaggcgacgaccggcccttcttttggctgttcgagaatgtggtggccatgggagtcagcgacaagcgggatattagccggttcctggagagcaaccccgtgatgatcgatgccaaggaagtgagcgccgcccaccgggccagatacttctggggcaatctgcctggcatgaacagacccctggccagcaccgtgaacgacaagctggagctgcaggagtgcctggagcacggccggatcgccaagttcagcaaggtgagaaccatcaccacccgaagcaacagcatcaaacaaggcaaggaccagcactttcctgtgttcatgaacgagaaggaggacatcctgtggtgtaccgagatggagagagtgttcgggttcccagtccactacacagatgtcagcaacatgtctagactggccagacagagactgctgggaagaagctggtccgtccctgtgatcagacacctgttcgcccctctgaaggagtacttcgcctgcgtgagcagcggcaacagcaacgccaacagccggggccccagcttctctagcggcctggtgccactgtccctgagagggagccacatgggccccatggagatctacaaaaccgtgagcgcctggaagcggcagcctgtgcgcgtgctgagcctgtttcggaatatcgataaagtcctgaaaagcctgggattcctggagagcggctctggctccggcggtggcaccctgaagtacgtggaggatgtgacaaacgtggtcagacgggatgtggagaagtggggccccttcgatctggtgtacggcagcacccaacccctgggcagctcttgtgaccggtgccctggctggtacatgtttcagttccaccggatcctgcagtacgccctgccgagacaggagtcccagcggccattcttttggattttcatggacaacttgctgctgaccgaggatgaccaggaaactaccactcggttcctgcagaccgaagccgtgaccctgcaggacgtgagaggccgggactaccagaacgccatgcgggtgtggtccaacatccctggactgaaaagcaagcacgcacctctgacccctaaagaagaggagtacctgcaggcccaggtgcggagcagaagcaagctggacgcccctaaggtggatctgctggtgaagaattgcctcctgcccctgagagagtacttcaagtatttcagccagaatagtctgcccctgggcggcccaagcagcggcgcccctcctcccagcggcggcagcccagccggctccccaacctctaccgaggagggcacctctgagtccgccacccccgagagcggccctggcacctccaccgagcccagcgagggcagcgcacccggcagccctgccggcagccccacctccacagaggagggaaccagcaccgagcccagcgaaggcagcgccccaggcaccagcaccgagcctagtgagggcggctctggcggcggcagcgcccaggagattaaacggatcaacaagatcagaagaagacttgtgaaagacagcaacaccaagaaggccggcaagacaggccccatgaaaaccctgctggttagagtgatgacacccgatctgagagagcggctggaaaacctgagaaagaagcctgaaaatatcccccagcccatcagcaatacatctagagccaacctgaataagctgctgaccgattacaccgaaatgaagaaggcgatcctgcatgtgtactgggaagagttccagaaggaccctgtgggcctgatgagccgggtggcccagcctgccagcaagaagatcgatcagaacaagctgaaacctgagatggacgagaagggcaacctgaccaccgccggctttgcctgctctcagtgtggccagcccctgttcgtgtacaagctggagcaggtgtctgagaagggcaaggcttacaccaactacttcggacggtgcaatgtggccgagcacgaaaagctgatcctgctggcccagctgaagcccgagaaggatagcgacgaagccgtgacatatagcctgggaaagtttgggcagagggccctggatttctacagcattcatgtgaccaaggagtccacccaccccgtgaagcccctggcccagatcgccggaaacagatacgcctccggacctgtgggaaaggccctgagcgacgcatgtatgggcacaatcgcctccttcctgtctaagtaccaggacatcatcatcgaacaccagaaggtggtgaagggcaaccagaagagactggagagcctgcgggagctggccggcaaggaaaacctggaataccctagcgtgaccctgccacctcagcctcacaccaaggagggcgttgatgcctacaacgaagtgatcgcccgggtgcgaatgtgggtgaacctgaacctgtggcagaagctgaagctaagcagagatgatgccaagcctctgctgagactgaagggattcccttcctttcctctggtcgagagacaggccaacgaagtggactggtgggacatggtgtgtaacgtgaagaagctgatcaacgagaaaaaggaggatggcaaggtgttttggcagaatctggctggctacaagagacaggaagccctgagaccatacctgagcagcgaggaagatcggaagaagggaaagaaattcgctcggtaccagctgggcgacctgctgctgcacctggaaaagaagcacggcgaggactggggaaaggtgtacgacgaggcctgggagcggattgacaagaaagtggaaggcctgagcaagcacatcaagctggaagaggaacggagaagcgaggacgcccagagcaaggccgccctgaccgactggctgcgggctaaggccagcttcgtgatcgagggcctgaaggaggccgacaaggacgagttctgcagatgcgagctgaagctgcagaagtggtacggggacctgcggggaaagcccttcgccatcgaagccgagaacagcatcctggacatcagcggcttcagcaagcagtacaactgtgccttcatctggcagaaggacggcgtgaagaagctgaacctgtacctgatcatcaactacttcaagggcggcaagctgcggttcaagaagatcaaacctgaagccttcgaagccaacagattctacaccgtgatcaacaaaaagagcggcgagatcgtgcccatggaggtgaacttcaacttcgacgaccccaacctgatcatcctgcctctggcctttggcaagagacagggcagagaattcatctggaacgacctgctgtccctggaaaccggcagcctgaagctggccaacggaagagtgatcgagaagacactgtacaacagaagaacccggcaggatgagcctgccctgttcgtggccctgaccttcgagcggcgggaggtcctggactcctccaatatcaaaccaatgaacctgatcggcgtggcaagaggcgaaaacatccccgccgtgatcgccctgaccgaccccgagggctgcccactgagccggtttaaggatagcctgggaaacccaacccacatcctgagaatcggcgagagctataaggagaagcagcggaccatccaggccaagaaggaggtggagcagcggagagccggcggctacagccggaagtacgccagcaaagccaagaatctggcagacgatatggtgagaaacaccgctagagatctgctgtactacgccgtgacccaggatgccatgctgatcttcgccaacctgagccggggcttcggccggcagggcaagcggaccttcatggccgagagacagtacacacggatggaggactggctgaccgccaagctggcctacgagggcctgagcaagacctacctgtccaagacactggcccagtacacctccaagacatgcagcaactgtgggtttaccatcaccagcgccgactacgacagggtgctggagaagctgaagaagacagcaacaggctggatgaccacaattaacggcaaggagctgaaggtggagggccagattacctactacaacagatacaagagacagaacgtagtcaaggacctgtccgtcgagctggatagactgagcgaagaatctgtgaacaacgacatctcctcctggacaaagggcagaagcggagaagctctgagcctcctgaagaaaagattctcccatagacccgtgcaggagaagttcgtgtgcctgaactgcggcttcgagacacacgcagccgagcaagccgccctgaacatcgccagatcctggctgttcctgcggagccaggagtacaagaaataccagacaaacaagacaaccggcaacaccgataagagagccttcgtcgagacctggcagtccttttaccggaagaagcttaaggaggtgtggaaacctgccgtgcggtctggcggatctggcggaggctccacaagcgcccaggagagcgtgatgttcagcgacgtgagcatcgacttcagccaggaggagtgggagtgcctgaacgacgaccagagggccctgtacagggacgtgatgctggagaactacagcaacctggtgagcatgggccacagcatcagcaagcccgacgtgatcagcttcctggagcagggcaaggagccctggctggtggacagggagctgaccaggggccagtggcccgtgctggagagcaggaccagccccaagaaaaagagaaaagtctaagctgccttctgcggggcttgccttctggccatgcccttcttctctcccttgcacctgtacctcttggtctttgaataaagcctgagtaggaaggctagcaaaaaaaaaaaaaaaaaaaaaaaaaaaaaaaaaaaaaaaaaaaaaaaaaaaaaaaaaaaaaaaaaaaaaaaaaaaaaaaa

SEQ ID NO: 2705 - RNA, 5419 nt, synthetic construct
  source 1..5419: mol_type = other RNA
aggaaataagagagaaaagaagagtaagaagaaatataagagccaccatggcccctaagaagaagcgtaaagtgagccgggtgaacggcagcggcagcggcggcggcatgaaccacgaccaggagttcgacccccctaaggtgtaccctcccgtccccgccgagaagagaaagcccatccgggtcctgagcctgttcgatggcatcgccaccggtctgctggtgctgaaggacctgggcatccaggtggataggtacattgcctccgaggtgtgcgaggactccatcaccgtgggaatggtgcgtcatcagggcaagatcatgtacgtgggcgacgtgcggagcgtgacacagaagcatatccaggagtggggccctttcgacctggtgatcggcggcagcccttgcaatgacctgagcatcgtgaacccagcccggaagggcctgtacgagggaaccggcagactgttcttcgagttttacagactgctgcacgacgcccggcctaaggaaggcgacgaccggcccttcttttggctgttcgagaatgtggtggccatgggagtcagcgacaagcgggatattagccggttcctggagagcaaccccgtgatgatcgatgccaaggaagtgagcgccgcccaccgggccagatacttctggggcaatctgcctggcatgaacagacccctggccagcaccgtgaacgacaagctggagctgcaggagtgcctggagcacggccggatcgccaagttcagcaaggtgagaaccatcaccacccgaagcaacagcatcaaacaaggcaaggaccagcactttcctgtgttcatgaacgagaaggaggacatcctgtggtgtaccgagatggagagagtgttcgggttcccagtccactacacagatgtcagcaacatgtctagactggccagacagagactgctgggaagaagctggtccgtccctgtgatcagacacctgttcgcccctctgaaggagtacttcgcctgcgtgagcagcggcaacagcaacgccaacagccggggccccagcttctctagcggcctggtgccactgtccctgagagggagccacatgggccccatggagatctacaaaaccgtgagcgcctggaagcggcagcctgtgcgcgtgctgagcctgtttcggaatatcgataaagtcctgaaaagcctgggattcctggagagcggctctggctccggcggtggcaccctgaagtacgtggaggatgtgacaaacgtggtcagacgggatgtggagaagtggggccccttcgatctggtgtacggcagcacccaacccctgggcagctcttgtgaccggtgccctggctggtacatgtttcagttccaccggatcctgcagtacgccctgccgagacaggagtcccagcggccattcttttggattttcatggacaacttgctgctgaccgaggatgaccaggaaactaccactcggttcctgcagaccgaagccgtgaccctgcaggacgtgagaggccgggactaccagaacgccatgcgggtgtggtccaacatccctggactgaaaagcaagcacgcacctctgacccctaaagaagaggagtacctgcaggcccaggtgcggagcagaagcaagctggacgcccctaaggtggatctgctggtgaagaattgcctcctgcccctgagagagtacttcaagtatttcagccagaatagtctgcccctgggcggcccaagcagcggcgcccctcctcccagcggcggcagcccagccggctccccaacctctaccgaggagggcacctctgagtccgccacccccgagagcggccctggcacctccaccgagcccagcgagggcagcgcacccggcagccctgccggcagccccacctccacagaggagggaaccagcaccgagcccagcgaaggcagcgccccaggcaccagcaccgagcctagtgagggcggctctggcggcggcagcgcccaggagattaaacggatcaacaagatcagaagaagacttgtgaaagacagcaacaccaagaaggccggcaagacaggccccatgaaaaccctgctggttagagtgatgacacccgatctgagagagcggctggaaaacctgagaaagaagcctgaaaatatcccccagcccatcagcaatacatctagagccaacctgaataagctgctgaccgattacaccgaaatgaagaaggcgatcctgcatgtgtactgggaagagttccagaaggaccctgtgggcctgatgagccgggtggcccagcctgccagcaagaagatcgatcagaacaagctgaaacctgagatggacgagaagggcaacctgaccaccgccggctttgcctgctctcagtgtggccagcccctgttcgtgtacaagctggagcaggtgtctgagaagggcaaggcttacaccaactacttcggacggtgcaatgtggccgagcacgaaaagctgatcctgctggcccagctgaagcccgagaaggatagcgacgaagccgtgacatatagcctgggaaagtttgggcagagggccctggatttctacagcattcatgtgaccaaggagtccacccaccccgtgaagcccctggcccagatcgccggaaacagatacgcctccggacctgtgggaaaggccctgagcgacgcatgtatgggcacaatcgcctccttcctgtctaagtaccaggacatcatcatcgaacaccagaaggtggtgaagggcaaccagaagagactggagagcctgcgggagctggccggcaaggaaaacctggaataccctagcgtgaccctgccacctcagcctcacaccaaggagggcgttgatgcctacaacgaagtgatcgcccgggtgcgaatgtgggtgaacctgaacctgtggcagaagctgaagctaagcagagatgatgccaagcctctgctgagactgaagggattcccttcctttcctctggtcgagagacaggccaacgaagtggactggtgggacatggtgtgtaacgtgaagaagctgatcaacgagaaaaaggaggatggcaaggtgttttggcagaatctggctggctacaagagacaggaagccctgagaccatacctgagcagcgaggaagatcggaagaagggaaagaaattcgctcggtaccagctgggcgacctgctgctgcacctggaaaagaagcacggcgaggactggggaaaggtgtacgacgaggcctgggagcggattgacaagaaagtggaaggcctgagcaagcacatcaagctggaagaggaacggagaagcgaggacgcccagagcaaggccgccctgaccgactggctgcgggctaaggccagcttcgtgatcgagggcctgaaggaggccgacaaggacgagttctgcagatgcgagctgaagctgcagaagtggtacggggacctgcggggaaagcccttcgccatcgaagccgagaacagcatcctggacatcagcggcttcagcaagcagtacaactgtgccttcatctggcagaaggacggcgtgaagaagctgaacctgtacctgatcatcaactacttcaagggcggcaagctgcggttcaagaagatcaaacctgaagccttcgaagccaacagattctacaccgtgatcaacaaaaagagcggcgagatcgtgcccatggaggtgaacttcaacttcgacgaccccaacctgatcatcctgcctctggcctttggcaagagacagggcagagaattcatctggaacgacctgctgtccctggaaaccggcagcctgaagctggccaacggaagagtgatcgagaagacactgtacaacagaagaacccggcaggatgagcctgccctgttcgtggccctgaccttcgagcggcgggaggtcctggactcctccaatatcaaaccaatgaacctgatcggcgtggcaagaggcgaaaacatccccgccgtgatcgccctgaccgaccccgagggctgcccactgagccggtttaaggatagcctgggaaacccaacccacatcctgagaatcggcgagagctataaggagaagcagcggaccatccaggccaagaaggaggtggagcagcggagagccggcggctacagccggaagtacgccagcaaagccaagaatctggcagacgatatggtgagaaacaccgctagagatctgctgtactacgccgtgacccaggatgccatgctgatcttcgccaacctgagccggggcttcggccggcagggcaagcggaccttcatggccgagagacagtacacacggatggaggactggctgaccgccaagctggcctacgagggcctgagcaagacctacctgtccaagacactggcccagtacacctccaagacatgcagcaactgtgggtttaccatcaccagcgccgactacgacagggtgctggagaagctgaagaagacagcaacaggctggatgaccacaattaacggcaaggagctgaaggtggagggccagattacctactacaacagatacaagagacagaacgtagtcaaggacctgtccgtcgagctggatagactgagcgaagaatctgtgaacaacgacatctcctcctggacaaagggcagaagcggagaagctctgagcctcctgaagaaaagattctcccatagacccgtgcaggagaagttcgtgtgcctgaactgcggcttcgagacacacgcagccgagcaagccgccctgaacatcgccagatcctggctgttcctgcggagccaggagtacaagaaataccagacaaacaagacaaccggcaacaccgataagagagccttcgtcgagacctggcagtccttttaccggaagaagcttaaggaggtgtggaaacctgccgtgcggtctggcggatctggcggaggctccacaagcccccaggtgctggtgagcttcgaggaggtggccgtgctgctgagccaggaggagtggggccacctgggccccgaccagaagaggctgtacagggacgtgatgctggagacctacggcaacctggtgagcctgggcctgcagggcagcaagcccgacgtgatcagcaagctggagcagggcgaggagccctgggccccccacagccccaggatcgagggcagctggatctggaggaggaggaggaccagccccaagaaaaagagaaaagtctaagctgccttctgcggggcttgccttctggccatgcccttcttctctcccttgcacctgtacctcttggtctttgaataaagcctgagtaggaaggctagcaaaaaaaaaaaaaaaaaaaaaaaaaaaaaaaaaaaaaaaaaaaaaaaaaaaaaaaaaaaaaaaaaaaaaaaaaaaaaaaa

SEQ ID NO: 2706 - RNA, 5419 nt, synthetic construct
  source 1..5419: mol_type = other RNA
aggaaataagagagaaaagaagagtaagaagaaatataagagccaccatggcccctaagaagaagcgtaaagtgagccgggtgaacggcagcggcagcggcggcggcatgaaccacgaccaggagttcgacccccctaaggtgtaccctcccgtccccgccgagaagagaaagcccatccgggtcctgagcctgttcgatggcatcgccaccggtctgctggtgctgaaggacctgggcatccaggtggataggtacattgcctccgaggtgtgcgaggactccatcaccgtgggaatggtgcgtcatcagggcaagatcatgtacgtgggcgacgtgcggagcgtgacacagaagcatatccaggagtggggccctttcgacctggtgatcggcggcagcccttgcaatgacctgagcatcgtgaacccagcccggaagggcctgtacgagggaaccggcagactgttcttcgagttttacagactgctgcacgacgcccggcctaaggaaggcgacgaccggcccttcttttggctgttcgagaatgtggtggccatgggagtcagcgacaagcgggatattagccggttcctggagagcaaccccgtgatgatcgatgccaaggaagtgagcgccgcccaccgggccagatacttctggggcaatctgcctggcatgaacagacccctggccagcaccgtgaacgacaagctggagctgcaggagtgcctggagcacggccggatcgccaagttcagcaaggtgagaaccatcaccacccgaagcaacagcatcaaacaaggcaaggaccagcactttcctgtgttcatgaacgagaaggaggacatcctgtggtgtaccgagatggagagagtgttcgggttcccagtccactacacagatgtcagcaacatgtctagactggccagacagagactgctgggaagaagctggtccgtccctgtgatcagacacctgttcgcccctctgaaggagtacttcgcctgcgtgagcagcggcaacagcaacgccaacagccggggccccagcttctctagcggcctggtgccactgtccctgagagggagccacatgggccccatggagatctacaaaaccgtgagcgcctggaagcggcagcctgtgcgcgtgctgagcctgtttcggaatatcgataaagtcctgaaaagcctgggattcctggagagcggctctggctccggcggtggcaccctgaagtacgtggaggatgtgacaaacgtggtcagacgggatgtggagaagtggggccccttcgatctggtgtacggcagcacccaacccctgggcagctcttgtgaccggtgccctggctggtacatgtttcagttccaccggatcctgcagtacgccctgccgagacaggagtcccagcggccattcttttggattttcatggacaacttgctgctgaccgaggatgaccaggaaactaccactcggttcctgcagaccgaagccgtgaccctgcaggacgtgagaggccgggactaccagaacgccatgcgggtgtggtccaacatccctggactgaaaagcaagcacgcacctctgacccctaaagaagaggagtacctgcaggcccaggtgcggagcagaagcaagctggacgcccctaaggtggatctgctggtgaagaattgcctcctgcccctgagagagtacttcaagtatttcagccagaatagtctgcccctgggcggcccaagcagcggcgcccctcctcccagcggcggcagcccagccggctccccaacctctaccgaggagggcacctctgagtccgccacccccgagagcggccctggcacctccaccgagcccagcgagggcagcgcacccggcagccctgccggcagccccacctccacagaggagggaaccagcaccgagcccagcgaaggcagcgccccaggcaccagcaccgagcctagtgagggcggctctggcggcggcagcgcccaggagattaaacggatcaacaagatcagaagaagacttgtgaaagacagcaacaccaagaaggccggcaagacaggccccatgaaaaccctgctggttagagtgatgacacccgatctgagagagcggctggaaaacctgagaaagaagcctgaaaatatcccccagcccatcagcaatacatctagagccaacctgaataagctgctgaccgattacaccgaaatgaagaaggcgatcctgcatgtgtactgggaagagttccagaaggaccctgtgggcctgatgagccgggtggcccagcctgccagcaagaagatcgatcagaacaagctgaaacctgagatggacgagaagggcaacctgaccaccgccggctttgcctgctctcagtgtggccagcccctgttcgtgtacaagctggagcaggtgtctgagaagggcaaggcttacaccaactacttcggacggtgcaatgtggccgagcacgaaaagctgatcctgctggcccagctgaagcccgagaaggatagcgacgaagccgtgacatatagcctgggaaagtttgggcagagggccctggatttctacagcattcatgtgaccaaggagtccacccaccccgtgaagcccctggcccagatcgccggaaacagatacgcctccggacctgtgggaaaggccctgagcgacgcatgtatgggcacaatcgcctccttcctgtctaagtaccaggacatcatcatcgaacaccagaaggtggtgaagggcaaccagaagagactggagagcctgcgggagctggccggcaaggaaaacctggaataccctagcgtgaccctgccacctcagcctcacaccaaggagggcgttgatgcctacaacgaagtgatcgcccgggtgcgaatgtgggtgaacctgaacctgtggcagaagctgaagctaagcagagatgatgccaagcctctgctgagactgaagggattcccttcctttcctctggtcgagagacaggccaacgaagtggactggtgggacatggtgtgtaacgtgaagaagctgatcaacgagaaaaaggaggatggcaaggtgttttggcagaatctggctggctacaagagacaggaagccctgagaccatacctgagcagcgaggaagatcggaagaagggaaagaaattcgctcggtaccagctgggcgacctgctgctgcacctggaaaagaagcacggcgaggactggggaaaggtgtacgacgaggcctgggagcggattgacaagaaagtggaaggcctgagcaagcacatcaagctggaagaggaacggagaagcgaggacgcccagagcaaggccgccctgaccgactggctgcgggctaaggccagcttcgtgatcgagggcctgaaggaggccgacaaggacgagttctgcagatgcgagctgaagctgcagaagtggtacggggacctgcggggaaagcccttcgccatcgaagccgagaacagcatcctggacatcagcggcttcagcaagcagtacaactgtgccttcatctggcagaaggacggcgtgaagaagctgaacctgtacctgatcatcaactacttcaagggcggcaagctgcggttcaagaagatcaaacctgaagccttcgaagccaacagattctacaccgtgatcaacaaaaagagcggcgagatcgtgcccatggaggtgaacttcaacttcgacgaccccaacctgatcatcctgcctctggcctttggcaagagacagggcagagaattcatctggaacgacctgctgtccctggaaaccggcagcctgaagctggccaacggaagagtgatcgagaagacactgtacaacagaagaacccggcaggatgagcctgccctgttcgtggccctgaccttcgagcggcgggaggtcctggactcctccaatatcaaaccaatgaacctgatcggcgtggcaagaggcgaaaacatccccgccgtgatcgccctgaccgaccccgagggctgcccactgagccggtttaaggatagcctgggaaacccaacccacatcctgagaatcggcgagagctataaggagaagcagcggaccatccaggccaagaaggaggtggagcagcggagagccggcggctacagccggaagtacgccagcaaagccaagaatctggcagacgatatggtgagaaacaccgctagagatctgctgtactacgccgtgacccaggatgccatgctgatcttcgccaacctgagccggggcttcggccggcagggcaagcggaccttcatggccgagagacagtacacacggatggaggactggctgaccgccaagctggcctacgagggcctgagcaagacctacctgtccaagacactggcccagtacacctccaagacatgcagcaactgtgggtttaccatcaccagcgccgactacgacagggtgctggagaagctgaagaagacagcaacaggctggatgaccacaattaacggcaaggagctgaaggtggagggccagattacctactacaacagatacaagagacagaacgtagtcaaggacctgtccgtcgagctggatagactgagcgaagaatctgtgaacaacgacatctcctcctggacaaagggcagaagcggagaagctctgagcctcctgaagaaaagattctcccatagacccgtgcaggagaagttcgtgtgcctgaactgcggcttcgagacacacgcagccgagcaagccgccctgaacatcgccagatcctggctgttcctgcggagccaggagtacaagaaataccagacaaacaagacaaccggcaacaccgataagagagccttcgtcgagacctggcagtccttttaccggaagaagcttaaggaggtgtggaaacctgccgtgcggtctggcggatctggcggaggctccacaagcctgatcaacgccgtgacctacaacgacgtgcacatcaacttcacccaggaggagtgggccctgctggaccccagccagaagagcctgtacaaggacgtgatgctggagacctacaggaacctgaccgccatcggctacagctgcgaggaccacaacatcgaggagcactgccagagcagcaccaggcacaggaggtacgagaggaggcacagcagggagaagcccagcgagtacagccagtgcaccagccccaagaaaaagagaaaagtctaagctgccttctgcggggcttgccttctggccatgcccttcttctctcccttgcacctgtacctcttggtctttgaataaagcctgagtaggaaggctagcaaaaaaaaaaaaaaaaaaaaaaaaaaaaaaaaaaaaaaaaaaaaaaaaaaaaaaaaaaaaaaaaaaaaaaaaaaaaaaaa

SEQ ID NO: 2707 - RNA, 5419 nt, synthetic construct
  source 1..5419: mol_type = other RNA
aggaaataagagagaaaagaagagtaagaagaaatataagagccaccatggcccctaagaagaagcgtaaagtgagccgggtgaacggcagcggcagcggcggcggcatgaaccacgaccaggagttcgacccccctaaggtgtaccctcccgtccccgccgagaagagaaagcccatccgggtcctgagcctgttcgatggcatcgccaccggtctgctggtgctgaaggacctgggcatccaggtggataggtacattgcctccgaggtgtgcgaggactccatcaccgtgggaatggtgcgtcatcagggcaagatcatgtacgtgggcgacgtgcggagcgtgacacagaagcatatccaggagtggggccctttcgacctggtgatcggcggcagcccttgcaatgacctgagcatcgtgaacccagcccggaagggcctgtacgagggaaccggcagactgttcttcgagttttacagactgctgcacgacgcccggcctaaggaaggcgacgaccggcccttcttttggctgttcgagaatgtggtggccatgggagtcagcgacaagcgggatattagccggttcctggagagcaaccccgtgatgatcgatgccaaggaagtgagcgccgcccaccgggccagatacttctggggcaatctgcctggcatgaacagacccctggccagcaccgtgaacgacaagctggagctgcaggagtgcctggagcacggccggatcgccaagttcagcaaggtgagaaccatcaccacccgaagcaacagcatcaaacaaggcaaggaccagcactttcctgtgttcatgaacgagaaggaggacatcctgtggtgtaccgagatggagagagtgttcgggttcccagtccactacacagatgtcagcaacatgtctagactggccagacagagactgctgggaagaagctggtccgtccctgtgatcagacacctgttcgcccctctgaaggagtacttcgcctgcgtgagcagcggcaacagcaacgccaacagccggggccccagcttctctagcggcctggtgccactgtccctgagagggagccacatgggccccatggagatctacaaaaccgtgagcgcctggaagcggcagcctgtgcgcgtgctgagcctgtttcggaatatcgataaagtcctgaaaagcctgggattcctggagagcggctctggctccggcggtggcaccctgaagtacgtggaggatgtgacaaacgtggtcagacgggatgtggagaagtggggccccttcgatctggtgtacggcagcacccaacccctgggcagctcttgtgaccggtgccctggctggtacatgtttcagttccaccggatcctgcagtacgccctgccgagacaggagtcccagcggccattcttttggattttcatggacaacttgctgctgaccgaggatgaccaggaaactaccactcggttcctgcagaccgaagccgtgaccctgcaggacgtgagaggccgggactaccagaacgccatgcgggtgtggtccaacatccctggactgaaaagcaagcacgcacctctgacccctaaagaagaggagtacctgcaggcccaggtgcggagcagaagcaagctggacgcccctaaggtggatctgctggtgaagaattgcctcctgcccctgagagagtacttcaagtatttcagccagaatagtctgcccctgggcggcccaagcagcggcgcccctcctcccagcggcggcagcccagccggctccccaacctctaccgaggagggcacctctgagtccgccacccccgagagcggccctggcacctccaccgagcccagcgagggcagcgcacccggcagccctgccggcagccccacctccacagaggagggaaccagcaccgagcccagcgaaggcagcgccccaggcaccagcaccgagcctagtgagggcggctctggcggcggcagcgcccaggagattaaacggatcaacaagatcagaagaagacttgtgaaagacagcaacaccaagaaggccggcaagacaggccccatgaaaaccctgctggttagagtgatgacacccgatctgagagagcggctggaaaacctgagaaagaagcctgaaaatatcccccagcccatcagcaatacatctagagccaacctgaataagctgctgaccgattacaccgaaatgaagaaggcgatcctgcatgtgtactgggaagagttccagaaggaccctgtgggcctgatgagccgggtggcccagcctgccagcaagaagatcgatcagaacaagctgaaacctgagatggacgagaagggcaacctgaccaccgccggctttgcctgctctcagtgtggccagcccctgttcgtgtacaagctggagcaggtgtctgagaagggcaaggcttacaccaactacttcggacggtgcaatgtggccgagcacgaaaagctgatcctgctggcccagctgaagcccgagaaggatagcgacgaagccgtgacatatagcctgggaaagtttgggcagagggccctggatttctacagcattcatgtgaccaaggagtccacccaccccgtgaagcccctggcccagatcgccggaaacagatacgcctccggacctgtgggaaaggccctgagcgacgcatgtatgggcacaatcgcctccttcctgtctaagtaccaggacatcatcatcgaacaccagaaggtggtgaagggcaaccagaagagactggagagcctgcgggagctggccggcaaggaaaacctggaataccctagcgtgaccctgccacctcagcctcacaccaaggagggcgttgatgcctacaacgaagtgatcgcccgggtgcgaatgtgggtgaacctgaacctgtggcagaagctgaagctaagcagagatgatgccaagcctctgctgagactgaagggattcccttcctttcctctggtcgagagacaggccaacgaagtggactggtgggacatggtgtgtaacgtgaagaagctgatcaacgagaaaaaggaggatggcaaggtgttttggcagaatctggctggctacaagagacaggaagccctgagaccatacctgagcagcgaggaagatcggaagaagggaaagaaattcgctcggtaccagctgggcgacctgctgctgcacctggaaaagaagcacggcgaggactggggaaaggtgtacgacgaggcctgggagcggattgacaagaaagtggaaggcctgagcaagcacatcaagctggaagaggaacggagaagcgaggacgcccagagcaaggccgccctgaccgactggctgcgggctaaggccagcttcgtgatcgagggcctgaaggaggccgacaaggacgagttctgcagatgcgagctgaagctgcagaagtggtacggggacctgcggggaaagcccttcgccatcgaagccgagaacagcatcctggacatcagcggcttcagcaagcagtacaactgtgccttcatctggcagaaggacggcgtgaagaagctgaacctgtacctgatcatcaactacttcaagggcggcaagctgcggttcaagaagatcaaacctgaagccttcgaagccaacagattctacaccgtgatcaacaaaaagagcggcgagatcgtgcccatggaggtgaacttcaacttcgacgaccccaacctgatcatcctgcctctggcctttggcaagagacagggcagagaattcatctggaacgacctgctgtccctggaaaccggcagcctgaagctggccaacggaagagtgatcgagaagacactgtacaacagaagaacccggcaggatgagcctgccctgttcgtggccctgaccttcgagcggcgggaggtcctggactcctccaatatcaaaccaatgaacctgatcggcgtggcaagaggcgaaaacatccccgccgtgatcgccctgaccgaccccgagggctgcccactgagccggtttaaggatagcctgggaaacccaacccacatcctgagaatcggcgagagctataaggagaagcagcggaccatccaggccaagaaggaggtggagcagcggagagccggcggctacagccggaagtacgccagcaaagccaagaatctggcagacgatatggtgagaaacaccgctagagatctgctgtactacgccgtgacccaggatgccatgctgatcttcgccaacctgagccggggcttcggccggcagggcaagcggaccttcatggccgagagacagtacacacggatggaggactggctgaccgccaagctggcctacgagggcctgagcaagacctacctgtccaagacactggcccagtacacctccaagacatgcagcaactgtgggtttaccatcaccagcgccgactacgacagggtgctggagaagctgaagaagacagcaacaggctggatgaccacaattaacggcaaggagctgaaggtggagggccagattacctactacaacagatacaagagacagaacgtagtcaaggacctgtccgtcgagctggatagactgagcgaagaatctgtgaacaacgacatctcctcctggacaaagggcagaagcggagaagctctgagcctcctgaagaaaagattctcccatagacccgtgcaggagaagttcgtgtgcctgaactgcggcttcgagacacacgcagccgagcaagccgccctgaacatcgccagatcctggctgttcctgcggagccaggagtacaagaaataccagacaaacaagacaaccggcaacaccgataagagagccttcgtcgagacctggcagtccttttaccggaagaagcttaaggaggtgtggaaacctgccgtgcggtctggcggatctggcggaggctccacaagcaggcccgagagcgtgaccttcgaggacgtggccgtgtacttcagcgagaacgagtggatcggcctgggccccgcccagagggccctgtacagggacgtgatgctggagaactacggcgccgtggccagcctggccgccttccccttccccaagcccgccctgatcagccagctggagaggggcgaggccccctggtgcagcgtgccctggggcgccctggacggcgaggaccccaggagcatcaccagccccaagaaaaagagaaaagtctaagctgccttctgcggggcttgccttctggccatgcccttcttctctcccttgcacctgtacctcttggtctttgaataaagcctgagtaggaaggctagcaaaaaaaaaaaaaaaaaaaaaaaaaaaaaaaaaaaaaaaaaaaaaaaaaaaaaaaaaaaaaaaaaaaaaaaaaaaaaaaa

SEQ ID NO: 2708 - RNA, 5419 nt, synthetic construct
  source 1..5419: mol_type = other RNA
aggaaataagagagaaaagaagagtaagaagaaatataagagccaccatggcccctaagaagaagcgtaaagtgagccgggtgaacggcagcggcagcggcggcggcatgaaccacgaccaggagttcgacccccctaaggtgtaccctcccgtccccgccgagaagagaaagcccatccgggtcctgagcctgttcgatggcatcgccaccggtctgctggtgctgaaggacctgggcatccaggtggataggtacattgcctccgaggtgtgcgaggactccatcaccgtgggaatggtgcgtcatcagggcaagatcatgtacgtgggcgacgtgcggagcgtgacacagaagcatatccaggagtggggccctttcgacctggtgatcggcggcagcccttgcaatgacctgagcatcgtgaacccagcccggaagggcctgtacgagggaaccggcagactgttcttcgagttttacagactgctgcacgacgcccggcctaaggaaggcgacgaccggcccttcttttggctgttcgagaatgtggtggccatgggagtcagcgacaagcgggatattagccggttcctggagagcaaccccgtgatgatcgatgccaaggaagtgagcgccgcccaccgggccagatacttctggggcaatctgcctggcatgaacagacccctggccagcaccgtgaacgacaagctggagctgcaggagtgcctggagcacggccggatcgccaagttcagcaaggtgagaaccatcaccacccgaagcaacagcatcaaacaaggcaaggaccagcactttcctgtgttcatgaacgagaaggaggacatcctgtggtgtaccgagatggagagagtgttcgggttcccagtccactacacagatgtcagcaacatgtctagactggccagacagagactgctgggaagaagctggtccgtccctgtgatcagacacctgttcgcccctctgaaggagtacttcgcctgcgtgagcagcggcaacagcaacgccaacagccggggccccagcttctctagcggcctggtgccactgtccctgagagggagccacatgggccccatggagatctacaaaaccgtgagcgcctggaagcggcagcctgtgcgcgtgctgagcctgtttcggaatatcgataaagtcctgaaaagcctgggattcctggagagcggctctggctccggcggtggcaccctgaagtacgtggaggatgtgacaaacgtggtcagacgggatgtggagaagtggggccccttcgatctggtgtacggcagcacccaacccctgggcagctcttgtgaccggtgccctggctggtacatgtttcagttccaccggatcctgcagtacgccctgccgagacaggagtcccagcggccattcttttggattttcatggacaacttgctgctgaccgaggatgaccaggaaactaccactcggttcctgcagaccgaagccgtgaccctgcaggacgtgagaggccgggactaccagaacgccatgcgggtgtggtccaacatccctggactgaaaagcaagcacgcacctctgacccctaaagaagaggagtacctgcaggcccaggtgcggagcagaagcaagctggacgcccctaaggtggatctgctggtgaagaattgcctcctgcccctgagagagtacttcaagtatttcagccagaatagtctgcccctgggcggcccaagcagcggcgcccctcctcccagcggcggcagcccagccggctccccaacctctaccgaggagggcacctctgagtccgccacccccgagagcggccctggcacctccaccgagcccagcgagggcagcgcacccggcagccctgccggcagccccacctccacagaggagggaaccagcaccgagcccagcgaaggcagcgccccaggcaccagcaccgagcctagtgagggcggctctggcggcggcagcgcccaggagattaaacggatcaacaagatcagaagaagacttgtgaaagacagcaacaccaagaaggccggcaagacaggccccatgaaaaccctgctggttagagtgatgacacccgatctgagagagcggctggaaaacctgagaaagaagcctgaaaatatcccccagcccatcagcaatacatctagagccaacctgaataagctgctgaccgattacaccgaaatgaagaaggcgatcctgcatgtgtactgggaagagttccagaaggaccctgtgggcctgatgagccgggtggcccagcctgccagcaagaagatcgatcagaacaagctgaaacctgagatggacgagaagggcaacctgaccaccgccggctttgcctgctctcagtgtggccagcccctgttcgtgtacaagctggagcaggtgtctgagaagggcaaggcttacaccaactacttcggacggtgcaatgtggccgagcacgaaaagctgatcctgctggcccagctgaagcccgagaaggatagcgacgaagccgtgacatatagcctgggaaagtttgggcagagggccctggatttctacagcattcatgtgaccaaggagtccacccaccccgtgaagcccctggcccagatcgccggaaacagatacgcctccggacctgtgggaaaggccctgagcgacgcatgtatgggcacaatcgcctccttcctgtctaagtaccaggacatcatcatcgaacaccagaaggtggtgaagggcaaccagaagagactggagagcctgcgggagctggccggcaaggaaaacctggaataccctagcgtgaccctgccacctcagcctcacaccaaggagggcgttgatgcctacaacgaagtgatcgcccgggtgcgaatgtgggtgaacctgaacctgtggcagaagctgaagctaagcagagatgatgccaagcctctgctgagactgaagggattcccttcctttcctctggtcgagagacaggccaacgaagtggactggtgggacatggtgtgtaacgtgaagaagctgatcaacgagaaaaaggaggatggcaaggtgttttggcagaatctggctggctacaagagacaggaagccctgagaccatacctgagcagcgaggaagatcggaagaagggaaagaaattcgctcggtaccagctgggcgacctgctgctgcacctggaaaagaagcacggcgaggactggggaaaggtgtacgacgaggcctgggagcggattgacaagaaagtggaaggcctgagcaagcacatcaagctggaagaggaacggagaagcgaggacgcccagagcaaggccgccctgaccgactggctgcgggctaaggccagcttcgtgatcgagggcctgaaggaggccgacaaggacgagttctgcagatgcgagctgaagctgcagaagtggtacggggacctgcggggaaagcccttcgccatcgaagccgagaacagcatcctggacatcagcggcttcagcaagcagtacaactgtgccttcatctggcagaaggacggcgtgaagaagctgaacctgtacctgatcatcaactacttcaagggcggcaagctgcggttcaagaagatcaaacctgaagccttcgaagccaacagattctacaccgtgatcaacaaaaagagcggcgagatcgtgcccatggaggtgaacttcaacttcgacgaccccaacctgatcatcctgcctctggcctttggcaagagacagggcagagaattcatctggaacgacctgctgtccctggaaaccggcagcctgaagctggccaacggaagagtgatcgagaagacactgtacaacagaagaacccggcaggatgagcctgccctgttcgtggccctgaccttcgagcggcgggaggtcctggactcctccaatatcaaaccaatgaacctgatcggcgtggcaagaggcgaaaacatccccgccgtgatcgccctgaccgaccccgagggctgcccactgagccggtttaaggatagcctgggaaacccaacccacatcctgagaatcggcgagagctataaggagaagcagcggaccatccaggccaagaaggaggtggagcagcggagagccggcggctacagccggaagtacgccagcaaagccaagaatctggcagacgatatggtgagaaacaccgctagagatctgctgtactacgccgtgacccaggatgccatgctgatcttcgccaacctgagccggggcttcggccggcagggcaagcggaccttcatggccgagagacagtacacacggatggaggactggctgaccgccaagctggcctacgagggcctgagcaagacctacctgtccaagacactggcccagtacacctccaagacatgcagcaactgtgggtttaccatcaccagcgccgactacgacagggtgctggagaagctgaagaagacagcaacaggctggatgaccacaattaacggcaaggagctgaaggtggagggccagattacctactacaacagatacaagagacagaacgtagtcaaggacctgtccgtcgagctggatagactgagcgaagaatctgtgaacaacgacatctcctcctggacaaagggcagaagcggagaagctctgagcctcctgaagaaaagattctcccatagacccgtgcaggagaagttcgtgtgcctgaactgcggcttcgagacacacgcagccgagcaagccgccctgaacatcgccagatcctggctgttcctgcggagccaggagtacaagaaataccagacaaacaagacaaccggcaacaccgataagagagccttcgtcgagacctggcagtccttttaccggaagaagcttaaggaggtgtggaaacctgccgtgcggtctggcggatctggcggaggctccacaagcttccaggccagcgtgaccttcaaggacgtggccgtggacttcacctgggaggagtggaggctgctggaccccccccagaaggagctgttctgggaggtgatgctggagaactacaggaacctggtgtgcctgggcctggccgacagcaacaaggacgtgatgatgagcaagctggagagcggcgagccccactggatccccaccggcggcgtgctgaggagctgctggcccggctgggagagcaccagccccaagaaaaagagaaaagtctaagctgccttctgcggggcttgccttctggccatgcccttcttctctcccttgcacctgtacctcttggtctttgaataaagcctgagtaggaaggctagcaaaaaaaaaaaaaaaaaaaaaaaaaaaaaaaaaaaaaaaaaaaaaaaaaaaaaaaaaaaaaaaaaaaaaaaaaaaaaaaa

SEQ ID NO: 2709 - RNA, 5419 nt, synthetic construct
  source 1..5419: mol_type = other RNA
aggaaataagagagaaaagaagagtaagaagaaatataagagccaccatggcccctaagaagaagcgtaaagtgagccgggtgaacggcagcggcagcggcggcggcatgaaccacgaccaggagttcgacccccctaaggtgtaccctcccgtccccgccgagaagagaaagcccatccgggtcctgagcctgttcgatggcatcgccaccggtctgctggtgctgaaggacctgggcatccaggtggataggtacattgcctccgaggtgtgcgaggactccatcaccgtgggaatggtgcgtcatcagggcaagatcatgtacgtgggcgacgtgcggagcgtgacacagaagcatatccaggagtggggccctttcgacctggtgatcggcggcagcccttgcaatgacctgagcatcgtgaacccagcccggaagggcctgtacgagggaaccggcagactgttcttcgagttttacagactgctgcacgacgcccggcctaaggaaggcgacgaccggcccttcttttggctgttcgagaatgtggtggccatgggagtcagcgacaagcgggatattagccggttcctggagagcaaccccgtgatgatcgatgccaaggaagtgagcgccgcccaccgggccagatacttctggggcaatctgcctggcatgaacagacccctggccagcaccgtgaacgacaagctggagctgcaggagtgcctggagcacggccggatcgccaagttcagcaaggtgagaaccatcaccacccgaagcaacagcatcaaacaaggcaaggaccagcactttcctgtgttcatgaacgagaaggaggacatcctgtggtgtaccgagatggagagagtgttcgggttcccagtccactacacagatgtcagcaacatgtctagactggccagacagagactgctgggaagaagctggtccgtccctgtgatcagacacctgttcgcccctctgaaggagtacttcgcctgcgtgagcagcggcaacagcaacgccaacagccggggccccagcttctctagcggcctggtgccactgtccctgagagggagccacatgggccccatggagatctacaaaaccgtgagcgcctggaagcggcagcctgtgcgcgtgctgagcctgtttcggaatatcgataaagtcctgaaaagcctgggattcctggagagcggctctggctccggcggtggcaccctgaagtacgtggaggatgtgacaaacgtggtcagacgggatgtggagaagtggggccccttcgatctggtgtacggcagcacccaacccctgggcagctcttgtgaccggtgccctggctggtacatgtttcagttccaccggatcctgcagtacgccctgccgagacaggagtcccagcggccattcttttggattttcatggacaacttgctgctgaccgaggatgaccaggaaactaccactcggttcctgcagaccgaagccgtgaccctgcaggacgtgagaggccgggactaccagaacgccatgcgggtgtggtccaacatccctggactgaaaagcaagcacgcacctctgacccctaaagaagaggagtacctgcaggcccaggtgcggagcagaagcaagctggacgcccctaaggtggatctgctggtgaagaattgcctcctgcccctgagagagtacttcaagtatttcagccagaatagtctgcccctgggcggcccaagcagcggcgcccctcctcccagcggcggcagcccagccggctccccaacctctaccgaggagggcacctctgagtccgccacccccgagagcggccctggcacctccaccgagcccagcgagggcagcgcacccggcagccctgccggcagccccacctccacagaggagggaaccagcaccgagcccagcgaaggcagcgccccaggcaccagcaccgagcctagtgagggcggctctggcggcggcagcgcccaggagattaaacggatcaacaagatcagaagaagacttgtgaaagacagcaacaccaagaaggccggcaagacaggccccatgaaaaccctgctggttagagtgatgacacccgatctgagagagcggctggaaaacctgagaaagaagcctgaaaatatcccccagcccatcagcaatacatctagagccaacctgaataagctgctgaccgattacaccgaaatgaagaaggcgatcctgcatgtgtactgggaagagttccagaaggaccctgtgggcctgatgagccgggtggcccagcctgccagcaagaagatcgatcagaacaagctgaaacctgagatggacgagaagggcaacctgaccaccgccggctttgcctgctctcagtgtggccagcccctgttcgtgtacaagctggagcaggtgtctgagaagggcaaggcttacaccaactacttcggacggtgcaatgtggccgagcacgaaaagctgatcctgctggcccagctgaagcccgagaaggatagcgacgaagccgtgacatatagcctgggaaagtttgggcagagggccctggatttctacagcattcatgtgaccaaggagtccacccaccccgtgaagcccctggcccagatcgccggaaacagatacgcctccggacctgtgggaaaggccctgagcgacgcatgtatgggcacaatcgcctccttcctgtctaagtaccaggacatcatcatcgaacaccagaaggtggtgaagggcaaccagaagagactggagagcctgcgggagctggccggcaaggaaaacctggaataccctagcgtgaccctgccacctcagcctcacaccaaggagggcgttgatgcctacaacgaagtgatcgcccgggtgcgaatgtgggtgaacctgaacctgtggcagaagctgaagctaagcagagatgatgccaagcctctgctgagactgaagggattcccttcctttcctctggtcgagagacaggccaacgaagtggactggtgggacatggtgtgtaacgtgaagaagctgatcaacgagaaaaaggaggatggcaaggtgttttggcagaatctggctggctacaagagacaggaagccctgagaccatacctgagcagcgaggaagatcggaagaagggaaagaaattcgctcggtaccagctgggcgacctgctgctgcacctggaaaagaagcacggcgaggactggggaaaggtgtacgacgaggcctgggagcggattgacaagaaagtggaaggcctgagcaagcacatcaagctggaagaggaacggagaagcgaggacgcccagagcaaggccgccctgaccgactggctgcgggctaaggccagcttcgtgatcgagggcctgaaggaggccgacaaggacgagttctgcagatgcgagctgaagctgcagaagtggtacggggacctgcggggaaagcccttcgccatcgaagccgagaacagcatcctggacatcagcggcttcagcaagcagtacaactgtgccttcatctggcagaaggacggcgtgaagaagctgaacctgtacctgatcatcaactacttcaagggcggcaagctgcggttcaagaagatcaaacctgaagccttcgaagccaacagattctacaccgtgatcaacaaaaagagcggcgagatcgtgcccatggaggtgaacttcaacttcgacgaccccaacctgatcatcctgcctctggcctttggcaagagacagggcagagaattcatctggaacgacctgctgtccctggaaaccggcagcctgaagctggccaacggaagagtgatcgagaagacactgtacaacagaagaacccggcaggatgagcctgccctgttcgtggccctgaccttcgagcggcgggaggtcctggactcctccaatatcaaaccaatgaacctgatcggcgtggcaagaggcgaaaacatccccgccgtgatcgccctgaccgaccccgagggctgcccactgagccggtttaaggatagcctgggaaacccaacccacatcctgagaatcggcgagagctataaggagaagcagcggaccatccaggccaagaaggaggtggagcagcggagagccggcggctacagccggaagtacgccagcaaagccaagaatctggcagacgatatggtgagaaacaccgctagagatctgctgtactacgccgtgacccaggatgccatgctgatcttcgccaacctgagccggggcttcggccggcagggcaagcggaccttcatggccgagagacagtacacacggatggaggactggctgaccgccaagctggcctacgagggcctgagcaagacctacctgtccaagacactggcccagtacacctccaagacatgcagcaactgtgggtttaccatcaccagcgccgactacgacagggtgctggagaagctgaagaagacagcaacaggctggatgaccacaattaacggcaaggagctgaaggtggagggccagattacctactacaacagatacaagagacagaacgtagtcaaggacctgtccgtcgagctggatagactgagcgaagaatctgtgaacaacgacatctcctcctggacaaagggcagaagcggagaagctctgagcctcctgaagaaaagattctcccatagacccgtgcaggagaagttcgtgtgcctgaactgcggcttcgagacacacgcagccgagcaagccgccctgaacatcgccagatcctggctgttcctgcggagccaggagtacaagaaataccagacaaacaagacaaccggcaacaccgataagagagccttcgtcgagacctggcagtccttttaccggaagaagcttaaggaggtgtggaaacctgccgtgcggtctggcggatctggcggaggctccacaagcagccaggagagcgtgaccttccaggacgtgaccgtggacttcacccaggaggagtggtgcatgctggactgcagccagaagaagctgtacagggaggtgatgctggagaacgtgcagaacctgctgagcgtgggcctgcccgtgcccagggagaacctgctgagcagctgccagcagggcgacagcccctggctgctggagcagaagggcaccaggatcttcagggccgacgccgagatctgcaccagccccaagaaaaagagaaaagtctaagctgccttctgcggggcttgccttctggccatgcccttcttctctcccttgcacctgtacctcttggtctttgaataaagcctgagtaggaaggctagcaaaaaaaaaaaaaaaaaaaaaaaaaaaaaaaaaaaaaaaaaaaaaaaaaaaaaaaaaaaaaaaaaaaaaaaaaaaaaaaa

SEQ ID NO: 2710 - RNA, 5419 nt, synthetic construct
  source 1..5419: mol_type = other RNA
aggaaataagagagaaaagaagagtaagaagaaatataagagccaccatggcccctaagaagaagcgtaaagtgagccgggtgaacggcagcggcagcggcggcggcatgaaccacgaccaggagttcgacccccctaaggtgtaccctcccgtccccgccgagaagagaaagcccatccgggtcctgagcctgttcgatggcatcgccaccggtctgctggtgctgaaggacctgggcatccaggtggataggtacattgcctccgaggtgtgcgaggactccatcaccgtgggaatggtgcgtcatcagggcaagatcatgtacgtgggcgacgtgcggagcgtgacacagaagcatatccaggagtggggccctttcgacctggtgatcggcggcagcccttgcaatgacctgagcatcgtgaacccagcccggaagggcctgtacgagggaaccggcagactgttcttcgagttttacagactgctgcacgacgcccggcctaaggaaggcgacgaccggcccttcttttggctgttcgagaatgtggtggccatgggagtcagcgacaagcgggatattagccggttcctggagagcaaccccgtgatgatcgatgccaaggaagtgagcgccgcccaccgggccagatacttctggggcaatctgcctggcatgaacagacccctggccagcaccgtgaacgacaagctggagctgcaggagtgcctggagcacggccggatcgccaagttcagcaaggtgagaaccatcaccacccgaagcaacagcatcaaacaaggcaaggaccagcactttcctgtgttcatgaacgagaaggaggacatcctgtggtgtaccgagatggagagagtgttcgggttcccagtccactacacagatgtcagcaacatgtctagactggccagacagagactgctgggaagaagctggtccgtccctgtgatcagacacctgttcgcccctctgaaggagtacttcgcctgcgtgagcagcggcaacagcaacgccaacagccggggccccagcttctctagcggcctggtgccactgtccctgagagggagccacatgggccccatggagatctacaaaaccgtgagcgcctggaagcggcagcctgtgcgcgtgctgagcctgtttcggaatatcgataaagtcctgaaaagcctgggattcctggagagcggctctggctccggcggtggcaccctgaagtacgtggaggatgtgacaaacgtggtcagacgggatgtggagaagtggggccccttcgatctggtgtacggcagcacccaacccctgggcagctcttgtgaccggtgccctggctggtacatgtttcagttccaccggatcctgcagtacgccctgccgagacaggagtcccagcggccattcttttggattttcatggacaacttgctgctgaccgaggatgaccaggaaactaccactcggttcctgcagaccgaagccgtgaccctgcaggacgtgagaggccgggactaccagaacgccatgcgggtgtggtccaacatccctggactgaaaagcaagcacgcacctctgacccctaaagaagaggagtacctgcaggcccaggtgcggagcagaagcaagctggacgcccctaaggtggatctgctggtgaagaattgcctcctgcccctgagagagtacttcaagtatttcagccagaatagtctgcccctgggcggcccaagcagcggcgcccctcctcccagcggcggcagcccagccggctccccaacctctaccgaggagggcacctctgagtccgccacccccgagagcggccctggcacctccaccgagcccagcgagggcagcgcacccggcagccctgccggcagccccacctccacagaggagggaaccagcaccgagcccagcgaaggcagcgccccaggcaccagcaccgagcctagtgagggcggctctggcggcggcagcgcccaggagattaaacggatcaacaagatcagaagaagacttgtgaaagacagcaacaccaagaaggccggcaagacaggccccatgaaaaccctgctggttagagtgatgacacccgatctgagagagcggctggaaaacctgagaaagaagcctgaaaatatcccccagcccatcagcaatacatctagagccaacctgaataagctgctgaccgattacaccgaaatgaagaaggcgatcctgcatgtgtactgggaagagttccagaaggaccctgtgggcctgatgagccgggtggcccagcctgccagcaagaagatcgatcagaacaagctgaaacctgagatggacgagaagggcaacctgaccaccgccggctttgcctgctctcagtgtggccagcccctgttcgtgtacaagctggagcaggtgtctgagaagggcaaggcttacaccaactacttcggacggtgcaatgtggccgagcacgaaaagctgatcctgctggcccagctgaagcccgagaaggatagcgacgaagccgtgacatatagcctgggaaagtttgggcagagggccctggatttctacagcattcatgtgaccaaggagtccacccaccccgtgaagcccctggcccagatcgccggaaacagatacgcctccggacctgtgggaaaggccctgagcgacgcatgtatgggcacaatcgcctccttcctgtctaagtaccaggacatcatcatcgaacaccagaaggtggtgaagggcaaccagaagagactggagagcctgcgggagctggccggcaaggaaaacctggaataccctagcgtgaccctgccacctcagcctcacaccaaggagggcgttgatgcctacaacgaagtgatcgcccgggtgcgaatgtgggtgaacctgaacctgtggcagaagctgaagctaagcagagatgatgccaagcctctgctgagactgaagggattcccttcctttcctctggtcgagagacaggccaacgaagtggactggtgggacatggtgtgtaacgtgaagaagctgatcaacgagaaaaaggaggatggcaaggtgttttggcagaatctggctggctacaagagacaggaagccctgagaccatacctgagcagcgaggaagatcggaagaagggaaagaaattcgctcggtaccagctgggcgacctgctgctgcacctggaaaagaagcacggcgaggactggggaaaggtgtacgacgaggcctgggagcggattgacaagaaagtggaaggcctgagcaagcacatcaagctggaagaggaacggagaagcgaggacgcccagagcaaggccgccctgaccgactggctgcgggctaaggccagcttcgtgatcgagggcctgaaggaggccgacaaggacgagttctgcagatgcgagctgaagctgcagaagtggtacggggacctgcggggaaagcccttcgccatcgaagccgagaacagcatcctggacatcagcggcttcagcaagcagtacaactgtgccttcatctggcagaaggacggcgtgaagaagctgaacctgtacctgatcatcaactacttcaagggcggcaagctgcggttcaagaagatcaaacctgaagccttcgaagccaacagattctacaccgtgatcaacaaaaagagcggcgagatcgtgcccatggaggtgaacttcaacttcgacgaccccaacctgatcatcctgcctctggcctttggcaagagacagggcagagaattcatctggaacgacctgctgtccctggaaaccggcagcctgaagctggccaacggaagagtgatcgagaagacactgtacaacagaagaacccggcaggatgagcctgccctgttcgtggccctgaccttcgagcggcgggaggtcctggactcctccaatatcaaaccaatgaacctgatcggcgtggcaagaggcgaaaacatccccgccgtgatcgccctgaccgaccccgagggctgcccactgagccggtttaaggatagcctgggaaacccaacccacatcctgagaatcggcgagagctataaggagaagcagcggaccatccaggccaagaaggaggtggagcagcggagagccggcggctacagccggaagtacgccagcaaagccaagaatctggcagacgatatggtgagaaacaccgctagagatctgctgtactacgccgtgacccaggatgccatgctgatcttcgccaacctgagccggggcttcggccggcagggcaagcggaccttcatggccgagagacagtacacacggatggaggactggctgaccgccaagctggcctacgagggcctgagcaagacctacctgtccaagacactggcccagtacacctccaagacatgcagcaactgtgggtttaccatcaccagcgccgactacgacagggtgctggagaagctgaagaagacagcaacaggctggatgaccacaattaacggcaaggagctgaaggtggagggccagattacctactacaacagatacaagagacagaacgtagtcaaggacctgtccgtcgagctggatagactgagcgaagaatctgtgaacaacgacatctcctcctggacaaagggcagaagcggagaagctctgagcctcctgaagaaaagattctcccatagacccgtgcaggagaagttcgtgtgcctgaactgcggcttcgagacacacgcagccgagcaagccgccctgaacatcgccagatcctggctgttcctgcggagccaggagtacaagaaataccagacaaacaagacaaccggcaacaccgataagagagccttcgtcgagacctggcagtccttttaccggaagaagcttaaggaggtgtggaaacctgccgtgcggtctggcggatctggcggaggctccacaagcctgcaggagcccgtgagcttcgaggaggtggccgtgtacttcagcagggaggagtgggccctgctggaccccgcccagagggccctgtacagggacgtgatgctggagacctacgagtgcgtggccagcctggcccccctgcccgcccccaagcccatggtgatcagcctgctggaggagggcgaggagccctgggtgcccgacgtgggcagccccgaggccgtggccggcgacgtgagccccaccagccccaagaaaaagagaaaagtctaagctgccttctgcggggcttgccttctggccatgcccttcttctctcccttgcacctgtacctcttggtctttgaataaagcctgagtaggaaggctagcaaaaaaaaaaaaaaaaaaaaaaaaaaaaaaaaaaaaaaaaaaaaaaaaaaaaaaaaaaaaaaaaaaaaaaaaaaaaaaaa

SEQ ID NO: 2711 - RNA, 5419 nt, synthetic construct
  source 1..5419: mol_type = other RNA
aggaaataagagagaaaagaagagtaagaagaaatataagagccaccatggcccctaagaagaagcgtaaagtgagccgggtgaacggcagcggcagcggcggcggcatgaaccacgaccaggagttcgacccccctaaggtgtaccctcccgtccccgccgagaagagaaagcccatccgggtcctgagcctgttcgatggcatcgccaccggtctgctggtgctgaaggacctgggcatccaggtggataggtacattgcctccgaggtgtgcgaggactccatcaccgtgggaatggtgcgtcatcagggcaagatcatgtacgtgggcgacgtgcggagcgtgacacagaagcatatccaggagtggggccctttcgacctggtgatcggcggcagcccttgcaatgacctgagcatcgtgaacccagcccggaagggcctgtacgagggaaccggcagactgttcttcgagttttacagactgctgcacgacgcccggcctaaggaaggcgacgaccggcccttcttttggctgttcgagaatgtggtggccatgggagtcagcgacaagcgggatattagccggttcctggagagcaaccccgtgatgatcgatgccaaggaagtgagcgccgcccaccgggccagatacttctggggcaatctgcctggcatgaacagacccctggccagcaccgtgaacgacaagctggagctgcaggagtgcctggagcacggccggatcgccaagttcagcaaggtgagaaccatcaccacccgaagcaacagcatcaaacaaggcaaggaccagcactttcctgtgttcatgaacgagaaggaggacatcctgtggtgtaccgagatggagagagtgttcgggttcccagtccactacacagatgtcagcaacatgtctagactggccagacagagactgctgggaagaagctggtccgtccctgtgatcagacacctgttcgcccctctgaaggagtacttcgcctgcgtgagcagcggcaacagcaacgccaacagccggggccccagcttctctagcggcctggtgccactgtccctgagagggagccacatgggccccatggagatctacaaaaccgtgagcgcctggaagcggcagcctgtgcgcgtgctgagcctgtttcggaatatcgataaagtcctgaaaagcctgggattcctggagagcggctctggctccggcggtggcaccctgaagtacgtggaggatgtgacaaacgtggtcagacgggatgtggagaagtggggccccttcgatctggtgtacggcagcacccaacccctgggcagctcttgtgaccggtgccctggctggtacatgtttcagttccaccggatcctgcagtacgccctgccgagacaggagtcccagcggccattcttttggattttcatggacaacttgctgctgaccgaggatgaccaggaaactaccactcggttcctgcagaccgaagccgtgaccctgcaggacgtgagaggccgggactaccagaacgccatgcgggtgtggtccaacatccctggactgaaaagcaagcacgcacctctgacccctaaagaagaggagtacctgcaggcccaggtgcggagcagaagcaagctggacgcccctaaggtggatctgctggtgaagaattgcctcctgcccctgagagagtacttcaagtatttcagccagaatagtctgcccctgggcggcccaagcagcggcgcccctcctcccagcggcggcagcccagccggctccccaacctctaccgaggagggcacctctgagtccgccacccccgagagcggccctggcacctccaccgagcccagcgagggcagcgcacccggcagccctgccggcagccccacctccacagaggagggaaccagcaccgagcccagcgaaggcagcgccccaggcaccagcaccgagcctagtgagggcggctctggcggcggcagcgcccaggagattaaacggatcaacaagatcagaagaagacttgtgaaagacagcaacaccaagaaggccggcaagacaggccccatgaaaaccctgctggttagagtgatgacacccgatctgagagagcggctggaaaacctgagaaagaagcctgaaaatatcccccagcccatcagcaatacatctagagccaacctgaataagctgctgaccgattacaccgaaatgaagaaggcgatcctgcatgtgtactgggaagagttccagaaggaccctgtgggcctgatgagccgggtggcccagcctgccagcaagaagatcgatcagaacaagctgaaacctgagatggacgagaagggcaacctgaccaccgccggctttgcctgctctcagtgtggccagcccctgttcgtgtacaagctggagcaggtgtctgagaagggcaaggcttacaccaactacttcggacggtgcaatgtggccgagcacgaaaagctgatcctgctggcccagctgaagcccgagaaggatagcgacgaagccgtgacatatagcctgggaaagtttgggcagagggccctggatttctacagcattcatgtgaccaaggagtccacccaccccgtgaagcccctggcccagatcgccggaaacagatacgcctccggacctgtgggaaaggccctgagcgacgcatgtatgggcacaatcgcctccttcctgtctaagtaccaggacatcatcatcgaacaccagaaggtggtgaagggcaaccagaagagactggagagcctgcgggagctggccggcaaggaaaacctggaataccctagcgtgaccctgccacctcagcctcacaccaaggagggcgttgatgcctacaacgaagtgatcgcccgggtgcgaatgtgggtgaacctgaacctgtggcagaagctgaagctaagcagagatgatgccaagcctctgctgagactgaagggattcccttcctttcctctggtcgagagacaggccaacgaagtggactggtgggacatggtgtgtaacgtgaagaagctgatcaacgagaaaaaggaggatggcaaggtgttttggcagaatctggctggctacaagagacaggaagccctgagaccatacctgagcagcgaggaagatcggaagaagggaaagaaattcgctcggtaccagctgggcgacctgctgctgcacctggaaaagaagcacggcgaggactggggaaaggtgtacgacgaggcctgggagcggattgacaagaaagtggaaggcctgagcaagcacatcaagctggaagaggaacggagaagcgaggacgcccagagcaaggccgccctgaccgactggctgcgggctaaggccagcttcgtgatcgagggcctgaaggaggccgacaaggacgagttctgcagatgcgagctgaagctgcagaagtggtacggggacctgcggggaaagcccttcgccatcgaagccgagaacagcatcctggacatcagcggcttcagcaagcagtacaactgtgccttcatctggcagaaggacggcgtgaagaagctgaacctgtacctgatcatcaactacttcaagggcggcaagctgcggttcaagaagatcaaacctgaagccttcgaagccaacagattctacaccgtgatcaacaaaaagagcggcgagatcgtgcccatggaggtgaacttcaacttcgacgaccccaacctgatcatcctgcctctggcctttggcaagagacagggcagagaattcatctggaacgacctgctgtccctggaaaccggcagcctgaagctggccaacggaagagtgatcgagaagacactgtacaacagaagaacccggcaggatgagcctgccctgttcgtggccctgaccttcgagcggcgggaggtcctggactcctccaatatcaaaccaatgaacctgatcggcgtggcaagaggcgaaaacatccccgccgtgatcgccctgaccgaccccgagggctgcccactgagccggtttaaggatagcctgggaaacccaacccacatcctgagaatcggcgagagctataaggagaagcagcggaccatccaggccaagaaggaggtggagcagcggagagccggcggctacagccggaagtacgccagcaaagccaagaatctggcagacgatatggtgagaaacaccgctagagatctgctgtactacgccgtgacccaggatgccatgctgatcttcgccaacctgagccggggcttcggccggcagggcaagcggaccttcatggccgagagacagtacacacggatggaggactggctgaccgccaagctggcctacgagggcctgagcaagacctacctgtccaagacactggcccagtacacctccaagacatgcagcaactgtgggtttaccatcaccagcgccgactacgacagggtgctggagaagctgaagaagacagcaacaggctggatgaccacaattaacggcaaggagctgaaggtggagggccagattacctactacaacagatacaagagacagaacgtagtcaaggacctgtccgtcgagctggatagactgagcgaagaatctgtgaacaacgacatctcctcctggacaaagggcagaagcggagaagctctgagcctcctgaagaaaagattctcccatagacccgtgcaggagaagttcgtgtgcctgaactgcggcttcgagacacacgcagccgagcaagccgccctgaacatcgccagatcctggctgttcctgcggagccaggagtacaagaaataccagacaaacaagacaaccggcaacaccgataagagagccttcgtcgagacctggcagtccttttaccggaagaagcttaaggaggtgtggaaacctgccgtgcggtctggcggatctggcggaggctccacaagcagccaggagctgctgaccttcaaggacatcttcgtggacttcacccaggaggagtggggccagctggcccccgcccacaggaacctgtacagggaggtgatgctggagaactacggcaacctggtgagcgtgggctaccagctgagcaagcccggcgtgatcagccagctggagaagggcgaggagccctggctgatcgagagggagatcagcggcagccccagcagcgacctggagaacaagaccagccccaagaaaaagagaaaagtctaagctgccttctgcggggcttgccttctggccatgcccttcttctctcccttgcacctgtacctcttggtctttgaataaagcctgagtaggaaggctagcaaaaaaaaaaaaaaaaaaaaaaaaaaaaaaaaaaaaaaaaaaaaaaaaaaaaaaaaaaaaaaaaaaaaaaaaaaaaaaaa

SEQ ID NO: 2712 - RNA, 5419 nt, synthetic construct
  source 1..5419: mol_type = other RNA
aggaaataagagagaaaagaagagtaagaagaaatataagagccaccatggcccctaagaagaagcgtaaagtgagccgggtgaacggcagcggcagcggcggcggcatgaaccacgaccaggagttcgacccccctaaggtgtaccctcccgtccccgccgagaagagaaagcccatccgggtcctgagcctgttcgatggcatcgccaccggtctgctggtgctgaaggacctgggcatccaggtggataggtacattgcctccgaggtgtgcgaggactccatcaccgtgggaatggtgcgtcatcagggcaagatcatgtacgtgggcgacgtgcggagcgtgacacagaagcatatccaggagtggggccctttcgacctggtgatcggcggcagcccttgcaatgacctgagcatcgtgaacccagcccggaagggcctgtacgagggaaccggcagactgttcttcgagttttacagactgctgcacgacgcccggcctaaggaaggcgacgaccggcccttcttttggctgttcgagaatgtggtggccatgggagtcagcgacaagcgggatattagccggttcctggagagcaaccccgtgatgatcgatgccaaggaagtgagcgccgcccaccgggccagatacttctggggcaatctgcctggcatgaacagacccctggccagcaccgtgaacgacaagctggagctgcaggagtgcctggagcacggccggatcgccaagttcagcaaggtgagaaccatcaccacccgaagcaacagcatcaaacaaggcaaggaccagcactttcctgtgttcatgaacgagaaggaggacatcctgtggtgtaccgagatggagagagtgttcgggttcccagtccactacacagatgtcagcaacatgtctagactggccagacagagactgctgggaagaagctggtccgtccctgtgatcagacacctgttcgcccctctgaaggagtacttcgcctgcgtgagcagcggcaacagcaacgccaacagccggggccccagcttctctagcggcctggtgccactgtccctgagagggagccacatgggccccatggagatctacaaaaccgtgagcgcctggaagcggcagcctgtgcgcgtgctgagcctgtttcggaatatcgataaagtcctgaaaagcctgggattcctggagagcggctctggctccggcggtggcaccctgaagtacgtggaggatgtgacaaacgtggtcagacgggatgtggagaagtggggccccttcgatctggtgtacggcagcacccaacccctgggcagctcttgtgaccggtgccctggctggtacatgtttcagttccaccggatcctgcagtacgccctgccgagacaggagtcccagcggccattcttttggattttcatggacaacttgctgctgaccgaggatgaccaggaaactaccactcggttcctgcagaccgaagccgtgaccctgcaggacgtgagaggccgggactaccagaacgccatgcgggtgtggtccaacatccctggactgaaaagcaagcacgcacctctgacccctaaagaagaggagtacctgcaggcccaggtgcggagcagaagcaagctggacgcccctaaggtggatctgctggtgaagaattgcctcctgcccctgagagagtacttcaagtatttcagccagaatagtctgcccctgggcggcccaagcagcggcgcccctcctcccagcggcggcagcccagccggctccccaacctctaccgaggagggcacctctgagtccgccacccccgagagcggccctggcacctccaccgagcccagcgagggcagcgcacccggcagccctgccggcagccccacctccacagaggagggaaccagcaccgagcccagcgaaggcagcgccccaggcaccagcaccgagcctagtgagggcggctctggcggcggcagcgcccaggagattaaacggatcaacaagatcagaagaagacttgtgaaagacagcaacaccaagaaggccggcaagacaggccccatgaaaaccctgctggttagagtgatgacacccgatctgagagagcggctggaaaacctgagaaagaagcctgaaaatatcccccagcccatcagcaatacatctagagccaacctgaataagctgctgaccgattacaccgaaatgaagaaggcgatcctgcatgtgtactgggaagagttccagaaggaccctgtgggcctgatgagccgggtggcccagcctgccagcaagaagatcgatcagaacaagctgaaacctgagatggacgagaagggcaacctgaccaccgccggctttgcctgctctcagtgtggccagcccctgttcgtgtacaagctggagcaggtgtctgagaagggcaaggcttacaccaactacttcggacggtgcaatgtggccgagcacgaaaagctgatcctgctggcccagctgaagcccgagaaggatagcgacgaagccgtgacatatagcctgggaaagtttgggcagagggccctggatttctacagcattcatgtgaccaaggagtccacccaccccgtgaagcccctggcccagatcgccggaaacagatacgcctccggacctgtgggaaaggccctgagcgacgcatgtatgggcacaatcgcctccttcctgtctaagtaccaggacatcatcatcgaacaccagaaggtggtgaagggcaaccagaagagactggagagcctgcgggagctggccggcaaggaaaacctggaataccctagcgtgaccctgccacctcagcctcacaccaaggagggcgttgatgcctacaacgaagtgatcgcccgggtgcgaatgtgggtgaacctgaacctgtggcagaagctgaagctaagcagagatgatgccaagcctctgctgagactgaagggattcccttcctttcctctggtcgagagacaggccaacgaagtggactggtgggacatggtgtgtaacgtgaagaagctgatcaacgagaaaaaggaggatggcaaggtgttttggcagaatctggctggctacaagagacaggaagccctgagaccatacctgagcagcgaggaagatcggaagaagggaaagaaattcgctcggtaccagctgggcgacctgctgctgcacctggaaaagaagcacggcgaggactggggaaaggtgtacgacgaggcctgggagcggattgacaagaaagtggaaggcctgagcaagcacatcaagctggaagaggaacggagaagcgaggacgcccagagcaaggccgccctgaccgactggctgcgggctaaggccagcttcgtgatcgagggcctgaaggaggccgacaaggacgagttctgcagatgcgagctgaagctgcagaagtggtacggggacctgcggggaaagcccttcgccatcgaagccgagaacagcatcctggacatcagcggcttcagcaagcagtacaactgtgccttcatctggcagaaggacggcgtgaagaagctgaacctgtacctgatcatcaactacttcaagggcggcaagctgcggttcaagaagatcaaacctgaagccttcgaagccaacagattctacaccgtgatcaacaaaaagagcggcgagatcgtgcccatggaggtgaacttcaacttcgacgaccccaacctgatcatcctgcctctggcctttggcaagagacagggcagagaattcatctggaacgacctgctgtccctggaaaccggcagcctgaagctggccaacggaagagtgatcgagaagacactgtacaacagaagaacccggcaggatgagcctgccctgttcgtggccctgaccttcgagcggcgggaggtcctggactcctccaatatcaaaccaatgaacctgatcggcgtggcaagaggcgaaaacatccccgccgtgatcgccctgaccgaccccgagggctgcccactgagccggtttaaggatagcctgggaaacccaacccacatcctgagaatcggcgagagctataaggagaagcagcggaccatccaggccaagaaggaggtggagcagcggagagccggcggctacagccggaagtacgccagcaaagccaagaatctggcagacgatatggtgagaaacaccgctagagatctgctgtactacgccgtgacccaggatgccatgctgatcttcgccaacctgagccggggcttcggccggcagggcaagcggaccttcatggccgagagacagtacacacggatggaggactggctgaccgccaagctggcctacgagggcctgagcaagacctacctgtccaagacactggcccagtacacctccaagacatgcagcaactgtgggtttaccatcaccagcgccgactacgacagggtgctggagaagctgaagaagacagcaacaggctggatgaccacaattaacggcaaggagctgaaggtggagggccagattacctactacaacagatacaagagacagaacgtagtcaaggacctgtccgtcgagctggatagactgagcgaagaatctgtgaacaacgacatctcctcctggacaaagggcagaagcggagaagctctgagcctcctgaagaaaagattctcccatagacccgtgcaggagaagttcgtgtgcctgaactgcggcttcgagacacacgcagccgagcaagccgccctgaacatcgccagatcctggctgttcctgcggagccaggagtacaagaaataccagacaaacaagacaaccggcaacaccgataagagagccttcgtcgagacctggcagtccttttaccggaagaagcttaaggaggtgtggaaacctgccgtgcggtctggcggatctggcggaggctccacaagcccccagaagagcgtgaccttcgaggacgtggccgtgtacttcacccagaccgagtgggacggcctgagccccgcccagagggccctgtacagggacgtgatgctggagaactacggcaacgtggccagcctgggcttcagcctgctgaagcccgccgtgatcagccagctggagggcgccggcgagctggagggccccagccccctggtggccggcaccgagatcggcccccagggcctgtggaccagccccaagaaaaagagaaaagtctaagctgccttctgcggggcttgccttctggccatgcccttcttctctcccttgcacctgtacctcttggtctttgaataaagcctgagtaggaaggctagcaaaaaaaaaaaaaaaaaaaaaaaaaaaaaaaaaaaaaaaaaaaaaaaaaaaaaaaaaaaaaaaaaaaaaaaaaaaaaaaa

SEQ ID NO: 2713 - RNA, 5419 nt, synthetic construct
  source 1..5419: mol_type = other RNA
aggaaataagagagaaaagaagagtaagaagaaatataagagccaccatggcccctaagaagaagcgtaaagtgagccgggtgaacggcagcggcagcggcggcggcatgaaccacgaccaggagttcgacccccctaaggtgtaccctcccgtccccgccgagaagagaaagcccatccgggtcctgagcctgttcgatggcatcgccaccggtctgctggtgctgaaggacctgggcatccaggtggataggtacattgcctccgaggtgtgcgaggactccatcaccgtgggaatggtgcgtcatcagggcaagatcatgtacgtgggcgacgtgcggagcgtgacacagaagcatatccaggagtggggccctttcgacctggtgatcggcggcagcccttgcaatgacctgagcatcgtgaacccagcccggaagggcctgtacgagggaaccggcagactgttcttcgagttttacagactgctgcacgacgcccggcctaaggaaggcgacgaccggcccttcttttggctgttcgagaatgtggtggccatgggagtcagcgacaagcgggatattagccggttcctggagagcaaccccgtgatgatcgatgccaaggaagtgagcgccgcccaccgggccagatacttctggggcaatctgcctggcatgaacagacccctggccagcaccgtgaacgacaagctggagctgcaggagtgcctggagcacggccggatcgccaagttcagcaaggtgagaaccatcaccacccgaagcaacagcatcaaacaaggcaaggaccagcactttcctgtgttcatgaacgagaaggaggacatcctgtggtgtaccgagatggagagagtgttcgggttcccagtccactacacagatgtcagcaacatgtctagactggccagacagagactgctgggaagaagctggtccgtccctgtgatcagacacctgttcgcccctctgaaggagtacttcgcctgcgtgagcagcggcaacagcaacgccaacagccggggccccagcttctctagcggcctggtgccactgtccctgagagggagccacatgggccccatggagatctacaaaaccgtgagcgcctggaagcggcagcctgtgcgcgtgctgagcctgtttcggaatatcgataaagtcctgaaaagcctgggattcctggagagcggctctggctccggcggtggcaccctgaagtacgtggaggatgtgacaaacgtggtcagacgggatgtggagaagtggggccccttcgatctggtgtacggcagcacccaacccctgggcagctcttgtgaccggtgccctggctggtacatgtttcagttccaccggatcctgcagtacgccctgccgagacaggagtcccagcggccattcttttggattttcatggacaacttgctgctgaccgaggatgaccaggaaactaccactcggttcctgcagaccgaagccgtgaccctgcaggacgtgagaggccgggactaccagaacgccatgcgggtgtggtccaacatccctggactgaaaagcaagcacgcacctctgacccctaaagaagaggagtacctgcaggcccaggtgcggagcagaagcaagctggacgcccctaaggtggatctgctggtgaagaattgcctcctgcccctgagagagtacttcaagtatttcagccagaatagtctgcccctgggcggcccaagcagcggcgcccctcctcccagcggcggcagcccagccggctccccaacctctaccgaggagggcacctctgagtccgccacccccgagagcggccctggcacctccaccgagcccagcgagggcagcgcacccggcagccctgccggcagccccacctccacagaggagggaaccagcaccgagcccagcgaaggcagcgccccaggcaccagcaccgagcctagtgagggcggctctggcggcggcagcgcccaggagattaaacggatcaacaagatcagaagaagacttgtgaaagacagcaacaccaagaaggccggcaagacaggccccatgaaaaccctgctggttagagtgatgacacccgatctgagagagcggctggaaaacctgagaaagaagcctgaaaatatcccccagcccatcagcaatacatctagagccaacctgaataagctgctgaccgattacaccgaaatgaagaaggcgatcctgcatgtgtactgggaagagttccagaaggaccctgtgggcctgatgagccgggtggcccagcctgccagcaagaagatcgatcagaacaagctgaaacctgagatggacgagaagggcaacctgaccaccgccggctttgcctgctctcagtgtggccagcccctgttcgtgtacaagctggagcaggtgtctgagaagggcaaggcttacaccaactacttcggacggtgcaatgtggccgagcacgaaaagctgatcctgctggcccagctgaagcccgagaaggatagcgacgaagccgtgacatatagcctgggaaagtttgggcagagggccctggatttctacagcattcatgtgaccaaggagtccacccaccccgtgaagcccctggcccagatcgccggaaacagatacgcctccggacctgtgggaaaggccctgagcgacgcatgtatgggcacaatcgcctccttcctgtctaagtaccaggacatcatcatcgaacaccagaaggtggtgaagggcaaccagaagagactggagagcctgcgggagctggccggcaaggaaaacctggaataccctagcgtgaccctgccacctcagcctcacaccaaggagggcgttgatgcctacaacgaagtgatcgcccgggtgcgaatgtgggtgaacctgaacctgtggcagaagctgaagctaagcagagatgatgccaagcctctgctgagactgaagggattcccttcctttcctctggtcgagagacaggccaacgaagtggactggtgggacatggtgtgtaacgtgaagaagctgatcaacgagaaaaaggaggatggcaaggtgttttggcagaatctggctggctacaagagacaggaagccctgagaccatacctgagcagcgaggaagatcggaagaagggaaagaaattcgctcggtaccagctgggcgacctgctgctgcacctggaaaagaagcacggcgaggactggggaaaggtgtacgacgaggcctgggagcggattgacaagaaagtggaaggcctgagcaagcacatcaagctggaagaggaacggagaagcgaggacgcccagagcaaggccgccctgaccgactggctgcgggctaaggccagcttcgtgatcgagggcctgaaggaggccgacaaggacgagttctgcagatgcgagctgaagctgcagaagtggtacggggacctgcggggaaagcccttcgccatcgaagccgagaacagcatcctggacatcagcggcttcagcaagcagtacaactgtgccttcatctggcagaaggacggcgtgaagaagctgaacctgtacctgatcatcaactacttcaagggcggcaagctgcggttcaagaagatcaaacctgaagccttcgaagccaacagattctacaccgtgatcaacaaaaagagcggcgagatcgtgcccatggaggtgaacttcaacttcgacgaccccaacctgatcatcctgcctctggcctttggcaagagacagggcagagaattcatctggaacgacctgctgtccctggaaaccggcagcctgaagctggccaacggaagagtgatcgagaagacactgtacaacagaagaacccggcaggatgagcctgccctgttcgtggccctgaccttcgagcggcgggaggtcctggactcctccaatatcaaaccaatgaacctgatcggcgtggcaagaggcgaaaacatccccgccgtgatcgccctgaccgaccccgagggctgcccactgagccggtttaaggatagcctgggaaacccaacccacatcctgagaatcggcgagagctataaggagaagcagcggaccatccaggccaagaaggaggtggagcagcggagagccggcggctacagccggaagtacgccagcaaagccaagaatctggcagacgatatggtgagaaacaccgctagagatctgctgtactacgccgtgacccaggatgccatgctgatcttcgccaacctgagccggggcttcggccggcagggcaagcggaccttcatggccgagagacagtacacacggatggaggactggctgaccgccaagctggcctacgagggcctgagcaagacctacctgtccaagacactggcccagtacacctccaagacatgcagcaactgtgggtttaccatcaccagcgccgactacgacagggtgctggagaagctgaagaagacagcaacaggctggatgaccacaattaacggcaaggagctgaaggtggagggccagattacctactacaacagatacaagagacagaacgtagtcaaggacctgtccgtcgagctggatagactgagcgaagaatctgtgaacaacgacatctcctcctggacaaagggcagaagcggagaagctctgagcctcctgaagaaaagattctcccatagacccgtgcaggagaagttcgtgtgcctgaactgcggcttcgagacacacgcagccgagcaagccgccctgaacatcgccagatcctggctgttcctgcggagccaggagtacaagaaataccagacaaacaagacaaccggcaacaccgataagagagccttcgtcgagacctggcagtccttttaccggaagaagcttaaggaggtgtggaaacctgccgtgcggtctggcggatctggcggaggctccacaagcagccagaaggccctgaccttccaggacgtggccgtggagttcacccaggaggagtggggcctgctggagcccgcccagaagaacatgcacagggacgtgatgctggagaactacgagaacttcgtgagcctgggcctgcccgtgcccaagagcgccctgatcttccacctggagaggagggagaccccctggctgcccagcggcgaggtgctgaggaacacctaccccgactacctggtgcagaccagccccaagaaaaagagaaaagtctaagctgccttctgcggggcttgccttctggccatgcccttcttctctcccttgcacctgtacctcttggtctttgaataaagcctgagtaggaaggctagcaaaaaaaaaaaaaaaaaaaaaaaaaaaaaaaaaaaaaaaaaaaaaaaaaaaaaaaaaaaaaaaaaaaaaaaaaaaaaaaa

SEQ ID NO: 2714 - RNA, 5419 nt, synthetic construct
  source 1..5419: mol_type = other RNA
aggaaataagagagaaaagaagagtaagaagaaatataagagccaccatggcccctaagaagaagcgtaaagtgagccgggtgaacggcagcggcagcggcggcggcatgaaccacgaccaggagttcgacccccctaaggtgtaccctcccgtccccgccgagaagagaaagcccatccgggtcctgagcctgttcgatggcatcgccaccggtctgctggtgctgaaggacctgggcatccaggtggataggtacattgcctccgaggtgtgcgaggactccatcaccgtgggaatggtgcgtcatcagggcaagatcatgtacgtgggcgacgtgcggagcgtgacacagaagcatatccaggagtggggccctttcgacctggtgatcggcggcagcccttgcaatgacctgagcatcgtgaacccagcccggaagggcctgtacgagggaaccggcagactgttcttcgagttttacagactgctgcacgacgcccggcctaaggaaggcgacgaccggcccttcttttggctgttcgagaatgtggtggccatgggagtcagcgacaagcgggatattagccggttcctggagagcaaccccgtgatgatcgatgccaaggaagtgagcgccgcccaccgggccagatacttctggggcaatctgcctggcatgaacagacccctggccagcaccgtgaacgacaagctggagctgcaggagtgcctggagcacggccggatcgccaagttcagcaaggtgagaaccatcaccacccgaagcaacagcatcaaacaaggcaaggaccagcactttcctgtgttcatgaacgagaaggaggacatcctgtggtgtaccgagatggagagagtgttcgggttcccagtccactacacagatgtcagcaacatgtctagactggccagacagagactgctgggaagaagctggtccgtccctgtgatcagacacctgttcgcccctctgaaggagtacttcgcctgcgtgagcagcggcaacagcaacgccaacagccggggccccagcttctctagcggcctggtgccactgtccctgagagggagccacatgggccccatggagatctacaaaaccgtgagcgcctggaagcggcagcctgtgcgcgtgctgagcctgtttcggaatatcgataaagtcctgaaaagcctgggattcctggagagcggctctggctccggcggtggcaccctgaagtacgtggaggatgtgacaaacgtggtcagacgggatgtggagaagtggggccccttcgatctggtgtacggcagcacccaacccctgggcagctcttgtgaccggtgccctggctggtacatgtttcagttccaccggatcctgcagtacgccctgccgagacaggagtcccagcggccattcttttggattttcatggacaacttgctgctgaccgaggatgaccaggaaactaccactcggttcctgcagaccgaagccgtgaccctgcaggacgtgagaggccgggactaccagaacgccatgcgggtgtggtccaacatccctggactgaaaagcaagcacgcacctctgacccctaaagaagaggagtacctgcaggcccaggtgcggagcagaagcaagctggacgcccctaaggtggatctgctggtgaagaattgcctcctgcccctgagagagtacttcaagtatttcagccagaatagtctgcccctgggcggcccaagcagcggcgcccctcctcccagcggcggcagcccagccggctccccaacctctaccgaggagggcacctctgagtccgccacccccgagagcggccctggcacctccaccgagcccagcgagggcagcgcacccggcagccctgccggcagccccacctccacagaggagggaaccagcaccgagcccagcgaaggcagcgccccaggcaccagcaccgagcctagtgagggcggctctggcggcggcagcgcccaggagattaaacggatcaacaagatcagaagaagacttgtgaaagacagcaacaccaagaaggccggcaagacaggccccatgaaaaccctgctggttagagtgatgacacccgatctgagagagcggctggaaaacctgagaaagaagcctgaaaatatcccccagcccatcagcaatacatctagagccaacctgaataagctgctgaccgattacaccgaaatgaagaaggcgatcctgcatgtgtactgggaagagttccagaaggaccctgtgggcctgatgagccgggtggcccagcctgccagcaagaagatcgatcagaacaagctgaaacctgagatggacgagaagggcaacctgaccaccgccggctttgcctgctctcagtgtggccagcccctgttcgtgtacaagctggagcaggtgtctgagaagggcaaggcttacaccaactacttcggacggtgcaatgtggccgagcacgaaaagctgatcctgctggcccagctgaagcccgagaaggatagcgacgaagccgtgacatatagcctgggaaagtttgggcagagggccctggatttctacagcattcatgtgaccaaggagtccacccaccccgtgaagcccctggcccagatcgccggaaacagatacgcctccggacctgtgggaaaggccctgagcgacgcatgtatgggcacaatcgcctccttcctgtctaagtaccaggacatcatcatcgaacaccagaaggtggtgaagggcaaccagaagagactggagagcctgcgggagctggccggcaaggaaaacctggaataccctagcgtgaccctgccacctcagcctcacaccaaggagggcgttgatgcctacaacgaagtgatcgcccgggtgcgaatgtgggtgaacctgaacctgtggcagaagctgaagctaagcagagatgatgccaagcctctgctgagactgaagggattcccttcctttcctctggtcgagagacaggccaacgaagtggactggtgggacatggtgtgtaacgtgaagaagctgatcaacgagaaaaaggaggatggcaaggtgttttggcagaatctggctggctacaagagacaggaagccctgagaccatacctgagcagcgaggaagatcggaagaagggaaagaaattcgctcggtaccagctgggcgacctgctgctgcacctggaaaagaagcacggcgaggactggggaaaggtgtacgacgaggcctgggagcggattgacaagaaagtggaaggcctgagcaagcacatcaagctggaagaggaacggagaagcgaggacgcccagagcaaggccgccctgaccgactggctgcgggctaaggccagcttcgtgatcgagggcctgaaggaggccgacaaggacgagttctgcagatgcgagctgaagctgcagaagtggtacggggacctgcggggaaagcccttcgccatcgaagccgagaacagcatcctggacatcagcggcttcagcaagcagtacaactgtgccttcatctggcagaaggacggcgtgaagaagctgaacctgtacctgatcatcaactacttcaagggcggcaagctgcggttcaagaagatcaaacctgaagccttcgaagccaacagattctacaccgtgatcaacaaaaagagcggcgagatcgtgcccatggaggtgaacttcaacttcgacgaccccaacctgatcatcctgcctctggcctttggcaagagacagggcagagaattcatctggaacgacctgctgtccctggaaaccggcagcctgaagctggccaacggaagagtgatcgagaagacactgtacaacagaagaacccggcaggatgagcctgccctgttcgtggccctgaccttcgagcggcgggaggtcctggactcctccaatatcaaaccaatgaacctgatcggcgtggcaagaggcgaaaacatccccgccgtgatcgccctgaccgaccccgagggctgcccactgagccggtttaaggatagcctgggaaacccaacccacatcctgagaatcggcgagagctataaggagaagcagcggaccatccaggccaagaaggaggtggagcagcggagagccggcggctacagccggaagtacgccagcaaagccaagaatctggcagacgatatggtgagaaacaccgctagagatctgctgtactacgccgtgacccaggatgccatgctgatcttcgccaacctgagccggggcttcggccggcagggcaagcggaccttcatggccgagagacagtacacacggatggaggactggctgaccgccaagctggcctacgagggcctgagcaagacctacctgtccaagacactggcccagtacacctccaagacatgcagcaactgtgggtttaccatcaccagcgccgactacgacagggtgctggagaagctgaagaagacagcaacaggctggatgaccacaattaacggcaaggagctgaaggtggagggccagattacctactacaacagatacaagagacagaacgtagtcaaggacctgtccgtcgagctggatagactgagcgaagaatctgtgaacaacgacatctcctcctggacaaagggcagaagcggagaagctctgagcctcctgaagaaaagattctcccatagacccgtgcaggagaagttcgtgtgcctgaactgcggcttcgagacacacgcagccgagcaagccgccctgaacatcgccagatcctggctgttcctgcggagccaggagtacaagaaataccagacaaacaagacaaccggcaacaccgataagagagccttcgtcgagacctggcagtccttttaccggaagaagcttaaggaggtgtggaaacctgccgtgcggtctggcggatctggcggaggctccacaagcccccaggagcccgtgaccttcgaggacgtggccgtgtacttcacccagaaccagtgggccagcctggaccccacccagagggccctgtacagggaggtgatgctggagaactacgccagcgtggccagcctggtggtgttccccttccccaagcccgacctggtgagccagctggagagggaggaggccccctggggccccgacccctgggaggccgaggtgctgaggggcatctgccccggcaccagccccaagaaaaagagaaaagtctaagctgccttctgcggggcttgccttctggccatgcccttcttctctcccttgcacctgtacctcttggtctttgaataaagcctgagtaggaaggctagcaaaaaaaaaaaaaaaaaaaaaaaaaaaaaaaaaaaaaaaaaaaaaaaaaaaaaaaaaaaaaaaaaaaaaaaaaaaaaaaa

SEQ ID NO: 2715 - RNA, 5419 nt, synthetic construct
  source 1..5419: mol_type = other RNA
aggaaataagagagaaaagaagagtaagaagaaatataagagccaccatggcccctaagaagaagcgtaaagtgagccgggtgaacggcagcggcagcggcggcggcatgaaccacgaccaggagttcgacccccctaaggtgtaccctcccgtccccgccgagaagagaaagcccatccgggtcctgagcctgttcgatggcatcgccaccggtctgctggtgctgaaggacctgggcatccaggtggataggtacattgcctccgaggtgtgcgaggactccatcaccgtgggaatggtgcgtcatcagggcaagatcatgtacgtgggcgacgtgcggagcgtgacacagaagcatatccaggagtggggccctttcgacctggtgatcggcggcagcccttgcaatgacctgagcatcgtgaacccagcccggaagggcctgtacgagggaaccggcagactgttcttcgagttttacagactgctgcacgacgcccggcctaaggaaggcgacgaccggcccttcttttggctgttcgagaatgtggtggccatgggagtcagcgacaagcgggatattagccggttcctggagagcaaccccgtgatgatcgatgccaaggaagtgagcgccgcccaccgggccagatacttctggggcaatctgcctggcatgaacagacccctggccagcaccgtgaacgacaagctggagctgcaggagtgcctggagcacggccggatcgccaagttcagcaaggtgagaaccatcaccacccgaagcaacagcatcaaacaaggcaaggaccagcactttcctgtgttcatgaacgagaaggaggacatcctgtggtgtaccgagatggagagagtgttcgggttcccagtccactacacagatgtcagcaacatgtctagactggccagacagagactgctgggaagaagctggtccgtccctgtgatcagacacctgttcgcccctctgaaggagtacttcgcctgcgtgagcagcggcaacagcaacgccaacagccggggccccagcttctctagcggcctggtgccactgtccctgagagggagccacatgggccccatggagatctacaaaaccgtgagcgcctggaagcggcagcctgtgcgcgtgctgagcctgtttcggaatatcgataaagtcctgaaaagcctgggattcctggagagcggctctggctccggcggtggcaccctgaagtacgtggaggatgtgacaaacgtggtcagacgggatgtggagaagtggggccccttcgatctggtgtacggcagcacccaacccctgggcagctcttgtgaccggtgccctggctggtacatgtttcagttccaccggatcctgcagtacgccctgccgagacaggagtcccagcggccattcttttggattttcatggacaacttgctgctgaccgaggatgaccaggaaactaccactcggttcctgcagaccgaagccgtgaccctgcaggacgtgagaggccgggactaccagaacgccatgcgggtgtggtccaacatccctggactgaaaagcaagcacgcacctctgacccctaaagaagaggagtacctgcaggcccaggtgcggagcagaagcaagctggacgcccctaaggtggatctgctggtgaagaattgcctcctgcccctgagagagtacttcaagtatttcagccagaatagtctgcccctgggcggcccaagcagcggcgcccctcctcccagcggcggcagcccagccggctccccaacctctaccgaggagggcacctctgagtccgccacccccgagagcggccctggcacctccaccgagcccagcgagggcagcgcacccggcagccctgccggcagccccacctccacagaggagggaaccagcaccgagcccagcgaaggcagcgccccaggcaccagcaccgagcctagtgagggcggctctggcggcggcagcgcccaggagattaaacggatcaacaagatcagaagaagacttgtgaaagacagcaacaccaagaaggccggcaagacaggccccatgaaaaccctgctggttagagtgatgacacccgatctgagagagcggctggaaaacctgagaaagaagcctgaaaatatcccccagcccatcagcaatacatctagagccaacctgaataagctgctgaccgattacaccgaaatgaagaaggcgatcctgcatgtgtactgggaagagttccagaaggaccctgtgggcctgatgagccgggtggcccagcctgccagcaagaagatcgatcagaacaagctgaaacctgagatggacgagaagggcaacctgaccaccgccggctttgcctgctctcagtgtggccagcccctgttcgtgtacaagctggagcaggtgtctgagaagggcaaggcttacaccaactacttcggacggtgcaatgtggccgagcacgaaaagctgatcctgctggcccagctgaagcccgagaaggatagcgacgaagccgtgacatatagcctgggaaagtttgggcagagggccctggatttctacagcattcatgtgaccaaggagtccacccaccccgtgaagcccctggcccagatcgccggaaacagatacgcctccggacctgtgggaaaggccctgagcgacgcatgtatgggcacaatcgcctccttcctgtctaagtaccaggacatcatcatcgaacaccagaaggtggtgaagggcaaccagaagagactggagagcctgcgggagctggccggcaaggaaaacctggaataccctagcgtgaccctgccacctcagcctcacaccaaggagggcgttgatgcctacaacgaagtgatcgcccgggtgcgaatgtgggtgaacctgaacctgtggcagaagctgaagctaagcagagatgatgccaagcctctgctgagactgaagggattcccttcctttcctctggtcgagagacaggccaacgaagtggactggtgggacatggtgtgtaacgtgaagaagctgatcaacgagaaaaaggaggatggcaaggtgttttggcagaatctggctggctacaagagacaggaagccctgagaccatacctgagcagcgaggaagatcggaagaagggaaagaaattcgctcggtaccagctgggcgacctgctgctgcacctggaaaagaagcacggcgaggactggggaaaggtgtacgacgaggcctgggagcggattgacaagaaagtggaaggcctgagcaagcacatcaagctggaagaggaacggagaagcgaggacgcccagagcaaggccgccctgaccgactggctgcgggctaaggccagcttcgtgatcgagggcctgaaggaggccgacaaggacgagttctgcagatgcgagctgaagctgcagaagtggtacggggacctgcggggaaagcccttcgccatcgaagccgagaacagcatcctggacatcagcggcttcagcaagcagtacaactgtgccttcatctggcagaaggacggcgtgaagaagctgaacctgtacctgatcatcaactacttcaagggcggcaagctgcggttcaagaagatcaaacctgaagccttcgaagccaacagattctacaccgtgatcaacaaaaagagcggcgagatcgtgcccatggaggtgaacttcaacttcgacgaccccaacctgatcatcctgcctctggcctttggcaagagacagggcagagaattcatctggaacgacctgctgtccctggaaaccggcagcctgaagctggccaacggaagagtgatcgagaagacactgtacaacagaagaacccggcaggatgagcctgccctgttcgtggccctgaccttcgagcggcgggaggtcctggactcctccaatatcaaaccaatgaacctgatcggcgtggcaagaggcgaaaacatccccgccgtgatcgccctgaccgaccccgagggctgcccactgagccggtttaaggatagcctgggaaacccaacccacatcctgagaatcggcgagagctataaggagaagcagcggaccatccaggccaagaaggaggtggagcagcggagagccggcggctacagccggaagtacgccagcaaagccaagaatctggcagacgatatggtgagaaacaccgctagagatctgctgtactacgccgtgacccaggatgccatgctgatcttcgccaacctgagccggggcttcggccggcagggcaagcggaccttcatggccgagagacagtacacacggatggaggactggctgaccgccaagctggcctacgagggcctgagcaagacctacctgtccaagacactggcccagtacacctccaagacatgcagcaactgtgggtttaccatcaccagcgccgactacgacagggtgctggagaagctgaagaagacagcaacaggctggatgaccacaattaacggcaaggagctgaaggtggagggccagattacctactacaacagatacaagagacagaacgtagtcaaggacctgtccgtcgagctggatagactgagcgaagaatctgtgaacaacgacatctcctcctggacaaagggcagaagcggagaagctctgagcctcctgaagaaaagattctcccatagacccgtgcaggagaagttcgtgtgcctgaactgcggcttcgagacacacgcagccgagcaagccgccctgaacatcgccagatcctggctgttcctgcggagccaggagtacaagaaataccagacaaacaagacaaccggcaacaccgataagagagccttcgtcgagacctggcagtccttttaccggaagaagcttaaggaggtgtggaaacctgccgtgcggtctggcggatctggcggaggctccacaagcttccagcacctggtgatgttcagggacgtggccgtggacttcagccaggaggagtgggagtgcctgaacagctaccagaggaacctgtacagggacgtgatcctggagaactacagcaacctggtgagcgtggccggctgcagcatcagcaagcccgacgtgatcaccctgctggagcagggcaaggagccctggatggtggtgagggacgagaggaggaggagcctggacctggagagcaggaccagccccaagaaaaagagaaaagtctaagctgccttctgcggggcttgccttctggccatgcccttcttctctcccttgcacctgtacctcttggtctttgaataaagcctgagtaggaaggctagcaaaaaaaaaaaaaaaaaaaaaaaaaaaaaaaaaaaaaaaaaaaaaaaaaaaaaaaaaaaaaaaaaaaaaaaaaaaaaaaa

SEQ ID NO: 2716 - RNA, 5419 nt, synthetic construct
  source 1..5419: mol_type = other RNA
aggaaataagagagaaaagaagagtaagaagaaatataagagccaccatggcccctaagaagaagcgtaaagtgagccgggtgaacggcagcggcagcggcggcggcatgaaccacgaccaggagttcgacccccctaaggtgtaccctcccgtccccgccgagaagagaaagcccatccgggtcctgagcctgttcgatggcatcgccaccggtctgctggtgctgaaggacctgggcatccaggtggataggtacattgcctccgaggtgtgcgaggactccatcaccgtgggaatggtgcgtcatcagggcaagatcatgtacgtgggcgacgtgcggagcgtgacacagaagcatatccaggagtggggccctttcgacctggtgatcggcggcagcccttgcaatgacctgagcatcgtgaacccagcccggaagggcctgtacgagggaaccggcagactgttcttcgagttttacagactgctgcacgacgcccggcctaaggaaggcgacgaccggcccttcttttggctgttcgagaatgtggtggccatgggagtcagcgacaagcgggatattagccggttcctggagagcaaccccgtgatgatcgatgccaaggaagtgagcgccgcccaccgggccagatacttctggggcaatctgcctggcatgaacagacccctggccagcaccgtgaacgacaagctggagctgcaggagtgcctggagcacggccggatcgccaagttcagcaaggtgagaaccatcaccacccgaagcaacagcatcaaacaaggcaaggaccagcactttcctgtgttcatgaacgagaaggaggacatcctgtggtgtaccgagatggagagagtgttcgggttcccagtccactacacagatgtcagcaacatgtctagactggccagacagagactgctgggaagaagctggtccgtccctgtgatcagacacctgttcgcccctctgaaggagtacttcgcctgcgtgagcagcggcaacagcaacgccaacagccggggccccagcttctctagcggcctggtgccactgtccctgagagggagccacatgggccccatggagatctacaaaaccgtgagcgcctggaagcggcagcctgtgcgcgtgctgagcctgtttcggaatatcgataaagtcctgaaaagcctgggattcctggagagcggctctggctccggcggtggcaccctgaagtacgtggaggatgtgacaaacgtggtcagacgggatgtggagaagtggggccccttcgatctggtgtacggcagcacccaacccctgggcagctcttgtgaccggtgccctggctggtacatgtttcagttccaccggatcctgcagtacgccctgccgagacaggagtcccagcggccattcttttggattttcatggacaacttgctgctgaccgaggatgaccaggaaactaccactcggttcctgcagaccgaagccgtgaccctgcaggacgtgagaggccgggactaccagaacgccatgcgggtgtggtccaacatccctggactgaaaagcaagcacgcacctctgacccctaaagaagaggagtacctgcaggcccaggtgcggagcagaagcaagctggacgcccctaaggtggatctgctggtgaagaattgcctcctgcccctgagagagtacttcaagtatttcagccagaatagtctgcccctgggcggcccaagcagcggcgcccctcctcccagcggcggcagcccagccggctccccaacctctaccgaggagggcacctctgagtccgccacccccgagagcggccctggcacctccaccgagcccagcgagggcagcgcacccggcagccctgccggcagccccacctccacagaggagggaaccagcaccgagcccagcgaaggcagcgccccaggcaccagcaccgagcctagtgagggcggctctggcggcggcagcgcccaggagattaaacggatcaacaagatcagaagaagacttgtgaaagacagcaacaccaagaaggccggcaagacaggccccatgaaaaccctgctggttagagtgatgacacccgatctgagagagcggctggaaaacctgagaaagaagcctgaaaatatcccccagcccatcagcaatacatctagagccaacctgaataagctgctgaccgattacaccgaaatgaagaaggcgatcctgcatgtgtactgggaagagttccagaaggaccctgtgggcctgatgagccgggtggcccagcctgccagcaagaagatcgatcagaacaagctgaaacctgagatggacgagaagggcaacctgaccaccgccggctttgcctgctctcagtgtggccagcccctgttcgtgtacaagctggagcaggtgtctgagaagggcaaggcttacaccaactacttcggacggtgcaatgtggccgagcacgaaaagctgatcctgctggcccagctgaagcccgagaaggatagcgacgaagccgtgacatatagcctgggaaagtttgggcagagggccctggatttctacagcattcatgtgaccaaggagtccacccaccccgtgaagcccctggcccagatcgccggaaacagatacgcctccggacctgtgggaaaggccctgagcgacgcatgtatgggcacaatcgcctccttcctgtctaagtaccaggacatcatcatcgaacaccagaaggtggtgaagggcaaccagaagagactggagagcctgcgggagctggccggcaaggaaaacctggaataccctagcgtgaccctgccacctcagcctcacaccaaggagggcgttgatgcctacaacgaagtgatcgcccgggtgcgaatgtgggtgaacctgaacctgtggcagaagctgaagctaagcagagatgatgccaagcctctgctgagactgaagggattcccttcctttcctctggtcgagagacaggccaacgaagtggactggtgggacatggtgtgtaacgtgaagaagctgatcaacgagaaaaaggaggatggcaaggtgttttggcagaatctggctggctacaagagacaggaagccctgagaccatacctgagcagcgaggaagatcggaagaagggaaagaaattcgctcggtaccagctgggcgacctgctgctgcacctggaaaagaagcacggcgaggactggggaaaggtgtacgacgaggcctgggagcggattgacaagaaagtggaaggcctgagcaagcacatcaagctggaagaggaacggagaagcgaggacgcccagagcaaggccgccctgaccgactggctgcgggctaaggccagcttcgtgatcgagggcctgaaggaggccgacaaggacgagttctgcagatgcgagctgaagctgcagaagtggtacggggacctgcggggaaagcccttcgccatcgaagccgagaacagcatcctggacatcagcggcttcagcaagcagtacaactgtgccttcatctggcagaaggacggcgtgaagaagctgaacctgtacctgatcatcaactacttcaagggcggcaagctgcggttcaagaagatcaaacctgaagccttcgaagccaacagattctacaccgtgatcaacaaaaagagcggcgagatcgtgcccatggaggtgaacttcaacttcgacgaccccaacctgatcatcctgcctctggcctttggcaagagacagggcagagaattcatctggaacgacctgctgtccctggaaaccggcagcctgaagctggccaacggaagagtgatcgagaagacactgtacaacagaagaacccggcaggatgagcctgccctgttcgtggccctgaccttcgagcggcgggaggtcctggactcctccaatatcaaaccaatgaacctgatcggcgtggcaagaggcgaaaacatccccgccgtgatcgccctgaccgaccccgagggctgcccactgagccggtttaaggatagcctgggaaacccaacccacatcctgagaatcggcgagagctataaggagaagcagcggaccatccaggccaagaaggaggtggagcagcggagagccggcggctacagccggaagtacgccagcaaagccaagaatctggcagacgatatggtgagaaacaccgctagagatctgctgtactacgccgtgacccaggatgccatgctgatcttcgccaacctgagccggggcttcggccggcagggcaagcggaccttcatggccgagagacagtacacacggatggaggactggctgaccgccaagctggcctacgagggcctgagcaagacctacctgtccaagacactggcccagtacacctccaagacatgcagcaactgtgggtttaccatcaccagcgccgactacgacagggtgctggagaagctgaagaagacagcaacaggctggatgaccacaattaacggcaaggagctgaaggtggagggccagattacctactacaacagatacaagagacagaacgtagtcaaggacctgtccgtcgagctggatagactgagcgaagaatctgtgaacaacgacatctcctcctggacaaagggcagaagcggagaagctctgagcctcctgaagaaaagattctcccatagacccgtgcaggagaagttcgtgtgcctgaactgcggcttcgagacacacgcagccgagcaagccgccctgaacatcgccagatcctggctgttcctgcggagccaggagtacaagaaataccagacaaacaagacaaccggcaacaccgataagagagccttcgtcgagacctggcagtccttttaccggaagaagcttaaggaggtgtggaaacctgccgtgcggtctggcggatctggcggaggctccacaagcccccaggagcccgtgaccttcaaggacgtggccgtggacttcagccaggaggagtggggcctgctgggccccgcccagaggcacctgtacagggacgtgatgctggagaactacaggaacctggtgagcctgggcctgatcctggccaagcccgaggtggtgtgccacctggagcagggcggcgagctgtggaagcccgagcacggcgtgctgtgcagcggcgacggcgagctgtgggtgaggaccagccccaagaaaaagagaaaagtctaagctgccttctgcggggcttgccttctggccatgcccttcttctctcccttgcacctgtacctcttggtctttgaataaagcctgagtaggaaggctagcaaaaaaaaaaaaaaaaaaaaaaaaaaaaaaaaaaaaaaaaaaaaaaaaaaaaaaaaaaaaaaaaaaaaaaaaaaaaaaaa

SEQ ID NO: 2717 - RNA, 5419 nt, synthetic construct
  source 1..5419: mol_type = other RNA
aggaaataagagagaaaagaagagtaagaagaaatataagagccaccatggcccctaagaagaagcgtaaagtgagccgggtgaacggcagcggcagcggcggcggcatgaaccacgaccaggagttcgacccccctaaggtgtaccctcccgtccccgccgagaagagaaagcccatccgggtcctgagcctgttcgatggcatcgccaccggtctgctggtgctgaaggacctgggcatccaggtggataggtacattgcctccgaggtgtgcgaggactccatcaccgtgggaatggtgcgtcatcagggcaagatcatgtacgtgggcgacgtgcggagcgtgacacagaagcatatccaggagtggggccctttcgacctggtgatcggcggcagcccttgcaatgacctgagcatcgtgaacccagcccggaagggcctgtacgagggaaccggcagactgttcttcgagttttacagactgctgcacgacgcccggcctaaggaaggcgacgaccggcccttcttttggctgttcgagaatgtggtggccatgggagtcagcgacaagcgggatattagccggttcctggagagcaaccccgtgatgatcgatgccaaggaagtgagcgccgcccaccgggccagatacttctggggcaatctgcctggcatgaacagacccctggccagcaccgtgaacgacaagctggagctgcaggagtgcctggagcacggccggatcgccaagttcagcaaggtgagaaccatcaccacccgaagcaacagcatcaaacaaggcaaggaccagcactttcctgtgttcatgaacgagaaggaggacatcctgtggtgtaccgagatggagagagtgttcgggttcccagtccactacacagatgtcagcaacatgtctagactggccagacagagactgctgggaagaagctggtccgtccctgtgatcagacacctgttcgcccctctgaaggagtacttcgcctgcgtgagcagcggcaacagcaacgccaacagccggggccccagcttctctagcggcctggtgccactgtccctgagagggagccacatgggccccatggagatctacaaaaccgtgagcgcctggaagcggcagcctgtgcgcgtgctgagcctgtttcggaatatcgataaagtcctgaaaagcctgggattcctggagagcggctctggctccggcggtggcaccctgaagtacgtggaggatgtgacaaacgtggtcagacgggatgtggagaagtggggccccttcgatctggtgtacggcagcacccaacccctgggcagctcttgtgaccggtgccctggctggtacatgtttcagttccaccggatcctgcagtacgccctgccgagacaggagtcccagcggccattcttttggattttcatggacaacttgctgctgaccgaggatgaccaggaaactaccactcggttcctgcagaccgaagccgtgaccctgcaggacgtgagaggccgggactaccagaacgccatgcgggtgtggtccaacatccctggactgaaaagcaagcacgcacctctgacccctaaagaagaggagtacctgcaggcccaggtgcggagcagaagcaagctggacgcccctaaggtggatctgctggtgaagaattgcctcctgcccctgagagagtacttcaagtatttcagccagaatagtctgcccctgggcggcccaagcagcggcgcccctcctcccagcggcggcagcccagccggctccccaacctctaccgaggagggcacctctgagtccgccacccccgagagcggccctggcacctccaccgagcccagcgagggcagcgcacccggcagccctgccggcagccccacctccacagaggagggaaccagcaccgagcccagcgaaggcagcgccccaggcaccagcaccgagcctagtgagggcggctctggcggcggcagcgcccaggagattaaacggatcaacaagatcagaagaagacttgtgaaagacagcaacaccaagaaggccggcaagacaggccccatgaaaaccctgctggttagagtgatgacacccgatctgagagagcggctggaaaacctgagaaagaagcctgaaaatatcccccagcccatcagcaatacatctagagccaacctgaataagctgctgaccgattacaccgaaatgaagaaggcgatcctgcatgtgtactgggaagagttccagaaggaccctgtgggcctgatgagccgggtggcccagcctgccagcaagaagatcgatcagaacaagctgaaacctgagatggacgagaagggcaacctgaccaccgccggctttgcctgctctcagtgtggccagcccctgttcgtgtacaagctggagcaggtgtctgagaagggcaaggcttacaccaactacttcggacggtgcaatgtggccgagcacgaaaagctgatcctgctggcccagctgaagcccgagaaggatagcgacgaagccgtgacatatagcctgggaaagtttgggcagagggccctggatttctacagcattcatgtgaccaaggagtccacccaccccgtgaagcccctggcccagatcgccggaaacagatacgcctccggacctgtgggaaaggccctgagcgacgcatgtatgggcacaatcgcctccttcctgtctaagtaccaggacatcatcatcgaacaccagaaggtggtgaagggcaaccagaagagactggagagcctgcgggagctggccggcaaggaaaacctggaataccctagcgtgaccctgccacctcagcctcacaccaaggagggcgttgatgcctacaacgaagtgatcgcccgggtgcgaatgtgggtgaacctgaacctgtggcagaagctgaagctaagcagagatgatgccaagcctctgctgagactgaagggattcccttcctttcctctggtcgagagacaggccaacgaagtggactggtgggacatggtgtgtaacgtgaagaagctgatcaacgagaaaaaggaggatggcaaggtgttttggcagaatctggctggctacaagagacaggaagccctgagaccatacctgagcagcgaggaagatcggaagaagggaaagaaattcgctcggtaccagctgggcgacctgctgctgcacctggaaaagaagcacggcgaggactggggaaaggtgtacgacgaggcctgggagcggattgacaagaaagtggaaggcctgagcaagcacatcaagctggaagaggaacggagaagcgaggacgcccagagcaaggccgccctgaccgactggctgcgggctaaggccagcttcgtgatcgagggcctgaaggaggccgacaaggacgagttctgcagatgcgagctgaagctgcagaagtggtacggggacctgcggggaaagcccttcgccatcgaagccgagaacagcatcctggacatcagcggcttcagcaagcagtacaactgtgccttcatctggcagaaggacggcgtgaagaagctgaacctgtacctgatcatcaactacttcaagggcggcaagctgcggttcaagaagatcaaacctgaagccttcgaagccaacagattctacaccgtgatcaacaaaaagagcggcgagatcgtgcccatggaggtgaacttcaacttcgacgaccccaacctgatcatcctgcctctggcctttggcaagagacagggcagagaattcatctggaacgacctgctgtccctggaaaccggcagcctgaagctggccaacggaagagtgatcgagaagacactgtacaacagaagaacccggcaggatgagcctgccctgttcgtggccctgaccttcgagcggcgggaggtcctggactcctccaatatcaaaccaatgaacctgatcggcgtggcaagaggcgaaaacatccccgccgtgatcgccctgaccgaccccgagggctgcccactgagccggtttaaggatagcctgggaaacccaacccacatcctgagaatcggcgagagctataaggagaagcagcggaccatccaggccaagaaggaggtggagcagcggagagccggcggctacagccggaagtacgccagcaaagccaagaatctggcagacgatatggtgagaaacaccgctagagatctgctgtactacgccgtgacccaggatgccatgctgatcttcgccaacctgagccggggcttcggccggcagggcaagcggaccttcatggccgagagacagtacacacggatggaggactggctgaccgccaagctggcctacgagggcctgagcaagacctacctgtccaagacactggcccagtacacctccaagacatgcagcaactgtgggtttaccatcaccagcgccgactacgacagggtgctggagaagctgaagaagacagcaacaggctggatgaccacaattaacggcaaggagctgaaggtggagggccagattacctactacaacagatacaagagacagaacgtagtcaaggacctgtccgtcgagctggatagactgagcgaagaatctgtgaacaacgacatctcctcctggacaaagggcagaagcggagaagctctgagcctcctgaagaaaagattctcccatagacccgtgcaggagaagttcgtgtgcctgaactgcggcttcgagacacacgcagccgagcaagccgccctgaacatcgccagatcctggctgttcctgcggagccaggagtacaagaaataccagacaaacaagacaaccggcaacaccgataagagagccttcgtcgagacctggcagtccttttaccggaagaagcttaaggaggtgtggaaacctgccgtgcggtctggcggatctggcggaggctccacaagcaagcccaggaccgtgagcttcgccgacgtggccgtgtacttcagcagggaggagtggggctgcctgaggcccgcccagagggccctgtacagggacgtgatgagggagacctacggccacctgggcgccctgggcttccccggccccaagcccgccctgatcagctggatggagcaggagaccgaggcctggagccccgccgcccaggaccccgagaagggcgagaggctgggcggcgccaggaccagccccaagaaaaagagaaaagtctaagctgccttctgcggggcttgccttctggccatgcccttcttctctcccttgcacctgtacctcttggtctttgaataaagcctgagtaggaaggctagcaaaaaaaaaaaaaaaaaaaaaaaaaaaaaaaaaaaaaaaaaaaaaaaaaaaaaaaaaaaaaaaaaaaaaaaaaaaaaaaa

SEQ ID NO: 2718 - RNA, 5419 nt, synthetic construct
  source 1..5419: mol_type = other RNA
aggaaataagagagaaaagaagagtaagaagaaatataagagccaccatggcccctaagaagaagcgtaaagtgagccgggtgaacggcagcggcagcggcggcggcatgaaccacgaccaggagttcgacccccctaaggtgtaccctcccgtccccgccgagaagagaaagcccatccgggtcctgagcctgttcgatggcatcgccaccggtctgctggtgctgaaggacctgggcatccaggtggataggtacattgcctccgaggtgtgcgaggactccatcaccgtgggaatggtgcgtcatcagggcaagatcatgtacgtgggcgacgtgcggagcgtgacacagaagcatatccaggagtggggccctttcgacctggtgatcggcggcagcccttgcaatgacctgagcatcgtgaacccagcccggaagggcctgtacgagggaaccggcagactgttcttcgagttttacagactgctgcacgacgcccggcctaaggaaggcgacgaccggcccttcttttggctgttcgagaatgtggtggccatgggagtcagcgacaagcgggatattagccggttcctggagagcaaccccgtgatgatcgatgccaaggaagtgagcgccgcccaccgggccagatacttctggggcaatctgcctggcatgaacagacccctggccagcaccgtgaacgacaagctggagctgcaggagtgcctggagcacggccggatcgccaagttcagcaaggtgagaaccatcaccacccgaagcaacagcatcaaacaaggcaaggaccagcactttcctgtgttcatgaacgagaaggaggacatcctgtggtgtaccgagatggagagagtgttcgggttcccagtccactacacagatgtcagcaacatgtctagactggccagacagagactgctgggaagaagctggtccgtccctgtgatcagacacctgttcgcccctctgaaggagtacttcgcctgcgtgagcagcggcaacagcaacgccaacagccggggccccagcttctctagcggcctggtgccactgtccctgagagggagccacatgggccccatggagatctacaaaaccgtgagcgcctggaagcggcagcctgtgcgcgtgctgagcctgtttcggaatatcgataaagtcctgaaaagcctgggattcctggagagcggctctggctccggcggtggcaccctgaagtacgtggaggatgtgacaaacgtggtcagacgggatgtggagaagtggggccccttcgatctggtgtacggcagcacccaacccctgggcagctcttgtgaccggtgccctggctggtacatgtttcagttccaccggatcctgcagtacgccctgccgagacaggagtcccagcggccattcttttggattttcatggacaacttgctgctgaccgaggatgaccaggaaactaccactcggttcctgcagaccgaagccgtgaccctgcaggacgtgagaggccgggactaccagaacgccatgcgggtgtggtccaacatccctggactgaaaagcaagcacgcacctctgacccctaaagaagaggagtacctgcaggcccaggtgcggagcagaagcaagctggacgcccctaaggtggatctgctggtgaagaattgcctcctgcccctgagagagtacttcaagtatttcagccagaatagtctgcccctgggcggcccaagcagcggcgcccctcctcccagcggcggcagcccagccggctccccaacctctaccgaggagggcacctctgagtccgccacccccgagagcggccctggcacctccaccgagcccagcgagggcagcgcacccggcagccctgccggcagccccacctccacagaggagggaaccagcaccgagcccagcgaaggcagcgccccaggcaccagcaccgagcctagtgagggcggctctggcggcggcagcgcccaggagattaaacggatcaacaagatcagaagaagacttgtgaaagacagcaacaccaagaaggccggcaagacaggccccatgaaaaccctgctggttagagtgatgacacccgatctgagagagcggctggaaaacctgagaaagaagcctgaaaatatcccccagcccatcagcaatacatctagagccaacctgaataagctgctgaccgattacaccgaaatgaagaaggcgatcctgcatgtgtactgggaagagttccagaaggaccctgtgggcctgatgagccgggtggcccagcctgccagcaagaagatcgatcagaacaagctgaaacctgagatggacgagaagggcaacctgaccaccgccggctttgcctgctctcagtgtggccagcccctgttcgtgtacaagctggagcaggtgtctgagaagggcaaggcttacaccaactacttcggacggtgcaatgtggccgagcacgaaaagctgatcctgctggcccagctgaagcccgagaaggatagcgacgaagccgtgacatatagcctgggaaagtttgggcagagggccctggatttctacagcattcatgtgaccaaggagtccacccaccccgtgaagcccctggcccagatcgccggaaacagatacgcctccggacctgtgggaaaggccctgagcgacgcatgtatgggcacaatcgcctccttcctgtctaagtaccaggacatcatcatcgaacaccagaaggtggtgaagggcaaccagaagagactggagagcctgcgggagctggccggcaaggaaaacctggaataccctagcgtgaccctgccacctcagcctcacaccaaggagggcgttgatgcctacaacgaagtgatcgcccgggtgcgaatgtgggtgaacctgaacctgtggcagaagctgaagctaagcagagatgatgccaagcctctgctgagactgaagggattcccttcctttcctctggtcgagagacaggccaacgaagtggactggtgggacatggtgtgtaacgtgaagaagctgatcaacgagaaaaaggaggatggcaaggtgttttggcagaatctggctggctacaagagacaggaagccctgagaccatacctgagcagcgaggaagatcggaagaagggaaagaaattcgctcggtaccagctgggcgacctgctgctgcacctggaaaagaagcacggcgaggactggggaaaggtgtacgacgaggcctgggagcggattgacaagaaagtggaaggcctgagcaagcacatcaagctggaagaggaacggagaagcgaggacgcccagagcaaggccgccctgaccgactggctgcgggctaaggccagcttcgtgatcgagggcctgaaggaggccgacaaggacgagttctgcagatgcgagctgaagctgcagaagtggtacggggacctgcggggaaagcccttcgccatcgaagccgagaacagcatcctggacatcagcggcttcagcaagcagtacaactgtgccttcatctggcagaaggacggcgtgaagaagctgaacctgtacctgatcatcaactacttcaagggcggcaagctgcggttcaagaagatcaaacctgaagccttcgaagccaacagattctacaccgtgatcaacaaaaagagcggcgagatcgtgcccatggaggtgaacttcaacttcgacgaccccaacctgatcatcctgcctctggcctttggcaagagacagggcagagaattcatctggaacgacctgctgtccctggaaaccggcagcctgaagctggccaacggaagagtgatcgagaagacactgtacaacagaagaacccggcaggatgagcctgccctgttcgtggccctgaccttcgagcggcgggaggtcctggactcctccaatatcaaaccaatgaacctgatcggcgtggcaagaggcgaaaacatccccgccgtgatcgccctgaccgaccccgagggctgcccactgagccggtttaaggatagcctgggaaacccaacccacatcctgagaatcggcgagagctataaggagaagcagcggaccatccaggccaagaaggaggtggagcagcggagagccggcggctacagccggaagtacgccagcaaagccaagaatctggcagacgatatggtgagaaacaccgctagagatctgctgtactacgccgtgacccaggatgccatgctgatcttcgccaacctgagccggggcttcggccggcagggcaagcggaccttcatggccgagagacagtacacacggatggaggactggctgaccgccaagctggcctacgagggcctgagcaagacctacctgtccaagacactggcccagtacacctccaagacatgcagcaactgtgggtttaccatcaccagcgccgactacgacagggtgctggagaagctgaagaagacagcaacaggctggatgaccacaattaacggcaaggagctgaaggtggagggccagattacctactacaacagatacaagagacagaacgtagtcaaggacctgtccgtcgagctggatagactgagcgaagaatctgtgaacaacgacatctcctcctggacaaagggcagaagcggagaagctctgagcctcctgaagaaaagattctcccatagacccgtgcaggagaagttcgtgtgcctgaactgcggcttcgagacacacgcagccgagcaagccgccctgaacatcgccagatcctggctgttcctgcggagccaggagtacaagaaataccagacaaacaagacaaccggcaacaccgataagagagccttcgtcgagacctggcagtccttttaccggaagaagcttaaggaggtgtggaaacctgccgtgcggtctggcggatctggcggaggctccacaagctgccaggccctggtgaccttcgaggacgtggccgtgaccttcaccgacgacgagtggaagaggctggtgcccgtgcagagggccctgtacaaggccgtgatgctggagaactacgagagcatcatcagcctgggcctgcccgtgcccaggcccgacctgatcctgcagttcaagaggaggggcgagccctggatgaggggcttccacggcagcgaggagaaggcctggcccgagagcgtgagcaccagccccaagaaaaagagaaaagtctaagctgccttctgcggggcttgccttctggccatgcccttcttctctcccttgcacctgtacctcttggtctttgaataaagcctgagtaggaaggctagcaaaaaaaaaaaaaaaaaaaaaaaaaaaaaaaaaaaaaaaaaaaaaaaaaaaaaaaaaaaaaaaaaaaaaaaaaaaaaaaa

SEQ ID NO: 2719 - RNA, 5419 nt, synthetic construct
  source 1..5419: mol_type = other RNA
aggaaataagagagaaaagaagagtaagaagaaatataagagccaccatggcccctaagaagaagcgtaaagtgagccgggtgaacggcagcggcagcggcggcggcatgaaccacgaccaggagttcgacccccctaaggtgtaccctcccgtccccgccgagaagagaaagcccatccgggtcctgagcctgttcgatggcatcgccaccggtctgctggtgctgaaggacctgggcatccaggtggataggtacattgcctccgaggtgtgcgaggactccatcaccgtgggaatggtgcgtcatcagggcaagatcatgtacgtgggcgacgtgcggagcgtgacacagaagcatatccaggagtggggccctttcgacctggtgatcggcggcagcccttgcaatgacctgagcatcgtgaacccagcccggaagggcctgtacgagggaaccggcagactgttcttcgagttttacagactgctgcacgacgcccggcctaaggaaggcgacgaccggcccttcttttggctgttcgagaatgtggtggccatgggagtcagcgacaagcgggatattagccggttcctggagagcaaccccgtgatgatcgatgccaaggaagtgagcgccgcccaccgggccagatacttctggggcaatctgcctggcatgaacagacccctggccagcaccgtgaacgacaagctggagctgcaggagtgcctggagcacggccggatcgccaagttcagcaaggtgagaaccatcaccacccgaagcaacagcatcaaacaaggcaaggaccagcactttcctgtgttcatgaacgagaaggaggacatcctgtggtgtaccgagatggagagagtgttcgggttcccagtccactacacagatgtcagcaacatgtctagactggccagacagagactgctgggaagaagctggtccgtccctgtgatcagacacctgttcgcccctctgaaggagtacttcgcctgcgtgagcagcggcaacagcaacgccaacagccggggccccagcttctctagcggcctggtgccactgtccctgagagggagccacatgggccccatggagatctacaaaaccgtgagcgcctggaagcggcagcctgtgcgcgtgctgagcctgtttcggaatatcgataaagtcctgaaaagcctgggattcctggagagcggctctggctccggcggtggcaccctgaagtacgtggaggatgtgacaaacgtggtcagacgggatgtggagaagtggggccccttcgatctggtgtacggcagcacccaacccctgggcagctcttgtgaccggtgccctggctggtacatgtttcagttccaccggatcctgcagtacgccctgccgagacaggagtcccagcggccattcttttggattttcatggacaacttgctgctgaccgaggatgaccaggaaactaccactcggttcctgcagaccgaagccgtgaccctgcaggacgtgagaggccgggactaccagaacgccatgcgggtgtggtccaacatccctggactgaaaagcaagcacgcacctctgacccctaaagaagaggagtacctgcaggcccaggtgcggagcagaagcaagctggacgcccctaaggtggatctgctggtgaagaattgcctcctgcccctgagagagtacttcaagtatttcagccagaatagtctgcccctgggcggcccaagcagcggcgcccctcctcccagcggcggcagcccagccggctccccaacctctaccgaggagggcacctctgagtccgccacccccgagagcggccctggcacctccaccgagcccagcgagggcagcgcacccggcagccctgccggcagccccacctccacagaggagggaaccagcaccgagcccagcgaaggcagcgccccaggcaccagcaccgagcctagtgagggcggctctggcggcggcagcgcccaggagattaaacggatcaacaagatcagaagaagacttgtgaaagacagcaacaccaagaaggccggcaagacaggccccatgaaaaccctgctggttagagtgatgacacccgatctgagagagcggctggaaaacctgagaaagaagcctgaaaatatcccccagcccatcagcaatacatctagagccaacctgaataagctgctgaccgattacaccgaaatgaagaaggcgatcctgcatgtgtactgggaagagttccagaaggaccctgtgggcctgatgagccgggtggcccagcctgccagcaagaagatcgatcagaacaagctgaaacctgagatggacgagaagggcaacctgaccaccgccggctttgcctgctctcagtgtggccagcccctgttcgtgtacaagctggagcaggtgtctgagaagggcaaggcttacaccaactacttcggacggtgcaatgtggccgagcacgaaaagctgatcctgctggcccagctgaagcccgagaaggatagcgacgaagccgtgacatatagcctgggaaagtttgggcagagggccctggatttctacagcattcatgtgaccaaggagtccacccaccccgtgaagcccctggcccagatcgccggaaacagatacgcctccggacctgtgggaaaggccctgagcgacgcatgtatgggcacaatcgcctccttcctgtctaagtaccaggacatcatcatcgaacaccagaaggtggtgaagggcaaccagaagagactggagagcctgcgggagctggccggcaaggaaaacctggaataccctagcgtgaccctgccacctcagcctcacaccaaggagggcgttgatgcctacaacgaagtgatcgcccgggtgcgaatgtgggtgaacctgaacctgtggcagaagctgaagctaagcagagatgatgccaagcctctgctgagactgaagggattcccttcctttcctctggtcgagagacaggccaacgaagtggactggtgggacatggtgtgtaacgtgaagaagctgatcaacgagaaaaaggaggatggcaaggtgttttggcagaatctggctggctacaagagacaggaagccctgagaccatacctgagcagcgaggaagatcggaagaagggaaagaaattcgctcggtaccagctgggcgacctgctgctgcacctggaaaagaagcacggcgaggactggggaaaggtgtacgacgaggcctgggagcggattgacaagaaagtggaaggcctgagcaagcacatcaagctggaagaggaacggagaagcgaggacgcccagagcaaggccgccctgaccgactggctgcgggctaaggccagcttcgtgatcgagggcctgaaggaggccgacaaggacgagttctgcagatgcgagctgaagctgcagaagtggtacggggacctgcggggaaagcccttcgccatcgaagccgagaacagcatcctggacatcagcggcttcagcaagcagtacaactgtgccttcatctggcagaaggacggcgtgaagaagctgaacctgtacctgatcatcaactacttcaagggcggcaagctgcggttcaagaagatcaaacctgaagccttcgaagccaacagattctacaccgtgatcaacaaaaagagcggcgagatcgtgcccatggaggtgaacttcaacttcgacgaccccaacctgatcatcctgcctctggcctttggcaagagacagggcagagaattcatctggaacgacctgctgtccctggaaaccggcagcctgaagctggccaacggaagagtgatcgagaagacactgtacaacagaagaacccggcaggatgagcctgccctgttcgtggccctgaccttcgagcggcgggaggtcctggactcctccaatatcaaaccaatgaacctgatcggcgtggcaagaggcgaaaacatccccgccgtgatcgccctgaccgaccccgagggctgcccactgagccggtttaaggatagcctgggaaacccaacccacatcctgagaatcggcgagagctataaggagaagcagcggaccatccaggccaagaaggaggtggagcagcggagagccggcggctacagccggaagtacgccagcaaagccaagaatctggcagacgatatggtgagaaacaccgctagagatctgctgtactacgccgtgacccaggatgccatgctgatcttcgccaacctgagccggggcttcggccggcagggcaagcggaccttcatggccgagagacagtacacacggatggaggactggctgaccgccaagctggcctacgagggcctgagcaagacctacctgtccaagacactggcccagtacacctccaagacatgcagcaactgtgggtttaccatcaccagcgccgactacgacagggtgctggagaagctgaagaagacagcaacaggctggatgaccacaattaacggcaaggagctgaaggtggagggccagattacctactacaacagatacaagagacagaacgtagtcaaggacctgtccgtcgagctggatagactgagcgaagaatctgtgaacaacgacatctcctcctggacaaagggcagaagcggagaagctctgagcctcctgaagaaaagattctcccatagacccgtgcaggagaagttcgtgtgcctgaactgcggcttcgagacacacgcagccgagcaagccgccctgaacatcgccagatcctggctgttcctgcggagccaggagtacaagaaataccagacaaacaagacaaccggcaacaccgataagagagccttcgtcgagacctggcagtccttttaccggaagaagcttaaggaggtgtggaaacctgccgtgcggtctggcggatctggcggaggctccacaagccaggccgaggtgaccttcgaggacgtggccgtgctgttcagcagggaggagtggggcaggctgggccccgcccagaggggcctgtacagggacgtgatgctggagacctacaggaacctggtgagcctgggcgccggccccgccggccccaagcccggcgtgatcacccagctggagaggggcgacgagccctgggtgctggacacccagggcgccaagggcaaggagaggctgagggtgagcaccagccccaagaaaaagagaaaagtctaagctgccttctgcggggcttgccttctggccatgcccttcttctctcccttgcacctgtacctcttggtctttgaataaagcctgagtaggaaggctagcaaaaaaaaaaaaaaaaaaaaaaaaaaaaaaaaaaaaaaaaaaaaaaaaaaaaaaaaaaaaaaaaaaaaaaaaaaaaaaaa

SEQ ID NO: 2720 - RNA, 5419 nt, synthetic construct
  source 1..5419: mol_type = other RNA
aggaaataagagagaaaagaagagtaagaagaaatataagagccaccatggcccctaagaagaagcgtaaagtgagccgggtgaacggcagcggcagcggcggcggcatgaaccacgaccaggagttcgacccccctaaggtgtaccctcccgtccccgccgagaagagaaagcccatccgggtcctgagcctgttcgatggcatcgccaccggtctgctggtgctgaaggacctgggcatccaggtggataggtacattgcctccgaggtgtgcgaggactccatcaccgtgggaatggtgcgtcatcagggcaagatcatgtacgtgggcgacgtgcggagcgtgacacagaagcatatccaggagtggggccctttcgacctggtgatcggcggcagcccttgcaatgacctgagcatcgtgaacccagcccggaagggcctgtacgagggaaccggcagactgttcttcgagttttacagactgctgcacgacgcccggcctaaggaaggcgacgaccggcccttcttttggctgttcgagaatgtggtggccatgggagtcagcgacaagcgggatattagccggttcctggagagcaaccccgtgatgatcgatgccaaggaagtgagcgccgcccaccgggccagatacttctggggcaatctgcctggcatgaacagacccctggccagcaccgtgaacgacaagctggagctgcaggagtgcctggagcacggccggatcgccaagttcagcaaggtgagaaccatcaccacccgaagcaacagcatcaaacaaggcaaggaccagcactttcctgtgttcatgaacgagaaggaggacatcctgtggtgtaccgagatggagagagtgttcgggttcccagtccactacacagatgtcagcaacatgtctagactggccagacagagactgctgggaagaagctggtccgtccctgtgatcagacacctgttcgcccctctgaaggagtacttcgcctgcgtgagcagcggcaacagcaacgccaacagccggggccccagcttctctagcggcctggtgccactgtccctgagagggagccacatgggccccatggagatctacaaaaccgtgagcgcctggaagcggcagcctgtgcgcgtgctgagcctgtttcggaatatcgataaagtcctgaaaagcctgggattcctggagagcggctctggctccggcggtggcaccctgaagtacgtggaggatgtgacaaacgtggtcagacgggatgtggagaagtggggccccttcgatctggtgtacggcagcacccaacccctgggcagctcttgtgaccggtgccctggctggtacatgtttcagttccaccggatcctgcagtacgccctgccgagacaggagtcccagcggccattcttttggattttcatggacaacttgctgctgaccgaggatgaccaggaaactaccactcggttcctgcagaccgaagccgtgaccctgcaggacgtgagaggccgggactaccagaacgccatgcgggtgtggtccaacatccctggactgaaaagcaagcacgcacctctgacccctaaagaagaggagtacctgcaggcccaggtgcggagcagaagcaagctggacgcccctaaggtggatctgctggtgaagaattgcctcctgcccctgagagagtacttcaagtatttcagccagaatagtctgcccctgggcggcccaagcagcggcgcccctcctcccagcggcggcagcccagccggctccccaacctctaccgaggagggcacctctgagtccgccacccccgagagcggccctggcacctccaccgagcccagcgagggcagcgcacccggcagccctgccggcagccccacctccacagaggagggaaccagcaccgagcccagcgaaggcagcgccccaggcaccagcaccgagcctagtgagggcggctctggcggcggcagcgcccaggagattaaacggatcaacaagatcagaagaagacttgtgaaagacagcaacaccaagaaggccggcaagacaggccccatgaaaaccctgctggttagagtgatgacacccgatctgagagagcggctggaaaacctgagaaagaagcctgaaaatatcccccagcccatcagcaatacatctagagccaacctgaataagctgctgaccgattacaccgaaatgaagaaggcgatcctgcatgtgtactgggaagagttccagaaggaccctgtgggcctgatgagccgggtggcccagcctgccagcaagaagatcgatcagaacaagctgaaacctgagatggacgagaagggcaacctgaccaccgccggctttgcctgctctcagtgtggccagcccctgttcgtgtacaagctggagcaggtgtctgagaagggcaaggcttacaccaactacttcggacggtgcaatgtggccgagcacgaaaagctgatcctgctggcccagctgaagcccgagaaggatagcgacgaagccgtgacatatagcctgggaaagtttgggcagagggccctggatttctacagcattcatgtgaccaaggagtccacccaccccgtgaagcccctggcccagatcgccggaaacagatacgcctccggacctgtgggaaaggccctgagcgacgcatgtatgggcacaatcgcctccttcctgtctaagtaccaggacatcatcatcgaacaccagaaggtggtgaagggcaaccagaagagactggagagcctgcgggagctggccggcaaggaaaacctggaataccctagcgtgaccctgccacctcagcctcacaccaaggagggcgttgatgcctacaacgaagtgatcgcccgggtgcgaatgtgggtgaacctgaacctgtggcagaagctgaagctaagcagagatgatgccaagcctctgctgagactgaagggattcccttcctttcctctggtcgagagacaggccaacgaagtggactggtgggacatggtgtgtaacgtgaagaagctgatcaacgagaaaaaggaggatggcaaggtgttttggcagaatctggctggctacaagagacaggaagccctgagaccatacctgagcagcgaggaagatcggaagaagggaaagaaattcgctcggtaccagctgggcgacctgctgctgcacctggaaaagaagcacggcgaggactggggaaaggtgtacgacgaggcctgggagcggattgacaagaaagtggaaggcctgagcaagcacatcaagctggaagaggaacggagaagcgaggacgcccagagcaaggccgccctgaccgactggctgcgggctaaggccagcttcgtgatcgagggcctgaaggaggccgacaaggacgagttctgcagatgcgagctgaagctgcagaagtggtacggggacctgcggggaaagcccttcgccatcgaagccgagaacagcatcctggacatcagcggcttcagcaagcagtacaactgtgccttcatctggcagaaggacggcgtgaagaagctgaacctgtacctgatcatcaactacttcaagggcggcaagctgcggttcaagaagatcaaacctgaagccttcgaagccaacagattctacaccgtgatcaacaaaaagagcggcgagatcgtgcccatggaggtgaacttcaacttcgacgaccccaacctgatcatcctgcctctggcctttggcaagagacagggcagagaattcatctggaacgacctgctgtccctggaaaccggcagcctgaagctggccaacggaagagtgatcgagaagacactgtacaacagaagaacccggcaggatgagcctgccctgttcgtggccctgaccttcgagcggcgggaggtcctggactcctccaatatcaaaccaatgaacctgatcggcgtggcaagaggcgaaaacatccccgccgtgatcgccctgaccgaccccgagggctgcccactgagccggtttaaggatagcctgggaaacccaacccacatcctgagaatcggcgagagctataaggagaagcagcggaccatccaggccaagaaggaggtggagcagcggagagccggcggctacagccggaagtacgccagcaaagccaagaatctggcagacgatatggtgagaaacaccgctagagatctgctgtactacgccgtgacccaggatgccatgctgatcttcgccaacctgagccggggcttcggccggcagggcaagcggaccttcatggccgagagacagtacacacggatggaggactggctgaccgccaagctggcctacgagggcctgagcaagacctacctgtccaagacactggcccagtacacctccaagacatgcagcaactgtgggtttaccatcaccagcgccgactacgacagggtgctggagaagctgaagaagacagcaacaggctggatgaccacaattaacggcaaggagctgaaggtggagggccagattacctactacaacagatacaagagacagaacgtagtcaaggacctgtccgtcgagctggatagactgagcgaagaatctgtgaacaacgacatctcctcctggacaaagggcagaagcggagaagctctgagcctcctgaagaaaagattctcccatagacccgtgcaggagaagttcgtgtgcctgaactgcggcttcgagacacacgcagccgagcaagccgccctgaacatcgccagatcctggctgttcctgcggagccaggagtacaagaaataccagacaaacaagacaaccggcaacaccgataagagagccttcgtcgagacctggcagtccttttaccggaagaagcttaaggaggtgtggaaacctgccgtgcggtctggcggatctggcggaggctccacaagcaagcccggcgccctgagcttcgccgacgtggccgtgtacttcagcagcgaggagtggggctgcctgaggcccgcccagagggccctgtacagggacgtgatgagggagacctacggccacctgggcgccctgggcttcgccggccccaagcccgccctgatcagctggatggagaggaagaaggaggcctggagccccgaggccgaggaccccgaggacagggccagcaggatcagggccaagaccagccccaagaaaaagagaaaagtctaagctgccttctgcggggcttgccttctggccatgcccttcttctctcccttgcacctgtacctcttggtctttgaataaagcctgagtaggaaggctagcaaaaaaaaaaaaaaaaaaaaaaaaaaaaaaaaaaaaaaaaaaaaaaaaaaaaaaaaaaaaaaaaaaaaaaaaaaaaaaaa

SEQ ID NO: 2721 - RNA, 5419 nt, synthetic construct
  source 1..5419: mol_type = other RNA
aggaaataagagagaaaagaagagtaagaagaaatataagagccaccatggcccctaagaagaagcgtaaagtgagccgggtgaacggcagcggcagcggcggcggcatgaaccacgaccaggagttcgacccccctaaggtgtaccctcccgtccccgccgagaagagaaagcccatccgggtcctgagcctgttcgatggcatcgccaccggtctgctggtgctgaaggacctgggcatccaggtggataggtacattgcctccgaggtgtgcgaggactccatcaccgtgggaatggtgcgtcatcagggcaagatcatgtacgtgggcgacgtgcggagcgtgacacagaagcatatccaggagtggggccctttcgacctggtgatcggcggcagcccttgcaatgacctgagcatcgtgaacccagcccggaagggcctgtacgagggaaccggcagactgttcttcgagttttacagactgctgcacgacgcccggcctaaggaaggcgacgaccggcccttcttttggctgttcgagaatgtggtggccatgggagtcagcgacaagcgggatattagccggttcctggagagcaaccccgtgatgatcgatgccaaggaagtgagcgccgcccaccgggccagatacttctggggcaatctgcctggcatgaacagacccctggccagcaccgtgaacgacaagctggagctgcaggagtgcctggagcacggccggatcgccaagttcagcaaggtgagaaccatcaccacccgaagcaacagcatcaaacaaggcaaggaccagcactttcctgtgttcatgaacgagaaggaggacatcctgtggtgtaccgagatggagagagtgttcgggttcccagtccactacacagatgtcagcaacatgtctagactggccagacagagactgctgggaagaagctggtccgtccctgtgatcagacacctgttcgcccctctgaaggagtacttcgcctgcgtgagcagcggcaacagcaacgccaacagccggggccccagcttctctagcggcctggtgccactgtccctgagagggagccacatgggccccatggagatctacaaaaccgtgagcgcctggaagcggcagcctgtgcgcgtgctgagcctgtttcggaatatcgataaagtcctgaaaagcctgggattcctggagagcggctctggctccggcggtggcaccctgaagtacgtggaggatgtgacaaacgtggtcagacgggatgtggagaagtggggccccttcgatctggtgtacggcagcacccaacccctgggcagctcttgtgaccggtgccctggctggtacatgtttcagttccaccggatcctgcagtacgccctgccgagacaggagtcccagcggccattcttttggattttcatggacaacttgctgctgaccgaggatgaccaggaaactaccactcggttcctgcagaccgaagccgtgaccctgcaggacgtgagaggccgggactaccagaacgccatgcgggtgtggtccaacatccctggactgaaaagcaagcacgcacctctgacccctaaagaagaggagtacctgcaggcccaggtgcggagcagaagcaagctggacgcccctaaggtggatctgctggtgaagaattgcctcctgcccctgagagagtacttcaagtatttcagccagaatagtctgcccctgggcggcccaagcagcggcgcccctcctcccagcggcggcagcccagccggctccccaacctctaccgaggagggcacctctgagtccgccacccccgagagcggccctggcacctccaccgagcccagcgagggcagcgcacccggcagccctgccggcagccccacctccacagaggagggaaccagcaccgagcccagcgaaggcagcgccccaggcaccagcaccgagcctagtgagggcggctctggcggcggcagcgcccaggagattaaacggatcaacaagatcagaagaagacttgtgaaagacagcaacaccaagaaggccggcaagacaggccccatgaaaaccctgctggttagagtgatgacacccgatctgagagagcggctggaaaacctgagaaagaagcctgaaaatatcccccagcccatcagcaatacatctagagccaacctgaataagctgctgaccgattacaccgaaatgaagaaggcgatcctgcatgtgtactgggaagagttccagaaggaccctgtgggcctgatgagccgggtggcccagcctgccagcaagaagatcgatcagaacaagctgaaacctgagatggacgagaagggcaacctgaccaccgccggctttgcctgctctcagtgtggccagcccctgttcgtgtacaagctggagcaggtgtctgagaagggcaaggcttacaccaactacttcggacggtgcaatgtggccgagcacgaaaagctgatcctgctggcccagctgaagcccgagaaggatagcgacgaagccgtgacatatagcctgggaaagtttgggcagagggccctggatttctacagcattcatgtgaccaaggagtccacccaccccgtgaagcccctggcccagatcgccggaaacagatacgcctccggacctgtgggaaaggccctgagcgacgcatgtatgggcacaatcgcctccttcctgtctaagtaccaggacatcatcatcgaacaccagaaggtggtgaagggcaaccagaagagactggagagcctgcgggagctggccggcaaggaaaacctggaataccctagcgtgaccctgccacctcagcctcacaccaaggagggcgttgatgcctacaacgaagtgatcgcccgggtgcgaatgtgggtgaacctgaacctgtggcagaagctgaagctaagcagagatgatgccaagcctctgctgagactgaagggattcccttcctttcctctggtcgagagacaggccaacgaagtggactggtgggacatggtgtgtaacgtgaagaagctgatcaacgagaaaaaggaggatggcaaggtgttttggcagaatctggctggctacaagagacaggaagccctgagaccatacctgagcagcgaggaagatcggaagaagggaaagaaattcgctcggtaccagctgggcgacctgctgctgcacctggaaaagaagcacggcgaggactggggaaaggtgtacgacgaggcctgggagcggattgacaagaaagtggaaggcctgagcaagcacatcaagctggaagaggaacggagaagcgaggacgcccagagcaaggccgccctgaccgactggctgcgggctaaggccagcttcgtgatcgagggcctgaaggaggccgacaaggacgagttctgcagatgcgagctgaagctgcagaagtggtacggggacctgcggggaaagcccttcgccatcgaagccgagaacagcatcctggacatcagcggcttcagcaagcagtacaactgtgccttcatctggcagaaggacggcgtgaagaagctgaacctgtacctgatcatcaactacttcaagggcggcaagctgcggttcaagaagatcaaacctgaagccttcgaagccaacagattctacaccgtgatcaacaaaaagagcggcgagatcgtgcccatggaggtgaacttcaacttcgacgaccccaacctgatcatcctgcctctggcctttggcaagagacagggcagagaattcatctggaacgacctgctgtccctggaaaccggcagcctgaagctggccaacggaagagtgatcgagaagacactgtacaacagaagaacccggcaggatgagcctgccctgttcgtggccctgaccttcgagcggcgggaggtcctggactcctccaatatcaaaccaatgaacctgatcggcgtggcaagaggcgaaaacatccccgccgtgatcgccctgaccgaccccgagggctgcccactgagccggtttaaggatagcctgggaaacccaacccacatcctgagaatcggcgagagctataaggagaagcagcggaccatccaggccaagaaggaggtggagcagcggagagccggcggctacagccggaagtacgccagcaaagccaagaatctggcagacgatatggtgagaaacaccgctagagatctgctgtactacgccgtgacccaggatgccatgctgatcttcgccaacctgagccggggcttcggccggcagggcaagcggaccttcatggccgagagacagtacacacggatggaggactggctgaccgccaagctggcctacgagggcctgagcaagacctacctgtccaagacactggcccagtacacctccaagacatgcagcaactgtgggtttaccatcaccagcgccgactacgacagggtgctggagaagctgaagaagacagcaacaggctggatgaccacaattaacggcaaggagctgaaggtggagggccagattacctactacaacagatacaagagacagaacgtagtcaaggacctgtccgtcgagctggatagactgagcgaagaatctgtgaacaacgacatctcctcctggacaaagggcagaagcggagaagctctgagcctcctgaagaaaagattctcccatagacccgtgcaggagaagttcgtgtgcctgaactgcggcttcgagacacacgcagccgagcaagccgccctgaacatcgccagatcctggctgttcctgcggagccaggagtacaagaaataccagacaaacaagacaaccggcaacaccgataagagagccttcgtcgagacctggcagtccttttaccggaagaagcttaaggaggtgtggaaacctgccgtgcggtctggcggatctggcggaggctccacaagcttccaggagagcgtgaccttcgaggacgtggccgtgtacttcacccagagccagtgggccagcctgggccccctgcagagggccctgtacagggaggtgatgctggagaactacgccaacgtggccagcctggccttccccttccccaagcccgtgctgatcagccagctggagagggaggaggcccccctgggccccgacccctgggagaccgaggtgctgagggacatctgccccggcggcaccagccccaagaaaaagagaaaagtctaagctgccttctgcggggcttgccttctggccatgcccttcttctctcccttgcacctgtacctcttggtctttgaataaagcctgagtaggaaggctagcaaaaaaaaaaaaaaaaaaaaaaaaaaaaaaaaaaaaaaaaaaaaaaaaaaaaaaaaaaaaaaaaaaaaaaaaaaaaaaaa

SEQ ID NO: 2722 - RNA, 5419 nt, synthetic construct
  source 1..5419: mol_type = other RNA
aggaaataagagagaaaagaagagtaagaagaaatataagagccaccatggcccctaagaagaagcgtaaagtgagccgggtgaacggcagcggcagcggcggcggcatgaaccacgaccaggagttcgacccccctaaggtgtaccctcccgtccccgccgagaagagaaagcccatccgggtcctgagcctgttcgatggcatcgccaccggtctgctggtgctgaaggacctgggcatccaggtggataggtacattgcctccgaggtgtgcgaggactccatcaccgtgggaatggtgcgtcatcagggcaagatcatgtacgtgggcgacgtgcggagcgtgacacagaagcatatccaggagtggggccctttcgacctggtgatcggcggcagcccttgcaatgacctgagcatcgtgaacccagcccggaagggcctgtacgagggaaccggcagactgttcttcgagttttacagactgctgcacgacgcccggcctaaggaaggcgacgaccggcccttcttttggctgttcgagaatgtggtggccatgggagtcagcgacaagcgggatattagccggttcctggagagcaaccccgtgatgatcgatgccaaggaagtgagcgccgcccaccgggccagatacttctggggcaatctgcctggcatgaacagacccctggccagcaccgtgaacgacaagctggagctgcaggagtgcctggagcacggccggatcgccaagttcagcaaggtgagaaccatcaccacccgaagcaacagcatcaaacaaggcaaggaccagcactttcctgtgttcatgaacgagaaggaggacatcctgtggtgtaccgagatggagagagtgttcgggttcccagtccactacacagatgtcagcaacatgtctagactggccagacagagactgctgggaagaagctggtccgtccctgtgatcagacacctgttcgcccctctgaaggagtacttcgcctgcgtgagcagcggcaacagcaacgccaacagccggggccccagcttctctagcggcctggtgccactgtccctgagagggagccacatgggccccatggagatctacaaaaccgtgagcgcctggaagcggcagcctgtgcgcgtgctgagcctgtttcggaatatcgataaagtcctgaaaagcctgggattcctggagagcggctctggctccggcggtggcaccctgaagtacgtggaggatgtgacaaacgtggtcagacgggatgtggagaagtggggccccttcgatctggtgtacggcagcacccaacccctgggcagctcttgtgaccggtgccctggctggtacatgtttcagttccaccggatcctgcagtacgccctgccgagacaggagtcccagcggccattcttttggattttcatggacaacttgctgctgaccgaggatgaccaggaaactaccactcggttcctgcagaccgaagccgtgaccctgcaggacgtgagaggccgggactaccagaacgccatgcgggtgtggtccaacatccctggactgaaaagcaagcacgcacctctgacccctaaagaagaggagtacctgcaggcccaggtgcggagcagaagcaagctggacgcccctaaggtggatctgctggtgaagaattgcctcctgcccctgagagagtacttcaagtatttcagccagaatagtctgcccctgggcggcccaagcagcggcgcccctcctcccagcggcggcagcccagccggctccccaacctctaccgaggagggcacctctgagtccgccacccccgagagcggccctggcacctccaccgagcccagcgagggcagcgcacccggcagccctgccggcagccccacctccacagaggagggaaccagcaccgagcccagcgaaggcagcgccccaggcaccagcaccgagcctagtgagggcggctctggcggcggcagcgcccaggagattaaacggatcaacaagatcagaagaagacttgtgaaagacagcaacaccaagaaggccggcaagacaggccccatgaaaaccctgctggttagagtgatgacacccgatctgagagagcggctggaaaacctgagaaagaagcctgaaaatatcccccagcccatcagcaatacatctagagccaacctgaataagctgctgaccgattacaccgaaatgaagaaggcgatcctgcatgtgtactgggaagagttccagaaggaccctgtgggcctgatgagccgggtggcccagcctgccagcaagaagatcgatcagaacaagctgaaacctgagatggacgagaagggcaacctgaccaccgccggctttgcctgctctcagtgtggccagcccctgttcgtgtacaagctggagcaggtgtctgagaagggcaaggcttacaccaactacttcggacggtgcaatgtggccgagcacgaaaagctgatcctgctggcccagctgaagcccgagaaggatagcgacgaagccgtgacatatagcctgggaaagtttgggcagagggccctggatttctacagcattcatgtgaccaaggagtccacccaccccgtgaagcccctggcccagatcgccggaaacagatacgcctccggacctgtgggaaaggccctgagcgacgcatgtatgggcacaatcgcctccttcctgtctaagtaccaggacatcatcatcgaacaccagaaggtggtgaagggcaaccagaagagactggagagcctgcgggagctggccggcaaggaaaacctggaataccctagcgtgaccctgccacctcagcctcacaccaaggagggcgttgatgcctacaacgaagtgatcgcccgggtgcgaatgtgggtgaacctgaacctgtggcagaagctgaagctaagcagagatgatgccaagcctctgctgagactgaagggattcccttcctttcctctggtcgagagacaggccaacgaagtggactggtgggacatggtgtgtaacgtgaagaagctgatcaacgagaaaaaggaggatggcaaggtgttttggcagaatctggctggctacaagagacaggaagccctgagaccatacctgagcagcgaggaagatcggaagaagggaaagaaattcgctcggtaccagctgggcgacctgctgctgcacctggaaaagaagcacggcgaggactggggaaaggtgtacgacgaggcctgggagcggattgacaagaaagtggaaggcctgagcaagcacatcaagctggaagaggaacggagaagcgaggacgcccagagcaaggccgccctgaccgactggctgcgggctaaggccagcttcgtgatcgagggcctgaaggaggccgacaaggacgagttctgcagatgcgagctgaagctgcagaagtggtacggggacctgcggggaaagcccttcgccatcgaagccgagaacagcatcctggacatcagcggcttcagcaagcagtacaactgtgccttcatctggcagaaggacggcgtgaagaagctgaacctgtacctgatcatcaactacttcaagggcggcaagctgcggttcaagaagatcaaacctgaagccttcgaagccaacagattctacaccgtgatcaacaaaaagagcggcgagatcgtgcccatggaggtgaacttcaacttcgacgaccccaacctgatcatcctgcctctggcctttggcaagagacagggcagagaattcatctggaacgacctgctgtccctggaaaccggcagcctgaagctggccaacggaagagtgatcgagaagacactgtacaacagaagaacccggcaggatgagcctgccctgttcgtggccctgaccttcgagcggcgggaggtcctggactcctccaatatcaaaccaatgaacctgatcggcgtggcaagaggcgaaaacatccccgccgtgatcgccctgaccgaccccgagggctgcccactgagccggtttaaggatagcctgggaaacccaacccacatcctgagaatcggcgagagctataaggagaagcagcggaccatccaggccaagaaggaggtggagcagcggagagccggcggctacagccggaagtacgccagcaaagccaagaatctggcagacgatatggtgagaaacaccgctagagatctgctgtactacgccgtgacccaggatgccatgctgatcttcgccaacctgagccggggcttcggccggcagggcaagcggaccttcatggccgagagacagtacacacggatggaggactggctgaccgccaagctggcctacgagggcctgagcaagacctacctgtccaagacactggcccagtacacctccaagacatgcagcaactgtgggtttaccatcaccagcgccgactacgacagggtgctggagaagctgaagaagacagcaacaggctggatgaccacaattaacggcaaggagctgaaggtggagggccagattacctactacaacagatacaagagacagaacgtagtcaaggacctgtccgtcgagctggatagactgagcgaagaatctgtgaacaacgacatctcctcctggacaaagggcagaagcggagaagctctgagcctcctgaagaaaagattctcccatagacccgtgcaggagaagttcgtgtgcctgaactgcggcttcgagacacacgcagccgagcaagccgccctgaacatcgccagatcctggctgttcctgcggagccaggagtacaagaaataccagacaaacaagacaaccggcaacaccgataagagagccttcgtcgagacctggcagtccttttaccggaagaagcttaaggaggtgtggaaacctgccgtgcggtctggcggatctggcggaggctccacaagcctgaacagcgccgtgacctacgacgacgtgaacgtgaacttcaccagggaggagtgggccctgctggacagcagccagaagagcctgtacaaggacgtgatgctggagacctacaggaacctgaccgccatcggctacaactgggagggccacaacatcgaggagcactgccagagcagcaggaggcacgccaggacccacaagaggacccacaccggcgagaagagctacgagtgcgaccagaccagccccaagaaaaagagaaaagtctaagctgccttctgcggggcttgccttctggccatgcccttcttctctcccttgcacctgtacctcttggtctttgaataaagcctgagtaggaaggctagcaaaaaaaaaaaaaaaaaaaaaaaaaaaaaaaaaaaaaaaaaaaaaaaaaaaaaaaaaaaaaaaaaaaaaaaaaaaaaaaa

SEQ ID NO: 2723 - RNA, 5416 nt, synthetic construct
  source 1..5416: mol_type = other RNA
aggaaataagagagaaaagaagagtaagaagaaatataagagccaccatggcccctaagaagaagcgtaaagtgagccgggtgaacggcagcggcagcggcggcggcatgaaccacgaccaggagttcgacccccctaaggtgtaccctcccgtccccgccgagaagagaaagcccatccgggtcctgagcctgttcgatggcatcgccaccggtctgctggtgctgaaggacctgggcatccaggtggataggtacattgcctccgaggtgtgcgaggactccatcaccgtgggaatggtgcgtcatcagggcaagatcatgtacgtgggcgacgtgcggagcgtgacacagaagcatatccaggagtggggccctttcgacctggtgatcggcggcagcccttgcaatgacctgagcatcgtgaacccagcccggaagggcctgtacgagggaaccggcagactgttcttcgagttttacagactgctgcacgacgcccggcctaaggaaggcgacgaccggcccttcttttggctgttcgagaatgtggtggccatgggagtcagcgacaagcgggatattagccggttcctggagagcaaccccgtgatgatcgatgccaaggaagtgagcgccgcccaccgggccagatacttctggggcaatctgcctggcatgaacagacccctggccagcaccgtgaacgacaagctggagctgcaggagtgcctggagcacggccggatcgccaagttcagcaaggtgagaaccatcaccacccgaagcaacagcatcaaacaaggcaaggaccagcactttcctgtgttcatgaacgagaaggaggacatcctgtggtgtaccgagatggagagagtgttcgggttcccagtccactacacagatgtcagcaacatgtctagactggccagacagagactgctgggaagaagctggtccgtccctgtgatcagacacctgttcgcccctctgaaggagtacttcgcctgcgtgagcagcggcaacagcaacgccaacagccggggccccagcttctctagcggcctggtgccactgtccctgagagggagccacatgggccccatggagatctacaaaaccgtgagcgcctggaagcggcagcctgtgcgcgtgctgagcctgtttcggaatatcgataaagtcctgaaaagcctgggattcctggagagcggctctggctccggcggtggcaccctgaagtacgtggaggatgtgacaaacgtggtcagacgggatgtggagaagtggggccccttcgatctggtgtacggcagcacccaacccctgggcagctcttgtgaccggtgccctggctggtacatgtttcagttccaccggatcctgcagtacgccctgccgagacaggagtcccagcggccattcttttggattttcatggacaacttgctgctgaccgaggatgaccaggaaactaccactcggttcctgcagaccgaagccgtgaccctgcaggacgtgagaggccgggactaccagaacgccatgcgggtgtggtccaacatccctggactgaaaagcaagcacgcacctctgacccctaaagaagaggagtacctgcaggcccaggtgcggagcagaagcaagctggacgcccctaaggtggatctgctggtgaagaattgcctcctgcccctgagagagtacttcaagtatttcagccagaatagtctgcccctgggcggcccaagcagcggcgcccctcctcccagcggcggcagcccagccggctccccaacctctaccgaggagggcacctctgagtccgccacccccgagagcggccctggcacctccaccgagcccagcgagggcagcgcacccggcagccctgccggcagccccacctccacagaggagggaaccagcaccgagcccagcgaaggcagcgccccaggcaccagcaccgagcctagtgagggcggctctggcggcggcagcgcccaggagattaaacggatcaacaagatcagaagaagacttgtgaaagacagcaacaccaagaaggccggcaagacaggccccatgaaaaccctgctggttagagtgatgacacccgatctgagagagcggctggaaaacctgagaaagaagcctgaaaatatcccccagcccatcagcaatacatctagagccaacctgaataagctgctgaccgattacaccgaaatgaagaaggcgatcctgcatgtgtactgggaagagttccagaaggaccctgtgggcctgatgagccgggtggcccagcctgccagcaagaagatcgatcagaacaagctgaaacctgagatggacgagaagggcaacctgaccaccgccggctttgcctgctctcagtgtggccagcccctgttcgtgtacaagctggagcaggtgtctgagaagggcaaggcttacaccaactacttcggacggtgcaatgtggccgagcacgaaaagctgatcctgctggcccagctgaagcccgagaaggatagcgacgaagccgtgacatatagcctgggaaagtttgggcagagggccctggatttctacagcattcatgtgaccaaggagtccacccaccccgtgaagcccctggcccagatcgccggaaacagatacgcctccggacctgtgggaaaggccctgagcgacgcatgtatgggcacaatcgcctccttcctgtctaagtaccaggacatcatcatcgaacaccagaaggtggtgaagggcaaccagaagagactggagagcctgcgggagctggccggcaaggaaaacctggaataccctagcgtgaccctgccacctcagcctcacaccaaggagggcgttgatgcctacaacgaagtgatcgcccgggtgcgaatgtgggtgaacctgaacctgtggcagaagctgaagctaagcagagatgatgccaagcctctgctgagactgaagggattcccttcctttcctctggtcgagagacaggccaacgaagtggactggtgggacatggtgtgtaacgtgaagaagctgatcaacgagaaaaaggaggatggcaaggtgttttggcagaatctggctggctacaagagacaggaagccctgagaccatacctgagcagcgaggaagatcggaagaagggaaagaaattcgctcggtaccagctgggcgacctgctgctgcacctggaaaagaagcacggcgaggactggggaaaggtgtacgacgaggcctgggagcggattgacaagaaagtggaaggcctgagcaagcacatcaagctggaagaggaacggagaagcgaggacgcccagagcaaggccgccctgaccgactggctgcgggctaaggccagcttcgtgatcgagggcctgaaggaggccgacaaggacgagttctgcagatgcgagctgaagctgcagaagtggtacggggacctgcggggaaagcccttcgccatcgaagccgagaacagcatcctggacatcagcggcttcagcaagcagtacaactgtgccttcatctggcagaaggacggcgtgaagaagctgaacctgtacctgatcatcaactacttcaagggcggcaagctgcggttcaagaagatcaaacctgaagccttcgaagccaacagattctacaccgtgatcaacaaaaagagcggcgagatcgtgcccatggaggtgaacttcaacttcgacgaccccaacctgatcatcctgcctctggcctttggcaagagacagggcagagaattcatctggaacgacctgctgtccctggaaaccggcagcctgaagctggccaacggaagagtgatcgagaagacactgtacaacagaagaacccggcaggatgagcctgccctgttcgtggccctgaccttcgagcggcgggaggtcctggactcctccaatatcaaaccaatgaacctgatcggcgtggcaagaggcgaaaacatccccgccgtgatcgccctgaccgaccccgagggctgcccactgagccggtttaaggatagcctgggaaacccaacccacatcctgagaatcggcgagagctataaggagaagcagcggaccatccaggccaagaaggaggtggagcagcggagagccggcggctacagccggaagtacgccagcaaagccaagaatctggcagacgatatggtgagaaacaccgctagagatctgctgtactacgccgtgacccaggatgccatgctgatcttcgccaacctgagccggggcttcggccggcagggcaagcggaccttcatggccgagagacagtacacacggatggaggactggctgaccgccaagctggcctacgagggcctgagcaagacctacctgtccaagacactggcccagtacacctccaagacatgcagcaactgtgggtttaccatcaccagcgccgactacgacagggtgctggagaagctgaagaagacagcaacaggctggatgaccacaattaacggcaaggagctgaaggtggagggccagattacctactacaacagatacaagagacagaacgtagtcaaggacctgtccgtcgagctggatagactgagcgaagaatctgtgaacaacgacatctcctcctggacaaagggcagaagcggagaagctctgagcctcctgaagaaaagattctcccatagacccgtgcaggagaagttcgtgtgcctgaactgcggcttcgagacacacgcagccgagcaagccgccctgaacatcgccagatcctggctgttcctgcggagccaggagtacaagaaataccagacaaacaagacaaccggcaacaccgataagagagccttcgtcgagacctggcagtccttttaccggaagaagcttaaggaggtgtggaaacctgccgtgcggtctggcggatctggcggaggctccacaagcgccttcgaggacgtggccgtgtacttcagccaggaggagtggggcctgctggacaccgcccagagagccctgtacagaagagtgatgctggacaacttcgccctggtggccagcctgggcctgagcaccagcagacccagagtggtgatccagctggagagaggcgaggagccctgggtgcccagcggcaccgacaccaccctgagcagaaccacctacagaagaagaaaccccggcagcaccagccccaagaaaaagagaaaagtctaagctgccttctgcggggcttgccttctggccatgcccttcttctctcccttgcacctgtacctcttggtctttgaataaagcctgagtaggaaggctagcaaaaaaaaaaaaaaaaaaaaaaaaaaaaaaaaaaaaaaaaaaaaaaaaaaaaaaaaaaaaaaaaaaaaaaaaaaaaaaaa

SEQ ID NO: 2724 - RNA, 5419 nt, synthetic construct
  source 1..5419: mol_type = other RNA
aggaaataagagagaaaagaagagtaagaagaaatataagagccaccatggcccctaagaagaagcgtaaagtgagccgggtgaacggcagcggcagcggcggcggcatgaaccacgaccaggagttcgacccccctaaggtgtaccctcccgtccccgccgagaagagaaagcccatccgggtcctgagcctgttcgatggcatcgccaccggtctgctggtgctgaaggacctgggcatccaggtggataggtacattgcctccgaggtgtgcgaggactccatcaccgtgggaatggtgcgtcatcagggcaagatcatgtacgtgggcgacgtgcggagcgtgacacagaagcatatccaggagtggggccctttcgacctggtgatcggcggcagcccttgcaatgacctgagcatcgtgaacccagcccggaagggcctgtacgagggaaccggcagactgttcttcgagttttacagactgctgcacgacgcccggcctaaggaaggcgacgaccggcccttcttttggctgttcgagaatgtggtggccatgggagtcagcgacaagcgggatattagccggttcctggagagcaaccccgtgatgatcgatgccaaggaagtgagcgccgcccaccgggccagatacttctggggcaatctgcctggcatgaacagacccctggccagcaccgtgaacgacaagctggagctgcaggagtgcctggagcacggccggatcgccaagttcagcaaggtgagaaccatcaccacccgaagcaacagcatcaaacaaggcaaggaccagcactttcctgtgttcatgaacgagaaggaggacatcctgtggtgtaccgagatggagagagtgttcgggttcccagtccactacacagatgtcagcaacatgtctagactggccagacagagactgctgggaagaagctggtccgtccctgtgatcagacacctgttcgcccctctgaaggagtacttcgcctgcgtgagcagcggcaacagcaacgccaacagccggggccccagcttctctagcggcctggtgccactgtccctgagagggagccacatgggccccatggagatctacaaaaccgtgagcgcctggaagcggcagcctgtgcgcgtgctgagcctgtttcggaatatcgataaagtcctgaaaagcctgggattcctggagagcggctctggctccggcggtggcaccctgaagtacgtggaggatgtgacaaacgtggtcagacgggatgtggagaagtggggccccttcgatctggtgtacggcagcacccaacccctgggcagctcttgtgaccggtgccctggctggtacatgtttcagttccaccggatcctgcagtacgccctgccgagacaggagtcccagcggccattcttttggattttcatggacaacttgctgctgaccgaggatgaccaggaaactaccactcggttcctgcagaccgaagccgtgaccctgcaggacgtgagaggccgggactaccagaacgccatgcgggtgtggtccaacatccctggactgaaaagcaagcacgcacctctgacccctaaagaagaggagtacctgcaggcccaggtgcggagcagaagcaagctggacgcccctaaggtggatctgctggtgaagaattgcctcctgcccctgagagagtacttcaagtatttcagccagaatagtctgcccctgggcggcccaagcagcggcgcccctcctcccagcggcggcagcccagccggctccccaacctctaccgaggagggcacctctgagtccgccacccccgagagcggccctggcacctccaccgagcccagcgagggcagcgcacccggcagccctgccggcagccccacctccacagaggagggaaccagcaccgagcccagcgaaggcagcgccccaggcaccagcaccgagcctagtgagggcggctctggcggcggcagcgcccaggagattaaacggatcaacaagatcagaagaagacttgtgaaagacagcaacaccaagaaggccggcaagacaggccccatgaaaaccctgctggttagagtgatgacacccgatctgagagagcggctggaaaacctgagaaagaagcctgaaaatatcccccagcccatcagcaatacatctagagccaacctgaataagctgctgaccgattacaccgaaatgaagaaggcgatcctgcatgtgtactgggaagagttccagaaggaccctgtgggcctgatgagccgggtggcccagcctgccagcaagaagatcgatcagaacaagctgaaacctgagatggacgagaagggcaacctgaccaccgccggctttgcctgctctcagtgtggccagcccctgttcgtgtacaagctggagcaggtgtctgagaagggcaaggcttacaccaactacttcggacggtgcaatgtggccgagcacgaaaagctgatcctgctggcccagctgaagcccgagaaggatagcgacgaagccgtgacatatagcctgggaaagtttgggcagagggccctggatttctacagcattcatgtgaccaaggagtccacccaccccgtgaagcccctggcccagatcgccggaaacagatacgcctccggacctgtgggaaaggccctgagcgacgcatgtatgggcacaatcgcctccttcctgtctaagtaccaggacatcatcatcgaacaccagaaggtggtgaagggcaaccagaagagactggagagcctgcgggagctggccggcaaggaaaacctggaataccctagcgtgaccctgccacctcagcctcacaccaaggagggcgttgatgcctacaacgaagtgatcgcccgggtgcgaatgtgggtgaacctgaacctgtggcagaagctgaagctaagcagagatgatgccaagcctctgctgagactgaagggattcccttcctttcctctggtcgagagacaggccaacgaagtggactggtgggacatggtgtgtaacgtgaagaagctgatcaacgagaaaaaggaggatggcaaggtgttttggcagaatctggctggctacaagagacaggaagccctgagaccatacctgagcagcgaggaagatcggaagaagggaaagaaattcgctcggtaccagctgggcgacctgctgctgcacctggaaaagaagcacggcgaggactggggaaaggtgtacgacgaggcctgggagcggattgacaagaaagtggaaggcctgagcaagcacatcaagctggaagaggaacggagaagcgaggacgcccagagcaaggccgccctgaccgactggctgcgggctaaggccagcttcgtgatcgagggcctgaaggaggccgacaaggacgagttctgcagatgcgagctgaagctgcagaagtggtacggggacctgcggggaaagcccttcgccatcgaagccgagaacagcatcctggacatcagcggcttcagcaagcagtacaactgtgccttcatctggcagaaggacggcgtgaagaagctgaacctgtacctgatcatcaactacttcaagggcggcaagctgcggttcaagaagatcaaacctgaagccttcgaagccaacagattctacaccgtgatcaacaaaaagagcggcgagatcgtgcccatggaggtgaacttcaacttcgacgaccccaacctgatcatcctgcctctggcctttggcaagagacagggcagagaattcatctggaacgacctgctgtccctggaaaccggcagcctgaagctggccaacggaagagtgatcgagaagacactgtacaacagaagaacccggcaggatgagcctgccctgttcgtggccctgaccttcgagcggcgggaggtcctggactcctccaatatcaaaccaatgaacctgatcggcgtggcaagaggcgaaaacatccccgccgtgatcgccctgaccgaccccgagggctgcccactgagccggtttaaggatagcctgggaaacccaacccacatcctgagaatcggcgagagctataaggagaagcagcggaccatccaggccaagaaggaggtggagcagcggagagccggcggctacagccggaagtacgccagcaaagccaagaatctggcagacgatatggtgagaaacaccgctagagatctgctgtactacgccgtgacccaggatgccatgctgatcttcgccaacctgagccggggcttcggccggcagggcaagcggaccttcatggccgagagacagtacacacggatggaggactggctgaccgccaagctggcctacgagggcctgagcaagacctacctgtccaagacactggcccagtacacctccaagacatgcagcaactgtgggtttaccatcaccagcgccgactacgacagggtgctggagaagctgaagaagacagcaacaggctggatgaccacaattaacggcaaggagctgaaggtggagggccagattacctactacaacagatacaagagacagaacgtagtcaaggacctgtccgtcgagctggatagactgagcgaagaatctgtgaacaacgacatctcctcctggacaaagggcagaagcggagaagctctgagcctcctgaagaaaagattctcccatagacccgtgcaggagaagttcgtgtgcctgaactgcggcttcgagacacacgcagccgagcaagccgccctgaacatcgccagatcctggctgttcctgcggagccaggagtacaagaaataccagacaaacaagacaaccggcaacaccgataagagagccttcgtcgagacctggcagtccttttaccggaagaagcttaaggaggtgtggaaacctgccgtgcggtctggcggatctggcggaggctccacaagcttccaggagagcgtgaccttcagggacgtggccatcgccttcagccagcaggagtggcagagcctggacagcagccagagggacctgtacagggacgtgatgctggagaactacaggaacctggtgagcctgggccacagcctgagcaagccccacgtgatcaccctgctggagcagtggaaggacccctgggagaccggcaggaaggacaagaggaggaggtgcgccgacctgcagctggagaccagccccaagaaaaagagaaaagtctaagctgccttctgcggggcttgccttctggccatgcccttcttctctcccttgcacctgtacctcttggtctttgaataaagcctgagtaggaaggctagcaaaaaaaaaaaaaaaaaaaaaaaaaaaaaaaaaaaaaaaaaaaaaaaaaaaaaaaaaaaaaaaaaaaaaaaaaaaaaaaa

SEQ ID NO: 2725 - RNA, 5419 nt, synthetic construct
  source 1..5419: mol_type = other RNA
aggaaataagagagaaaagaagagtaagaagaaatataagagccaccatggcccctaagaagaagcgtaaagtgagccgggtgaacggcagcggcagcggcggcggcatgaaccacgaccaggagttcgacccccctaaggtgtaccctcccgtccccgccgagaagagaaagcccatccgggtcctgagcctgttcgatggcatcgccaccggtctgctggtgctgaaggacctgggcatccaggtggataggtacattgcctccgaggtgtgcgaggactccatcaccgtgggaatggtgcgtcatcagggcaagatcatgtacgtgggcgacgtgcggagcgtgacacagaagcatatccaggagtggggccctttcgacctggtgatcggcggcagcccttgcaatgacctgagcatcgtgaacccagcccggaagggcctgtacgagggaaccggcagactgttcttcgagttttacagactgctgcacgacgcccggcctaaggaaggcgacgaccggcccttcttttggctgttcgagaatgtggtggccatgggagtcagcgacaagcgggatattagccggttcctggagagcaaccccgtgatgatcgatgccaaggaagtgagcgccgcccaccgggccagatacttctggggcaatctgcctggcatgaacagacccctggccagcaccgtgaacgacaagctggagctgcaggagtgcctggagcacggccggatcgccaagttcagcaaggtgagaaccatcaccacccgaagcaacagcatcaaacaaggcaaggaccagcactttcctgtgttcatgaacgagaaggaggacatcctgtggtgtaccgagatggagagagtgttcgggttcccagtccactacacagatgtcagcaacatgtctagactggccagacagagactgctgggaagaagctggtccgtccctgtgatcagacacctgttcgcccctctgaaggagtacttcgcctgcgtgagcagcggcaacagcaacgccaacagccggggccccagcttctctagcggcctggtgccactgtccctgagagggagccacatgggccccatggagatctacaaaaccgtgagcgcctggaagcggcagcctgtgcgcgtgctgagcctgtttcggaatatcgataaagtcctgaaaagcctgggattcctggagagcggctctggctccggcggtggcaccctgaagtacgtggaggatgtgacaaacgtggtcagacgggatgtggagaagtggggccccttcgatctggtgtacggcagcacccaacccctgggcagctcttgtgaccggtgccctggctggtacatgtttcagttccaccggatcctgcagtacgccctgccgagacaggagtcccagcggccattcttttggattttcatggacaacttgctgctgaccgaggatgaccaggaaactaccactcggttcctgcagaccgaagccgtgaccctgcaggacgtgagaggccgggactaccagaacgccatgcgggtgtggtccaacatccctggactgaaaagcaagcacgcacctctgacccctaaagaagaggagtacctgcaggcccaggtgcggagcagaagcaagctggacgcccctaaggtggatctgctggtgaagaattgcctcctgcccctgagagagtacttcaagtatttcagccagaatagtctgcccctgggcggcccaagcagcggcgcccctcctcccagcggcggcagcccagccggctccccaacctctaccgaggagggcacctctgagtccgccacccccgagagcggccctggcacctccaccgagcccagcgagggcagcgcacccggcagccctgccggcagccccacctccacagaggagggaaccagcaccgagcccagcgaaggcagcgccccaggcaccagcaccgagcctagtgagggcggctctggcggcggcagcgcccaggagattaaacggatcaacaagatcagaagaagacttgtgaaagacagcaacaccaagaaggccggcaagacaggccccatgaaaaccctgctggttagagtgatgacacccgatctgagagagcggctggaaaacctgagaaagaagcctgaaaatatcccccagcccatcagcaatacatctagagccaacctgaataagctgctgaccgattacaccgaaatgaagaaggcgatcctgcatgtgtactgggaagagttccagaaggaccctgtgggcctgatgagccgggtggcccagcctgccagcaagaagatcgatcagaacaagctgaaacctgagatggacgagaagggcaacctgaccaccgccggctttgcctgctctcagtgtggccagcccctgttcgtgtacaagctggagcaggtgtctgagaagggcaaggcttacaccaactacttcggacggtgcaatgtggccgagcacgaaaagctgatcctgctggcccagctgaagcccgagaaggatagcgacgaagccgtgacatatagcctgggaaagtttgggcagagggccctggatttctacagcattcatgtgaccaaggagtccacccaccccgtgaagcccctggcccagatcgccggaaacagatacgcctccggacctgtgggaaaggccctgagcgacgcatgtatgggcacaatcgcctccttcctgtctaagtaccaggacatcatcatcgaacaccagaaggtggtgaagggcaaccagaagagactggagagcctgcgggagctggccggcaaggaaaacctggaataccctagcgtgaccctgccacctcagcctcacaccaaggagggcgttgatgcctacaacgaagtgatcgcccgggtgcgaatgtgggtgaacctgaacctgtggcagaagctgaagctaagcagagatgatgccaagcctctgctgagactgaagggattcccttcctttcctctggtcgagagacaggccaacgaagtggactggtgggacatggtgtgtaacgtgaagaagctgatcaacgagaaaaaggaggatggcaaggtgttttggcagaatctggctggctacaagagacaggaagccctgagaccatacctgagcagcgaggaagatcggaagaagggaaagaaattcgctcggtaccagctgggcgacctgctgctgcacctggaaaagaagcacggcgaggactggggaaaggtgtacgacgaggcctgggagcggattgacaagaaagtggaaggcctgagcaagcacatcaagctggaagaggaacggagaagcgaggacgcccagagcaaggccgccctgaccgactggctgcgggctaaggccagcttcgtgatcgagggcctgaaggaggccgacaaggacgagttctgcagatgcgagctgaagctgcagaagtggtacggggacctgcggggaaagcccttcgccatcgaagccgagaacagcatcctggacatcagcggcttcagcaagcagtacaactgtgccttcatctggcagaaggacggcgtgaagaagctgaacctgtacctgatcatcaactacttcaagggcggcaagctgcggttcaagaagatcaaacctgaagccttcgaagccaacagattctacaccgtgatcaacaaaaagagcggcgagatcgtgcccatggaggtgaacttcaacttcgacgaccccaacctgatcatcctgcctctggcctttggcaagagacagggcagagaattcatctggaacgacctgctgtccctggaaaccggcagcctgaagctggccaacggaagagtgatcgagaagacactgtacaacagaagaacccggcaggatgagcctgccctgttcgtggccctgaccttcgagcggcgggaggtcctggactcctccaatatcaaaccaatgaacctgatcggcgtggcaagaggcgaaaacatccccgccgtgatcgccctgaccgaccccgagggctgcccactgagccggtttaaggatagcctgggaaacccaacccacatcctgagaatcggcgagagctataaggagaagcagcggaccatccaggccaagaaggaggtggagcagcggagagccggcggctacagccggaagtacgccagcaaagccaagaatctggcagacgatatggtgagaaacaccgctagagatctgctgtactacgccgtgacccaggatgccatgctgatcttcgccaacctgagccggggcttcggccggcagggcaagcggaccttcatggccgagagacagtacacacggatggaggactggctgaccgccaagctggcctacgagggcctgagcaagacctacctgtccaagacactggcccagtacacctccaagacatgcagcaactgtgggtttaccatcaccagcgccgactacgacagggtgctggagaagctgaagaagacagcaacaggctggatgaccacaattaacggcaaggagctgaaggtggagggccagattacctactacaacagatacaagagacagaacgtagtcaaggacctgtccgtcgagctggatagactgagcgaagaatctgtgaacaacgacatctcctcctggacaaagggcagaagcggagaagctctgagcctcctgaagaaaagattctcccatagacccgtgcaggagaagttcgtgtgcctgaactgcggcttcgagacacacgcagccgagcaagccgccctgaacatcgccagatcctggctgttcctgcggagccaggagtacaagaaataccagacaaacaagacaaccggcaacaccgataagagagccttcgtcgagacctggcagtccttttaccggaagaagcttaaggaggtgtggaaacctgccgtgcggtctggcggatctggcggaggctccacaagcttccaggagagcgtgaccttcgaggacgtggccgtgtacttcacccagaaccagtgggccagcctggaccccgtgcagagggccctgtacagggacgtgatgctggagaactacgccaacgtggccgccctggtggccttccccgcccccaagcccgacctgatcagccagctggagaggggcagcgccccctggaggcccgacccctgggaggccgaggtgctgaggggcatctgccccggcaccagccccaagaaaaagagaaaagtctaagctgccttctgcggggcttgccttctggccatgcccttcttctctcccttgcacctgtacctcttggtctttgaataaagcctgagtaggaaggctagcaaaaaaaaaaaaaaaaaaaaaaaaaaaaaaaaaaaaaaaaaaaaaaaaaaaaaaaaaaaaaaaaaaaaaaaaaaaaaaaa

SEQ ID NO: 2726 - RNA, 5419 nt, synthetic construct
  source 1..5419: mol_type = other RNA
aggaaataagagagaaaagaagagtaagaagaaatataagagccaccatggcccctaagaagaagcgtaaagtgagccgggtgaacggcagcggcagcggcggcggcatgaaccacgaccaggagttcgacccccctaaggtgtaccctcccgtccccgccgagaagagaaagcccatccgggtcctgagcctgttcgatggcatcgccaccggtctgctggtgctgaaggacctgggcatccaggtggataggtacattgcctccgaggtgtgcgaggactccatcaccgtgggaatggtgcgtcatcagggcaagatcatgtacgtgggcgacgtgcggagcgtgacacagaagcatatccaggagtggggccctttcgacctggtgatcggcggcagcccttgcaatgacctgagcatcgtgaacccagcccggaagggcctgtacgagggaaccggcagactgttcttcgagttttacagactgctgcacgacgcccggcctaaggaaggcgacgaccggcccttcttttggctgttcgagaatgtggtggccatgggagtcagcgacaagcgggatattagccggttcctggagagcaaccccgtgatgatcgatgccaaggaagtgagcgccgcccaccgggccagatacttctggggcaatctgcctggcatgaacagacccctggccagcaccgtgaacgacaagctggagctgcaggagtgcctggagcacggccggatcgccaagttcagcaaggtgagaaccatcaccacccgaagcaacagcatcaaacaaggcaaggaccagcactttcctgtgttcatgaacgagaaggaggacatcctgtggtgtaccgagatggagagagtgttcgggttcccagtccactacacagatgtcagcaacatgtctagactggccagacagagactgctgggaagaagctggtccgtccctgtgatcagacacctgttcgcccctctgaaggagtacttcgcctgcgtgagcagcggcaacagcaacgccaacagccggggccccagcttctctagcggcctggtgccactgtccctgagagggagccacatgggccccatggagatctacaaaaccgtgagcgcctggaagcggcagcctgtgcgcgtgctgagcctgtttcggaatatcgataaagtcctgaaaagcctgggattcctggagagcggctctggctccggcggtggcaccctgaagtacgtggaggatgtgacaaacgtggtcagacgggatgtggagaagtggggccccttcgatctggtgtacggcagcacccaacccctgggcagctcttgtgaccggtgccctggctggtacatgtttcagttccaccggatcctgcagtacgccctgccgagacaggagtcccagcggccattcttttggattttcatggacaacttgctgctgaccgaggatgaccaggaaactaccactcggttcctgcagaccgaagccgtgaccctgcaggacgtgagaggccgggactaccagaacgccatgcgggtgtggtccaacatccctggactgaaaagcaagcacgcacctctgacccctaaagaagaggagtacctgcaggcccaggtgcggagcagaagcaagctggacgcccctaaggtggatctgctggtgaagaattgcctcctgcccctgagagagtacttcaagtatttcagccagaatagtctgcccctgggcggcccaagcagcggcgcccctcctcccagcggcggcagcccagccggctccccaacctctaccgaggagggcacctctgagtccgccacccccgagagcggccctggcacctccaccgagcccagcgagggcagcgcacccggcagccctgccggcagccccacctccacagaggagggaaccagcaccgagcccagcgaaggcagcgccccaggcaccagcaccgagcctagtgagggcggctctggcggcggcagcgcccaggagattaaacggatcaacaagatcagaagaagacttgtgaaagacagcaacaccaagaaggccggcaagacaggccccatgaaaaccctgctggttagagtgatgacacccgatctgagagagcggctggaaaacctgagaaagaagcctgaaaatatcccccagcccatcagcaatacatctagagccaacctgaataagctgctgaccgattacaccgaaatgaagaaggcgatcctgcatgtgtactgggaagagttccagaaggaccctgtgggcctgatgagccgggtggcccagcctgccagcaagaagatcgatcagaacaagctgaaacctgagatggacgagaagggcaacctgaccaccgccggctttgcctgctctcagtgtggccagcccctgttcgtgtacaagctggagcaggtgtctgagaagggcaaggcttacaccaactacttcggacggtgcaatgtggccgagcacgaaaagctgatcctgctggcccagctgaagcccgagaaggatagcgacgaagccgtgacatatagcctgggaaagtttgggcagagggccctggatttctacagcattcatgtgaccaaggagtccacccaccccgtgaagcccctggcccagatcgccggaaacagatacgcctccggacctgtgggaaaggccctgagcgacgcatgtatgggcacaatcgcctccttcctgtctaagtaccaggacatcatcatcgaacaccagaaggtggtgaagggcaaccagaagagactggagagcctgcgggagctggccggcaaggaaaacctggaataccctagcgtgaccctgccacctcagcctcacaccaaggagggcgttgatgcctacaacgaagtgatcgcccgggtgcgaatgtgggtgaacctgaacctgtggcagaagctgaagctaagcagagatgatgccaagcctctgctgagactgaagggattcccttcctttcctctggtcgagagacaggccaacgaagtggactggtgggacatggtgtgtaacgtgaagaagctgatcaacgagaaaaaggaggatggcaaggtgttttggcagaatctggctggctacaagagacaggaagccctgagaccatacctgagcagcgaggaagatcggaagaagggaaagaaattcgctcggtaccagctgggcgacctgctgctgcacctggaaaagaagcacggcgaggactggggaaaggtgtacgacgaggcctgggagcggattgacaagaaagtggaaggcctgagcaagcacatcaagctggaagaggaacggagaagcgaggacgcccagagcaaggccgccctgaccgactggctgcgggctaaggccagcttcgtgatcgagggcctgaaggaggccgacaaggacgagttctgcagatgcgagctgaagctgcagaagtggtacggggacctgcggggaaagcccttcgccatcgaagccgagaacagcatcctggacatcagcggcttcagcaagcagtacaactgtgccttcatctggcagaaggacggcgtgaagaagctgaacctgtacctgatcatcaactacttcaagggcggcaagctgcggttcaagaagatcaaacctgaagccttcgaagccaacagattctacaccgtgatcaacaaaaagagcggcgagatcgtgcccatggaggtgaacttcaacttcgacgaccccaacctgatcatcctgcctctggcctttggcaagagacagggcagagaattcatctggaacgacctgctgtccctggaaaccggcagcctgaagctggccaacggaagagtgatcgagaagacactgtacaacagaagaacccggcaggatgagcctgccctgttcgtggccctgaccttcgagcggcgggaggtcctggactcctccaatatcaaaccaatgaacctgatcggcgtggcaagaggcgaaaacatccccgccgtgatcgccctgaccgaccccgagggctgcccactgagccggtttaaggatagcctgggaaacccaacccacatcctgagaatcggcgagagctataaggagaagcagcggaccatccaggccaagaaggaggtggagcagcggagagccggcggctacagccggaagtacgccagcaaagccaagaatctggcagacgatatggtgagaaacaccgctagagatctgctgtactacgccgtgacccaggatgccatgctgatcttcgccaacctgagccggggcttcggccggcagggcaagcggaccttcatggccgagagacagtacacacggatggaggactggctgaccgccaagctggcctacgagggcctgagcaagacctacctgtccaagacactggcccagtacacctccaagacatgcagcaactgtgggtttaccatcaccagcgccgactacgacagggtgctggagaagctgaagaagacagcaacaggctggatgaccacaattaacggcaaggagctgaaggtggagggccagattacctactacaacagatacaagagacagaacgtagtcaaggacctgtccgtcgagctggatagactgagcgaagaatctgtgaacaacgacatctcctcctggacaaagggcagaagcggagaagctctgagcctcctgaagaaaagattctcccatagacccgtgcaggagaagttcgtgtgcctgaactgcggcttcgagacacacgcagccgagcaagccgccctgaacatcgccagatcctggctgttcctgcggagccaggagtacaagaaataccagacaaacaagacaaccggcaacaccgataagagagccttcgtcgagacctggcagtccttttaccggaagaagcttaaggaggtgtggaaacctgccgtgcggtctggcggatctggcggaggctccacaagcctgctgaccttcgaggacgtggccgtgcacttcagcgaggaggagtggcagctgctggaccccaaccagaagaccctgtacaacgaggtgatgtgggacatctgcgaggccgccagcttcgtgggcctgaagttcaagaacgacaccggcaacgccgagcccagcagcgtgagcgccctggagatccaggccgccgagaggcagggcagcaagaccaggaagaacgtggccaggaagaggaagaccagccccaagaaaaagagaaaagtctaagctgccttctgcggggcttgccttctggccatgcccttcttctctcccttgcacctgtacctcttggtctttgaataaagcctgagtaggaaggctagcaaaaaaaaaaaaaaaaaaaaaaaaaaaaaaaaaaaaaaaaaaaaaaaaaaaaaaaaaaaaaaaaaaaaaaaaaaaaaaaa

SEQ ID NO: 2727 - RNA, 5419 nt, synthetic construct
  source 1..5419: mol_type = other RNA
aggaaataagagagaaaagaagagtaagaagaaatataagagccaccatggcccctaagaagaagcgtaaagtgagccgggtgaacggcagcggcagcggcggcggcatgaaccacgaccaggagttcgacccccctaaggtgtaccctcccgtccccgccgagaagagaaagcccatccgggtcctgagcctgttcgatggcatcgccaccggtctgctggtgctgaaggacctgggcatccaggtggataggtacattgcctccgaggtgtgcgaggactccatcaccgtgggaatggtgcgtcatcagggcaagatcatgtacgtgggcgacgtgcggagcgtgacacagaagcatatccaggagtggggccctttcgacctggtgatcggcggcagcccttgcaatgacctgagcatcgtgaacccagcccggaagggcctgtacgagggaaccggcagactgttcttcgagttttacagactgctgcacgacgcccggcctaaggaaggcgacgaccggcccttcttttggctgttcgagaatgtggtggccatgggagtcagcgacaagcgggatattagccggttcctggagagcaaccccgtgatgatcgatgccaaggaagtgagcgccgcccaccgggccagatacttctggggcaatctgcctggcatgaacagacccctggccagcaccgtgaacgacaagctggagctgcaggagtgcctggagcacggccggatcgccaagttcagcaaggtgagaaccatcaccacccgaagcaacagcatcaaacaaggcaaggaccagcactttcctgtgttcatgaacgagaaggaggacatcctgtggtgtaccgagatggagagagtgttcgggttcccagtccactacacagatgtcagcaacatgtctagactggccagacagagactgctgggaagaagctggtccgtccctgtgatcagacacctgttcgcccctctgaaggagtacttcgcctgcgtgagcagcggcaacagcaacgccaacagccggggccccagcttctctagcggcctggtgccactgtccctgagagggagccacatgggccccatggagatctacaaaaccgtgagcgcctggaagcggcagcctgtgcgcgtgctgagcctgtttcggaatatcgataaagtcctgaaaagcctgggattcctggagagcggctctggctccggcggtggcaccctgaagtacgtggaggatgtgacaaacgtggtcagacgggatgtggagaagtggggccccttcgatctggtgtacggcagcacccaacccctgggcagctcttgtgaccggtgccctggctggtacatgtttcagttccaccggatcctgcagtacgccctgccgagacaggagtcccagcggccattcttttggattttcatggacaacttgctgctgaccgaggatgaccaggaaactaccactcggttcctgcagaccgaagccgtgaccctgcaggacgtgagaggccgggactaccagaacgccatgcgggtgtggtccaacatccctggactgaaaagcaagcacgcacctctgacccctaaagaagaggagtacctgcaggcccaggtgcggagcagaagcaagctggacgcccctaaggtggatctgctggtgaagaattgcctcctgcccctgagagagtacttcaagtatttcagccagaatagtctgcccctgggcggcccaagcagcggcgcccctcctcccagcggcggcagcccagccggctccccaacctctaccgaggagggcacctctgagtccgccacccccgagagcggccctggcacctccaccgagcccagcgagggcagcgcacccggcagccctgccggcagccccacctccacagaggagggaaccagcaccgagcccagcgaaggcagcgccccaggcaccagcaccgagcctagtgagggcggctctggcggcggcagcgcccaggagattaaacggatcaacaagatcagaagaagacttgtgaaagacagcaacaccaagaaggccggcaagacaggccccatgaaaaccctgctggttagagtgatgacacccgatctgagagagcggctggaaaacctgagaaagaagcctgaaaatatcccccagcccatcagcaatacatctagagccaacctgaataagctgctgaccgattacaccgaaatgaagaaggcgatcctgcatgtgtactgggaagagttccagaaggaccctgtgggcctgatgagccgggtggcccagcctgccagcaagaagatcgatcagaacaagctgaaacctgagatggacgagaagggcaacctgaccaccgccggctttgcctgctctcagtgtggccagcccctgttcgtgtacaagctggagcaggtgtctgagaagggcaaggcttacaccaactacttcggacggtgcaatgtggccgagcacgaaaagctgatcctgctggcccagctgaagcccgagaaggatagcgacgaagccgtgacatatagcctgggaaagtttgggcagagggccctggatttctacagcattcatgtgaccaaggagtccacccaccccgtgaagcccctggcccagatcgccggaaacagatacgcctccggacctgtgggaaaggccctgagcgacgcatgtatgggcacaatcgcctccttcctgtctaagtaccaggacatcatcatcgaacaccagaaggtggtgaagggcaaccagaagagactggagagcctgcgggagctggccggcaaggaaaacctggaataccctagcgtgaccctgccacctcagcctcacaccaaggagggcgttgatgcctacaacgaagtgatcgcccgggtgcgaatgtgggtgaacctgaacctgtggcagaagctgaagctaagcagagatgatgccaagcctctgctgagactgaagggattcccttcctttcctctggtcgagagacaggccaacgaagtggactggtgggacatggtgtgtaacgtgaagaagctgatcaacgagaaaaaggaggatggcaaggtgttttggcagaatctggctggctacaagagacaggaagccctgagaccatacctgagcagcgaggaagatcggaagaagggaaagaaattcgctcggtaccagctgggcgacctgctgctgcacctggaaaagaagcacggcgaggactggggaaaggtgtacgacgaggcctgggagcggattgacaagaaagtggaaggcctgagcaagcacatcaagctggaagaggaacggagaagcgaggacgcccagagcaaggccgccctgaccgactggctgcgggctaaggccagcttcgtgatcgagggcctgaaggaggccgacaaggacgagttctgcagatgcgagctgaagctgcagaagtggtacggggacctgcggggaaagcccttcgccatcgaagccgagaacagcatcctggacatcagcggcttcagcaagcagtacaactgtgccttcatctggcagaaggacggcgtgaagaagctgaacctgtacctgatcatcaactacttcaagggcggcaagctgcggttcaagaagatcaaacctgaagccttcgaagccaacagattctacaccgtgatcaacaaaaagagcggcgagatcgtgcccatggaggtgaacttcaacttcgacgaccccaacctgatcatcctgcctctggcctttggcaagagacagggcagagaattcatctggaacgacctgctgtccctggaaaccggcagcctgaagctggccaacggaagagtgatcgagaagacactgtacaacagaagaacccggcaggatgagcctgccctgttcgtggccctgaccttcgagcggcgggaggtcctggactcctccaatatcaaaccaatgaacctgatcggcgtggcaagaggcgaaaacatccccgccgtgatcgccctgaccgaccccgagggctgcccactgagccggtttaaggatagcctgggaaacccaacccacatcctgagaatcggcgagagctataaggagaagcagcggaccatccaggccaagaaggaggtggagcagcggagagccggcggctacagccggaagtacgccagcaaagccaagaatctggcagacgatatggtgagaaacaccgctagagatctgctgtactacgccgtgacccaggatgccatgctgatcttcgccaacctgagccggggcttcggccggcagggcaagcggaccttcatggccgagagacagtacacacggatggaggactggctgaccgccaagctggcctacgagggcctgagcaagacctacctgtccaagacactggcccagtacacctccaagacatgcagcaactgtgggtttaccatcaccagcgccgactacgacagggtgctggagaagctgaagaagacagcaacaggctggatgaccacaattaacggcaaggagctgaaggtggagggccagattacctactacaacagatacaagagacagaacgtagtcaaggacctgtccgtcgagctggatagactgagcgaagaatctgtgaacaacgacatctcctcctggacaaagggcagaagcggagaagctctgagcctcctgaagaaaagattctcccatagacccgtgcaggagaagttcgtgtgcctgaactgcggcttcgagacacacgcagccgagcaagccgccctgaacatcgccagatcctggctgttcctgcggagccaggagtacaagaaataccagacaaacaagacaaccggcaacaccgataagagagccttcgtcgagacctggcagtccttttaccggaagaagcttaaggaggtgtggaaacctgccgtgcggtctggcggatctggcggaggctccacaagcatggccttcgaggacgtggccgtgcacttcagccaggaggagtggggcctgctggacaccgcccagaggagcctgtacaggagggtgatgctggagaacttcgccctgctggccagcctgggcctgagcgtgagcaggccccacgtggtgacccagctggagaggggcgaggagccctgggtgctgagcggcgtggacgtgaccctgcccagggacgcccagaggaggccccacaggggcagcaccagccccaagaaaaagagaaaagtctaagctgccttctgcggggcttgccttctggccatgcccttcttctctcccttgcacctgtacctcttggtctttgaataaagcctgagtaggaaggctagcaaaaaaaaaaaaaaaaaaaaaaaaaaaaaaaaaaaaaaaaaaaaaaaaaaaaaaaaaaaaaaaaaaaaaaaaaaaaaaaa

SEQ ID NO: 2728 - RNA, 5419 nt, synthetic construct
  source 1..5419: mol_type = other RNA
aggaaataagagagaaaagaagagtaagaagaaatataagagccaccatggcccctaagaagaagcgtaaagtgagccgggtgaacggcagcggcagcggcggcggcatgaaccacgaccaggagttcgacccccctaaggtgtaccctcccgtccccgccgagaagagaaagcccatccgggtcctgagcctgttcgatggcatcgccaccggtctgctggtgctgaaggacctgggcatccaggtggataggtacattgcctccgaggtgtgcgaggactccatcaccgtgggaatggtgcgtcatcagggcaagatcatgtacgtgggcgacgtgcggagcgtgacacagaagcatatccaggagtggggccctttcgacctggtgatcggcggcagcccttgcaatgacctgagcatcgtgaacccagcccggaagggcctgtacgagggaaccggcagactgttcttcgagttttacagactgctgcacgacgcccggcctaaggaaggcgacgaccggcccttcttttggctgttcgagaatgtggtggccatgggagtcagcgacaagcgggatattagccggttcctggagagcaaccccgtgatgatcgatgccaaggaagtgagcgccgcccaccgggccagatacttctggggcaatctgcctggcatgaacagacccctggccagcaccgtgaacgacaagctggagctgcaggagtgcctggagcacggccggatcgccaagttcagcaaggtgagaaccatcaccacccgaagcaacagcatcaaacaaggcaaggaccagcactttcctgtgttcatgaacgagaaggaggacatcctgtggtgtaccgagatggagagagtgttcgggttcccagtccactacacagatgtcagcaacatgtctagactggccagacagagactgctgggaagaagctggtccgtccctgtgatcagacacctgttcgcccctctgaaggagtacttcgcctgcgtgagcagcggcaacagcaacgccaacagccggggccccagcttctctagcggcctggtgccactgtccctgagagggagccacatgggccccatggagatctacaaaaccgtgagcgcctggaagcggcagcctgtgcgcgtgctgagcctgtttcggaatatcgataaagtcctgaaaagcctgggattcctggagagcggctctggctccggcggtggcaccctgaagtacgtggaggatgtgacaaacgtggtcagacgggatgtggagaagtggggccccttcgatctggtgtacggcagcacccaacccctgggcagctcttgtgaccggtgccctggctggtacatgtttcagttccaccggatcctgcagtacgccctgccgagacaggagtcccagcggccattcttttggattttcatggacaacttgctgctgaccgaggatgaccaggaaactaccactcggttcctgcagaccgaagccgtgaccctgcaggacgtgagaggccgggactaccagaacgccatgcgggtgtggtccaacatccctggactgaaaagcaagcacgcacctctgacccctaaagaagaggagtacctgcaggcccaggtgcggagcagaagcaagctggacgcccctaaggtggatctgctggtgaagaattgcctcctgcccctgagagagtacttcaagtatttcagccagaatagtctgcccctgggcggcccaagcagcggcgcccctcctcccagcggcggcagcccagccggctccccaacctctaccgaggagggcacctctgagtccgccacccccgagagcggccctggcacctccaccgagcccagcgagggcagcgcacccggcagccctgccggcagccccacctccacagaggagggaaccagcaccgagcccagcgaaggcagcgccccaggcaccagcaccgagcctagtgagggcggctctggcggcggcagcgcccaggagattaaacggatcaacaagatcagaagaagacttgtgaaagacagcaacaccaagaaggccggcaagacaggccccatgaaaaccctgctggttagagtgatgacacccgatctgagagagcggctggaaaacctgagaaagaagcctgaaaatatcccccagcccatcagcaatacatctagagccaacctgaataagctgctgaccgattacaccgaaatgaagaaggcgatcctgcatgtgtactgggaagagttccagaaggaccctgtgggcctgatgagccgggtggcccagcctgccagcaagaagatcgatcagaacaagctgaaacctgagatggacgagaagggcaacctgaccaccgccggctttgcctgctctcagtgtggccagcccctgttcgtgtacaagctggagcaggtgtctgagaagggcaaggcttacaccaactacttcggacggtgcaatgtggccgagcacgaaaagctgatcctgctggcccagctgaagcccgagaaggatagcgacgaagccgtgacatatagcctgggaaagtttgggcagagggccctggatttctacagcattcatgtgaccaaggagtccacccaccccgtgaagcccctggcccagatcgccggaaacagatacgcctccggacctgtgggaaaggccctgagcgacgcatgtatgggcacaatcgcctccttcctgtctaagtaccaggacatcatcatcgaacaccagaaggtggtgaagggcaaccagaagagactggagagcctgcgggagctggccggcaaggaaaacctggaataccctagcgtgaccctgccacctcagcctcacaccaaggagggcgttgatgcctacaacgaagtgatcgcccgggtgcgaatgtgggtgaacctgaacctgtggcagaagctgaagctaagcagagatgatgccaagcctctgctgagactgaagggattcccttcctttcctctggtcgagagacaggccaacgaagtggactggtgggacatggtgtgtaacgtgaagaagctgatcaacgagaaaaaggaggatggcaaggtgttttggcagaatctggctggctacaagagacaggaagccctgagaccatacctgagcagcgaggaagatcggaagaagggaaagaaattcgctcggtaccagctgggcgacctgctgctgcacctggaaaagaagcacggcgaggactggggaaaggtgtacgacgaggcctgggagcggattgacaagaaagtggaaggcctgagcaagcacatcaagctggaagaggaacggagaagcgaggacgcccagagcaaggccgccctgaccgactggctgcgggctaaggccagcttcgtgatcgagggcctgaaggaggccgacaaggacgagttctgcagatgcgagctgaagctgcagaagtggtacggggacctgcggggaaagcccttcgccatcgaagccgagaacagcatcctggacatcagcggcttcagcaagcagtacaactgtgccttcatctggcagaaggacggcgtgaagaagctgaacctgtacctgatcatcaactacttcaagggcggcaagctgcggttcaagaagatcaaacctgaagccttcgaagccaacagattctacaccgtgatcaacaaaaagagcggcgagatcgtgcccatggaggtgaacttcaacttcgacgaccccaacctgatcatcctgcctctggcctttggcaagagacagggcagagaattcatctggaacgacctgctgtccctggaaaccggcagcctgaagctggccaacggaagagtgatcgagaagacactgtacaacagaagaacccggcaggatgagcctgccctgttcgtggccctgaccttcgagcggcgggaggtcctggactcctccaatatcaaaccaatgaacctgatcggcgtggcaagaggcgaaaacatccccgccgtgatcgccctgaccgaccccgagggctgcccactgagccggtttaaggatagcctgggaaacccaacccacatcctgagaatcggcgagagctataaggagaagcagcggaccatccaggccaagaaggaggtggagcagcggagagccggcggctacagccggaagtacgccagcaaagccaagaatctggcagacgatatggtgagaaacaccgctagagatctgctgtactacgccgtgacccaggatgccatgctgatcttcgccaacctgagccggggcttcggccggcagggcaagcggaccttcatggccgagagacagtacacacggatggaggactggctgaccgccaagctggcctacgagggcctgagcaagacctacctgtccaagacactggcccagtacacctccaagacatgcagcaactgtgggtttaccatcaccagcgccgactacgacagggtgctggagaagctgaagaagacagcaacaggctggatgaccacaattaacggcaaggagctgaaggtggagggccagattacctactacaacagatacaagagacagaacgtagtcaaggacctgtccgtcgagctggatagactgagcgaagaatctgtgaacaacgacatctcctcctggacaaagggcagaagcggagaagctctgagcctcctgaagaaaagattctcccatagacccgtgcaggagaagttcgtgtgcctgaactgcggcttcgagacacacgcagccgagcaagccgccctgaacatcgccagatcctggctgttcctgcggagccaggagtacaagaaataccagacaaacaagacaaccggcaacaccgataagagagccttcgtcgagacctggcagtccttttaccggaagaagcttaaggaggtgtggaaacctgccgtgcggtctggcggatctggcggaggctccacaagcatgatcgagtaccagatccccgtgagcttcaaggacgtggtggtgggcttcacccaggaggagtggcaccagctgagccccgcccagagggccctgtacagggacgtgatgctggagacctacagcaacctggtgagcgtgggctacgagggcaccaagcccgacgtgatcctgaggctggagcaggaggaggccccctggatcggcgaggccgcctgcctgggctgccactgctgggaggacaccagccccaagaaaaagagaaaagtctaagctgccttctgcggggcttgccttctggccatgcccttcttctctcccttgcacctgtacctcttggtctttgaataaagcctgagtaggaaggctagcaaaaaaaaaaaaaaaaaaaaaaaaaaaaaaaaaaaaaaaaaaaaaaaaaaaaaaaaaaaaaaaaaaaaaaaaaaaaaaaa

SEQ ID NO: 2729 - RNA, 5419 nt, synthetic construct
  source 1..5419: mol_type = other RNA
aggaaataagagagaaaagaagagtaagaagaaatataagagccaccatggcccctaagaagaagcgtaaagtgagccgggtgaacggcagcggcagcggcggcggcatgaaccacgaccaggagttcgacccccctaaggtgtaccctcccgtccccgccgagaagagaaagcccatccgggtcctgagcctgttcgatggcatcgccaccggtctgctggtgctgaaggacctgggcatccaggtggataggtacattgcctccgaggtgtgcgaggactccatcaccgtgggaatggtgcgtcatcagggcaagatcatgtacgtgggcgacgtgcggagcgtgacacagaagcatatccaggagtggggccctttcgacctggtgatcggcggcagcccttgcaatgacctgagcatcgtgaacccagcccggaagggcctgtacgagggaaccggcagactgttcttcgagttttacagactgctgcacgacgcccggcctaaggaaggcgacgaccggcccttcttttggctgttcgagaatgtggtggccatgggagtcagcgacaagcgggatattagccggttcctggagagcaaccccgtgatgatcgatgccaaggaagtgagcgccgcccaccgggccagatacttctggggcaatctgcctggcatgaacagacccctggccagcaccgtgaacgacaagctggagctgcaggagtgcctggagcacggccggatcgccaagttcagcaaggtgagaaccatcaccacccgaagcaacagcatcaaacaaggcaaggaccagcactttcctgtgttcatgaacgagaaggaggacatcctgtggtgtaccgagatggagagagtgttcgggttcccagtccactacacagatgtcagcaacatgtctagactggccagacagagactgctgggaagaagctggtccgtccctgtgatcagacacctgttcgcccctctgaaggagtacttcgcctgcgtgagcagcggcaacagcaacgccaacagccggggccccagcttctctagcggcctggtgccactgtccctgagagggagccacatgggccccatggagatctacaaaaccgtgagcgcctggaagcggcagcctgtgcgcgtgctgagcctgtttcggaatatcgataaagtcctgaaaagcctgggattcctggagagcggctctggctccggcggtggcaccctgaagtacgtggaggatgtgacaaacgtggtcagacgggatgtggagaagtggggccccttcgatctggtgtacggcagcacccaacccctgggcagctcttgtgaccggtgccctggctggtacatgtttcagttccaccggatcctgcagtacgccctgccgagacaggagtcccagcggccattcttttggattttcatggacaacttgctgctgaccgaggatgaccaggaaactaccactcggttcctgcagaccgaagccgtgaccctgcaggacgtgagaggccgggactaccagaacgccatgcgggtgtggtccaacatccctggactgaaaagcaagcacgcacctctgacccctaaagaagaggagtacctgcaggcccaggtgcggagcagaagcaagctggacgcccctaaggtggatctgctggtgaagaattgcctcctgcccctgagagagtacttcaagtatttcagccagaatagtctgcccctgggcggcccaagcagcggcgcccctcctcccagcggcggcagcccagccggctccccaacctctaccgaggagggcacctctgagtccgccacccccgagagcggccctggcacctccaccgagcccagcgagggcagcgcacccggcagccctgccggcagccccacctccacagaggagggaaccagcaccgagcccagcgaaggcagcgccccaggcaccagcaccgagcctagtgagggcggctctggcggcggcagcgcccaggagattaaacggatcaacaagatcagaagaagacttgtgaaagacagcaacaccaagaaggccggcaagacaggccccatgaaaaccctgctggttagagtgatgacacccgatctgagagagcggctggaaaacctgagaaagaagcctgaaaatatcccccagcccatcagcaatacatctagagccaacctgaataagctgctgaccgattacaccgaaatgaagaaggcgatcctgcatgtgtactgggaagagttccagaaggaccctgtgggcctgatgagccgggtggcccagcctgccagcaagaagatcgatcagaacaagctgaaacctgagatggacgagaagggcaacctgaccaccgccggctttgcctgctctcagtgtggccagcccctgttcgtgtacaagctggagcaggtgtctgagaagggcaaggcttacaccaactacttcggacggtgcaatgtggccgagcacgaaaagctgatcctgctggcccagctgaagcccgagaaggatagcgacgaagccgtgacatatagcctgggaaagtttgggcagagggccctggatttctacagcattcatgtgaccaaggagtccacccaccccgtgaagcccctggcccagatcgccggaaacagatacgcctccggacctgtgggaaaggccctgagcgacgcatgtatgggcacaatcgcctccttcctgtctaagtaccaggacatcatcatcgaacaccagaaggtggtgaagggcaaccagaagagactggagagcctgcgggagctggccggcaaggaaaacctggaataccctagcgtgaccctgccacctcagcctcacaccaaggagggcgttgatgcctacaacgaagtgatcgcccgggtgcgaatgtgggtgaacctgaacctgtggcagaagctgaagctaagcagagatgatgccaagcctctgctgagactgaagggattcccttcctttcctctggtcgagagacaggccaacgaagtggactggtgggacatggtgtgtaacgtgaagaagctgatcaacgagaaaaaggaggatggcaaggtgttttggcagaatctggctggctacaagagacaggaagccctgagaccatacctgagcagcgaggaagatcggaagaagggaaagaaattcgctcggtaccagctgggcgacctgctgctgcacctggaaaagaagcacggcgaggactggggaaaggtgtacgacgaggcctgggagcggattgacaagaaagtggaaggcctgagcaagcacatcaagctggaagaggaacggagaagcgaggacgcccagagcaaggccgccctgaccgactggctgcgggctaaggccagcttcgtgatcgagggcctgaaggaggccgacaaggacgagttctgcagatgcgagctgaagctgcagaagtggtacggggacctgcggggaaagcccttcgccatcgaagccgagaacagcatcctggacatcagcggcttcagcaagcagtacaactgtgccttcatctggcagaaggacggcgtgaagaagctgaacctgtacctgatcatcaactacttcaagggcggcaagctgcggttcaagaagatcaaacctgaagccttcgaagccaacagattctacaccgtgatcaacaaaaagagcggcgagatcgtgcccatggaggtgaacttcaacttcgacgaccccaacctgatcatcctgcctctggcctttggcaagagacagggcagagaattcatctggaacgacctgctgtccctggaaaccggcagcctgaagctggccaacggaagagtgatcgagaagacactgtacaacagaagaacccggcaggatgagcctgccctgttcgtggccctgaccttcgagcggcgggaggtcctggactcctccaatatcaaaccaatgaacctgatcggcgtggcaagaggcgaaaacatccccgccgtgatcgccctgaccgaccccgagggctgcccactgagccggtttaaggatagcctgggaaacccaacccacatcctgagaatcggcgagagctataaggagaagcagcggaccatccaggccaagaaggaggtggagcagcggagagccggcggctacagccggaagtacgccagcaaagccaagaatctggcagacgatatggtgagaaacaccgctagagatctgctgtactacgccgtgacccaggatgccatgctgatcttcgccaacctgagccggggcttcggccggcagggcaagcggaccttcatggccgagagacagtacacacggatggaggactggctgaccgccaagctggcctacgagggcctgagcaagacctacctgtccaagacactggcccagtacacctccaagacatgcagcaactgtgggtttaccatcaccagcgccgactacgacagggtgctggagaagctgaagaagacagcaacaggctggatgaccacaattaacggcaaggagctgaaggtggagggccagattacctactacaacagatacaagagacagaacgtagtcaaggacctgtccgtcgagctggatagactgagcgaagaatctgtgaacaacgacatctcctcctggacaaagggcagaagcggagaagctctgagcctcctgaagaaaagattctcccatagacccgtgcaggagaagttcgtgtgcctgaactgcggcttcgagacacacgcagccgagcaagccgccctgaacatcgccagatcctggctgttcctgcggagccaggagtacaagaaataccagacaaacaagacaaccggcaacaccgataagagagccttcgtcgagacctggcagtccttttaccggaagaagcttaaggaggtgtggaaacctgccgtgcggtctggcggatctggcggaggctccacaagcatggcccaggtgaccttcagcgacgtggccatcgacttcagccacgaggagtgggcctggctggacagcgcccagagggacctgtacaaggacgtgatggtgcagaactacgagaacctggtgagcgtgggcctgagcgtgaccaagccctacgtgatcaccctgctggaggacggcaaggagccctggatggtggagaagaagctgagcaagggcatgatccccgactgggagagcaggtggaccagccccaagaaaaagagaaaagtctaagctgccttctgcggggcttgccttctggccatgcccttcttctctcccttgcacctgtacctcttggtctttgaataaagcctgagtaggaaggctagcaaaaaaaaaaaaaaaaaaaaaaaaaaaaaaaaaaaaaaaaaaaaaaaaaaaaaaaaaaaaaaaaaaaaaaaaaaaaaaaa

SEQ ID NO: 2730 - RNA, 5419 nt, synthetic construct
  source 1..5419: mol_type = other RNA
aggaaataagagagaaaagaagagtaagaagaaatataagagccaccatggcccctaagaagaagcgtaaagtgagccgggtgaacggcagcggcagcggcggcggcatgaaccacgaccaggagttcgacccccctaaggtgtaccctcccgtccccgccgagaagagaaagcccatccgggtcctgagcctgttcgatggcatcgccaccggtctgctggtgctgaaggacctgggcatccaggtggataggtacattgcctccgaggtgtgcgaggactccatcaccgtgggaatggtgcgtcatcagggcaagatcatgtacgtgggcgacgtgcggagcgtgacacagaagcatatccaggagtggggccctttcgacctggtgatcggcggcagcccttgcaatgacctgagcatcgtgaacccagcccggaagggcctgtacgagggaaccggcagactgttcttcgagttttacagactgctgcacgacgcccggcctaaggaaggcgacgaccggcccttcttttggctgttcgagaatgtggtggccatgggagtcagcgacaagcgggatattagccggttcctggagagcaaccccgtgatgatcgatgccaaggaagtgagcgccgcccaccgggccagatacttctggggcaatctgcctggcatgaacagacccctggccagcaccgtgaacgacaagctggagctgcaggagtgcctggagcacggccggatcgccaagttcagcaaggtgagaaccatcaccacccgaagcaacagcatcaaacaaggcaaggaccagcactttcctgtgttcatgaacgagaaggaggacatcctgtggtgtaccgagatggagagagtgttcgggttcccagtccactacacagatgtcagcaacatgtctagactggccagacagagactgctgggaagaagctggtccgtccctgtgatcagacacctgttcgcccctctgaaggagtacttcgcctgcgtgagcagcggcaacagcaacgccaacagccggggccccagcttctctagcggcctggtgccactgtccctgagagggagccacatgggccccatggagatctacaaaaccgtgagcgcctggaagcggcagcctgtgcgcgtgctgagcctgtttcggaatatcgataaagtcctgaaaagcctgggattcctggagagcggctctggctccggcggtggcaccctgaagtacgtggaggatgtgacaaacgtggtcagacgggatgtggagaagtggggccccttcgatctggtgtacggcagcacccaacccctgggcagctcttgtgaccggtgccctggctggtacatgtttcagttccaccggatcctgcagtacgccctgccgagacaggagtcccagcggccattcttttggattttcatggacaacttgctgctgaccgaggatgaccaggaaactaccactcggttcctgcagaccgaagccgtgaccctgcaggacgtgagaggccgggactaccagaacgccatgcgggtgtggtccaacatccctggactgaaaagcaagcacgcacctctgacccctaaagaagaggagtacctgcaggcccaggtgcggagcagaagcaagctggacgcccctaaggtggatctgctggtgaagaattgcctcctgcccctgagagagtacttcaagtatttcagccagaatagtctgcccctgggcggcccaagcagcggcgcccctcctcccagcggcggcagcccagccggctccccaacctctaccgaggagggcacctctgagtccgccacccccgagagcggccctggcacctccaccgagcccagcgagggcagcgcacccggcagccctgccggcagccccacctccacagaggagggaaccagcaccgagcccagcgaaggcagcgccccaggcaccagcaccgagcctagtgagggcggctctggcggcggcagcgcccaggagattaaacggatcaacaagatcagaagaagacttgtgaaagacagcaacaccaagaaggccggcaagacaggccccatgaaaaccctgctggttagagtgatgacacccgatctgagagagcggctggaaaacctgagaaagaagcctgaaaatatcccccagcccatcagcaatacatctagagccaacctgaataagctgctgaccgattacaccgaaatgaagaaggcgatcctgcatgtgtactgggaagagttccagaaggaccctgtgggcctgatgagccgggtggcccagcctgccagcaagaagatcgatcagaacaagctgaaacctgagatggacgagaagggcaacctgaccaccgccggctttgcctgctctcagtgtggccagcccctgttcgtgtacaagctggagcaggtgtctgagaagggcaaggcttacaccaactacttcggacggtgcaatgtggccgagcacgaaaagctgatcctgctggcccagctgaagcccgagaaggatagcgacgaagccgtgacatatagcctgggaaagtttgggcagagggccctggatttctacagcattcatgtgaccaaggagtccacccaccccgtgaagcccctggcccagatcgccggaaacagatacgcctccggacctgtgggaaaggccctgagcgacgcatgtatgggcacaatcgcctccttcctgtctaagtaccaggacatcatcatcgaacaccagaaggtggtgaagggcaaccagaagagactggagagcctgcgggagctggccggcaaggaaaacctggaataccctagcgtgaccctgccacctcagcctcacaccaaggagggcgttgatgcctacaacgaagtgatcgcccgggtgcgaatgtgggtgaacctgaacctgtggcagaagctgaagctaagcagagatgatgccaagcctctgctgagactgaagggattcccttcctttcctctggtcgagagacaggccaacgaagtggactggtgggacatggtgtgtaacgtgaagaagctgatcaacgagaaaaaggaggatggcaaggtgttttggcagaatctggctggctacaagagacaggaagccctgagaccatacctgagcagcgaggaagatcggaagaagggaaagaaattcgctcggtaccagctgggcgacctgctgctgcacctggaaaagaagcacggcgaggactggggaaaggtgtacgacgaggcctgggagcggattgacaagaaagtggaaggcctgagcaagcacatcaagctggaagaggaacggagaagcgaggacgcccagagcaaggccgccctgaccgactggctgcgggctaaggccagcttcgtgatcgagggcctgaaggaggccgacaaggacgagttctgcagatgcgagctgaagctgcagaagtggtacggggacctgcggggaaagcccttcgccatcgaagccgagaacagcatcctggacatcagcggcttcagcaagcagtacaactgtgccttcatctggcagaaggacggcgtgaagaagctgaacctgtacctgatcatcaactacttcaagggcggcaagctgcggttcaagaagatcaaacctgaagccttcgaagccaacagattctacaccgtgatcaacaaaaagagcggcgagatcgtgcccatggaggtgaacttcaacttcgacgaccccaacctgatcatcctgcctctggcctttggcaagagacagggcagagaattcatctggaacgacctgctgtccctggaaaccggcagcctgaagctggccaacggaagagtgatcgagaagacactgtacaacagaagaacccggcaggatgagcctgccctgttcgtggccctgaccttcgagcggcgggaggtcctggactcctccaatatcaaaccaatgaacctgatcggcgtggcaagaggcgaaaacatccccgccgtgatcgccctgaccgaccccgagggctgcccactgagccggtttaaggatagcctgggaaacccaacccacatcctgagaatcggcgagagctataaggagaagcagcggaccatccaggccaagaaggaggtggagcagcggagagccggcggctacagccggaagtacgccagcaaagccaagaatctggcagacgatatggtgagaaacaccgctagagatctgctgtactacgccgtgacccaggatgccatgctgatcttcgccaacctgagccggggcttcggccggcagggcaagcggaccttcatggccgagagacagtacacacggatggaggactggctgaccgccaagctggcctacgagggcctgagcaagacctacctgtccaagacactggcccagtacacctccaagacatgcagcaactgtgggtttaccatcaccagcgccgactacgacagggtgctggagaagctgaagaagacagcaacaggctggatgaccacaattaacggcaaggagctgaaggtggagggccagattacctactacaacagatacaagagacagaacgtagtcaaggacctgtccgtcgagctggatagactgagcgaagaatctgtgaacaacgacatctcctcctggacaaagggcagaagcggagaagctctgagcctcctgaagaaaagattctcccatagacccgtgcaggagaagttcgtgtgcctgaactgcggcttcgagacacacgcagccgagcaagccgccctgaacatcgccagatcctggctgttcctgcggagccaggagtacaagaaataccagacaaacaagacaaccggcaacaccgataagagagccttcgtcgagacctggcagtccttttaccggaagaagcttaaggaggtgtggaaacctgccgtgcggtctggcggatctggcggaggctccacaagcaggctggagagcgtgaccttcgaggacgtggccgtgtacttcacccagaaccagtgggccagcctggaccccgcccagagggccctgtacggcgaggtgatgctggagaactacgccaacgtggccagcctggtggccttccccttccccaagcccgccctgatcagccacctggagaggggcgaggccccctggggccccgacccctgggacaccaagatccccaggggcatcagccagggcaccagccccaagaaaaagagaaaagtctaagctgccttctgcggggcttgccttctggccatgcccttcttctctcccttgcacctgtacctcttggtctttgaataaagcctgagtaggaaggctagcaaaaaaaaaaaaaaaaaaaaaaaaaaaaaaaaaaaaaaaaaaaaaaaaaaaaaaaaaaaaaaaaaaaaaaaaaaaaaaaa

SEQ ID NO: 2731 - RNA, 5419 nt, synthetic construct
  source 1..5419: mol_type = other RNA
aggaaataagagagaaaagaagagtaagaagaaatataagagccaccatggcccctaagaagaagcgtaaagtgagccgggtgaacggcagcggcagcggcggcggcatgaaccacgaccaggagttcgacccccctaaggtgtaccctcccgtccccgccgagaagagaaagcccatccgggtcctgagcctgttcgatggcatcgccaccggtctgctggtgctgaaggacctgggcatccaggtggataggtacattgcctccgaggtgtgcgaggactccatcaccgtgggaatggtgcgtcatcagggcaagatcatgtacgtgggcgacgtgcggagcgtgacacagaagcatatccaggagtggggccctttcgacctggtgatcggcggcagcccttgcaatgacctgagcatcgtgaacccagcccggaagggcctgtacgagggaaccggcagactgttcttcgagttttacagactgctgcacgacgcccggcctaaggaaggcgacgaccggcccttcttttggctgttcgagaatgtggtggccatgggagtcagcgacaagcgggatattagccggttcctggagagcaaccccgtgatgatcgatgccaaggaagtgagcgccgcccaccgggccagatacttctggggcaatctgcctggcatgaacagacccctggccagcaccgtgaacgacaagctggagctgcaggagtgcctggagcacggccggatcgccaagttcagcaaggtgagaaccatcaccacccgaagcaacagcatcaaacaaggcaaggaccagcactttcctgtgttcatgaacgagaaggaggacatcctgtggtgtaccgagatggagagagtgttcgggttcccagtccactacacagatgtcagcaacatgtctagactggccagacagagactgctgggaagaagctggtccgtccctgtgatcagacacctgttcgcccctctgaaggagtacttcgcctgcgtgagcagcggcaacagcaacgccaacagccggggccccagcttctctagcggcctggtgccactgtccctgagagggagccacatgggccccatggagatctacaaaaccgtgagcgcctggaagcggcagcctgtgcgcgtgctgagcctgtttcggaatatcgataaagtcctgaaaagcctgggattcctggagagcggctctggctccggcggtggcaccctgaagtacgtggaggatgtgacaaacgtggtcagacgggatgtggagaagtggggccccttcgatctggtgtacggcagcacccaacccctgggcagctcttgtgaccggtgccctggctggtacatgtttcagttccaccggatcctgcagtacgccctgccgagacaggagtcccagcggccattcttttggattttcatggacaacttgctgctgaccgaggatgaccaggaaactaccactcggttcctgcagaccgaagccgtgaccctgcaggacgtgagaggccgggactaccagaacgccatgcgggtgtggtccaacatccctggactgaaaagcaagcacgcacctctgacccctaaagaagaggagtacctgcaggcccaggtgcggagcagaagcaagctggacgcccctaaggtggatctgctggtgaagaattgcctcctgcccctgagagagtacttcaagtatttcagccagaatagtctgcccctgggcggcccaagcagcggcgcccctcctcccagcggcggcagcccagccggctccccaacctctaccgaggagggcacctctgagtccgccacccccgagagcggccctggcacctccaccgagcccagcgagggcagcgcacccggcagccctgccggcagccccacctccacagaggagggaaccagcaccgagcccagcgaaggcagcgccccaggcaccagcaccgagcctagtgagggcggctctggcggcggcagcgcccaggagattaaacggatcaacaagatcagaagaagacttgtgaaagacagcaacaccaagaaggccggcaagacaggccccatgaaaaccctgctggttagagtgatgacacccgatctgagagagcggctggaaaacctgagaaagaagcctgaaaatatcccccagcccatcagcaatacatctagagccaacctgaataagctgctgaccgattacaccgaaatgaagaaggcgatcctgcatgtgtactgggaagagttccagaaggaccctgtgggcctgatgagccgggtggcccagcctgccagcaagaagatcgatcagaacaagctgaaacctgagatggacgagaagggcaacctgaccaccgccggctttgcctgctctcagtgtggccagcccctgttcgtgtacaagctggagcaggtgtctgagaagggcaaggcttacaccaactacttcggacggtgcaatgtggccgagcacgaaaagctgatcctgctggcccagctgaagcccgagaaggatagcgacgaagccgtgacatatagcctgggaaagtttgggcagagggccctggatttctacagcattcatgtgaccaaggagtccacccaccccgtgaagcccctggcccagatcgccggaaacagatacgcctccggacctgtgggaaaggccctgagcgacgcatgtatgggcacaatcgcctccttcctgtctaagtaccaggacatcatcatcgaacaccagaaggtggtgaagggcaaccagaagagactggagagcctgcgggagctggccggcaaggaaaacctggaataccctagcgtgaccctgccacctcagcctcacaccaaggagggcgttgatgcctacaacgaagtgatcgcccgggtgcgaatgtgggtgaacctgaacctgtggcagaagctgaagctaagcagagatgatgccaagcctctgctgagactgaagggattcccttcctttcctctggtcgagagacaggccaacgaagtggactggtgggacatggtgtgtaacgtgaagaagctgatcaacgagaaaaaggaggatggcaaggtgttttggcagaatctggctggctacaagagacaggaagccctgagaccatacctgagcagcgaggaagatcggaagaagggaaagaaattcgctcggtaccagctgggcgacctgctgctgcacctggaaaagaagcacggcgaggactggggaaaggtgtacgacgaggcctgggagcggattgacaagaaagtggaaggcctgagcaagcacatcaagctggaagaggaacggagaagcgaggacgcccagagcaaggccgccctgaccgactggctgcgggctaaggccagcttcgtgatcgagggcctgaaggaggccgacaaggacgagttctgcagatgcgagctgaagctgcagaagtggtacggggacctgcggggaaagcccttcgccatcgaagccgagaacagcatcctggacatcagcggcttcagcaagcagtacaactgtgccttcatctggcagaaggacggcgtgaagaagctgaacctgtacctgatcatcaactacttcaagggcggcaagctgcggttcaagaagatcaaacctgaagccttcgaagccaacagattctacaccgtgatcaacaaaaagagcggcgagatcgtgcccatggaggtgaacttcaacttcgacgaccccaacctgatcatcctgcctctggcctttggcaagagacagggcagagaattcatctggaacgacctgctgtccctggaaaccggcagcctgaagctggccaacggaagagtgatcgagaagacactgtacaacagaagaacccggcaggatgagcctgccctgttcgtggccctgaccttcgagcggcgggaggtcctggactcctccaatatcaaaccaatgaacctgatcggcgtggcaagaggcgaaaacatccccgccgtgatcgccctgaccgaccccgagggctgcccactgagccggtttaaggatagcctgggaaacccaacccacatcctgagaatcggcgagagctataaggagaagcagcggaccatccaggccaagaaggaggtggagcagcggagagccggcggctacagccggaagtacgccagcaaagccaagaatctggcagacgatatggtgagaaacaccgctagagatctgctgtactacgccgtgacccaggatgccatgctgatcttcgccaacctgagccggggcttcggccggcagggcaagcggaccttcatggccgagagacagtacacacggatggaggactggctgaccgccaagctggcctacgagggcctgagcaagacctacctgtccaagacactggcccagtacacctccaagacatgcagcaactgtgggtttaccatcaccagcgccgactacgacagggtgctggagaagctgaagaagacagcaacaggctggatgaccacaattaacggcaaggagctgaaggtggagggccagattacctactacaacagatacaagagacagaacgtagtcaaggacctgtccgtcgagctggatagactgagcgaagaatctgtgaacaacgacatctcctcctggacaaagggcagaagcggagaagctctgagcctcctgaagaaaagattctcccatagacccgtgcaggagaagttcgtgtgcctgaactgcggcttcgagacacacgcagccgagcaagccgccctgaacatcgccagatcctggctgttcctgcggagccaggagtacaagaaataccagacaaacaagacaaccggcaacaccgataagagagccttcgtcgagacctggcagtccttttaccggaagaagcttaaggaggtgtggaaacctgccgtgcggtctggcggatctggcggaggctccacaagctgccaggagaccctgaccttcaaggacgtggccgtggacttcaccagggaggagtggggccagctgggccccgcccagagggacctgtacaaggaggtgatgctggacaactacaggaacctgatcagcctgggcctgcagggcagcaagcccgacgtgatcttctggctggagaggggccagagcccctggaccctgaagaggaggaagagcagggactgctgccccgagttccacctgcacaccagccccaagaaaaagagaaaagtctaagctgccttctgcggggcttgccttctggccatgcccttcttctctcccttgcacctgtacctcttggtctttgaataaagcctgagtaggaaggctagcaaaaaaaaaaaaaaaaaaaaaaaaaaaaaaaaaaaaaaaaaaaaaaaaaaaaaaaaaaaaaaaaaaaaaaaaaaaaaaaa

SEQ ID NO: 2732 - RNA, 5419 nt, synthetic construct
  source 1..5419: mol_type = other RNA
aggaaataagagagaaaagaagagtaagaagaaatataagagccaccatggcccctaagaagaagcgtaaagtgagccgggtgaacggcagcggcagcggcggcggcatgaaccacgaccaggagttcgacccccctaaggtgtaccctcccgtccccgccgagaagagaaagcccatccgggtcctgagcctgttcgatggcatcgccaccggtctgctggtgctgaaggacctgggcatccaggtggataggtacattgcctccgaggtgtgcgaggactccatcaccgtgggaatggtgcgtcatcagggcaagatcatgtacgtgggcgacgtgcggagcgtgacacagaagcatatccaggagtggggccctttcgacctggtgatcggcggcagcccttgcaatgacctgagcatcgtgaacccagcccggaagggcctgtacgagggaaccggcagactgttcttcgagttttacagactgctgcacgacgcccggcctaaggaaggcgacgaccggcccttcttttggctgttcgagaatgtggtggccatgggagtcagcgacaagcgggatattagccggttcctggagagcaaccccgtgatgatcgatgccaaggaagtgagcgccgcccaccgggccagatacttctggggcaatctgcctggcatgaacagacccctggccagcaccgtgaacgacaagctggagctgcaggagtgcctggagcacggccggatcgccaagttcagcaaggtgagaaccatcaccacccgaagcaacagcatcaaacaaggcaaggaccagcactttcctgtgttcatgaacgagaaggaggacatcctgtggtgtaccgagatggagagagtgttcgggttcccagtccactacacagatgtcagcaacatgtctagactggccagacagagactgctgggaagaagctggtccgtccctgtgatcagacacctgttcgcccctctgaaggagtacttcgcctgcgtgagcagcggcaacagcaacgccaacagccggggccccagcttctctagcggcctggtgccactgtccctgagagggagccacatgggccccatggagatctacaaaaccgtgagcgcctggaagcggcagcctgtgcgcgtgctgagcctgtttcggaatatcgataaagtcctgaaaagcctgggattcctggagagcggctctggctccggcggtggcaccctgaagtacgtggaggatgtgacaaacgtggtcagacgggatgtggagaagtggggccccttcgatctggtgtacggcagcacccaacccctgggcagctcttgtgaccggtgccctggctggtacatgtttcagttccaccggatcctgcagtacgccctgccgagacaggagtcccagcggccattcttttggattttcatggacaacttgctgctgaccgaggatgaccaggaaactaccactcggttcctgcagaccgaagccgtgaccctgcaggacgtgagaggccgggactaccagaacgccatgcgggtgtggtccaacatccctggactgaaaagcaagcacgcacctctgacccctaaagaagaggagtacctgcaggcccaggtgcggagcagaagcaagctggacgcccctaaggtggatctgctggtgaagaattgcctcctgcccctgagagagtacttcaagtatttcagccagaatagtctgcccctgggcggcccaagcagcggcgcccctcctcccagcggcggcagcccagccggctccccaacctctaccgaggagggcacctctgagtccgccacccccgagagcggccctggcacctccaccgagcccagcgagggcagcgcacccggcagccctgccggcagccccacctccacagaggagggaaccagcaccgagcccagcgaaggcagcgccccaggcaccagcaccgagcctagtgagggcggctctggcggcggcagcgcccaggagattaaacggatcaacaagatcagaagaagacttgtgaaagacagcaacaccaagaaggccggcaagacaggccccatgaaaaccctgctggttagagtgatgacacccgatctgagagagcggctggaaaacctgagaaagaagcctgaaaatatcccccagcccatcagcaatacatctagagccaacctgaataagctgctgaccgattacaccgaaatgaagaaggcgatcctgcatgtgtactgggaagagttccagaaggaccctgtgggcctgatgagccgggtggcccagcctgccagcaagaagatcgatcagaacaagctgaaacctgagatggacgagaagggcaacctgaccaccgccggctttgcctgctctcagtgtggccagcccctgttcgtgtacaagctggagcaggtgtctgagaagggcaaggcttacaccaactacttcggacggtgcaatgtggccgagcacgaaaagctgatcctgctggcccagctgaagcccgagaaggatagcgacgaagccgtgacatatagcctgggaaagtttgggcagagggccctggatttctacagcattcatgtgaccaaggagtccacccaccccgtgaagcccctggcccagatcgccggaaacagatacgcctccggacctgtgggaaaggccctgagcgacgcatgtatgggcacaatcgcctccttcctgtctaagtaccaggacatcatcatcgaacaccagaaggtggtgaagggcaaccagaagagactggagagcctgcgggagctggccggcaaggaaaacctggaataccctagcgtgaccctgccacctcagcctcacaccaaggagggcgttgatgcctacaacgaagtgatcgcccgggtgcgaatgtgggtgaacctgaacctgtggcagaagctgaagctaagcagagatgatgccaagcctctgctgagactgaagggattcccttcctttcctctggtcgagagacaggccaacgaagtggactggtgggacatggtgtgtaacgtgaagaagctgatcaacgagaaaaaggaggatggcaaggtgttttggcagaatctggctggctacaagagacaggaagccctgagaccatacctgagcagcgaggaagatcggaagaagggaaagaaattcgctcggtaccagctgggcgacctgctgctgcacctggaaaagaagcacggcgaggactggggaaaggtgtacgacgaggcctgggagcggattgacaagaaagtggaaggcctgagcaagcacatcaagctggaagaggaacggagaagcgaggacgcccagagcaaggccgccctgaccgactggctgcgggctaaggccagcttcgtgatcgagggcctgaaggaggccgacaaggacgagttctgcagatgcgagctgaagctgcagaagtggtacggggacctgcggggaaagcccttcgccatcgaagccgagaacagcatcctggacatcagcggcttcagcaagcagtacaactgtgccttcatctggcagaaggacggcgtgaagaagctgaacctgtacctgatcatcaactacttcaagggcggcaagctgcggttcaagaagatcaaacctgaagccttcgaagccaacagattctacaccgtgatcaacaaaaagagcggcgagatcgtgcccatggaggtgaacttcaacttcgacgaccccaacctgatcatcctgcctctggcctttggcaagagacagggcagagaattcatctggaacgacctgctgtccctggaaaccggcagcctgaagctggccaacggaagagtgatcgagaagacactgtacaacagaagaacccggcaggatgagcctgccctgttcgtggccctgaccttcgagcggcgggaggtcctggactcctccaatatcaaaccaatgaacctgatcggcgtggcaagaggcgaaaacatccccgccgtgatcgccctgaccgaccccgagggctgcccactgagccggtttaaggatagcctgggaaacccaacccacatcctgagaatcggcgagagctataaggagaagcagcggaccatccaggccaagaaggaggtggagcagcggagagccggcggctacagccggaagtacgccagcaaagccaagaatctggcagacgatatggtgagaaacaccgctagagatctgctgtactacgccgtgacccaggatgccatgctgatcttcgccaacctgagccggggcttcggccggcagggcaagcggaccttcatggccgagagacagtacacacggatggaggactggctgaccgccaagctggcctacgagggcctgagcaagacctacctgtccaagacactggcccagtacacctccaagacatgcagcaactgtgggtttaccatcaccagcgccgactacgacagggtgctggagaagctgaagaagacagcaacaggctggatgaccacaattaacggcaaggagctgaaggtggagggccagattacctactacaacagatacaagagacagaacgtagtcaaggacctgtccgtcgagctggatagactgagcgaagaatctgtgaacaacgacatctcctcctggacaaagggcagaagcggagaagctctgagcctcctgaagaaaagattctcccatagacccgtgcaggagaagttcgtgtgcctgaactgcggcttcgagacacacgcagccgagcaagccgccctgaacatcgccagatcctggctgttcctgcggagccaggagtacaagaaataccagacaaacaagacaaccggcaacaccgataagagagccttcgtcgagacctggcagtccttttaccggaagaagcttaaggaggtgtggaaacctgccgtgcggtctggcggatctggcggaggctccacaagcgcccaggagagcgtgatgttcagcgacgtgagcatcgacttcagccaggaggagtgggagtgcctgaacgacgaccagagggacctgtacagggacgtgatgctggagaactacagccacctggtgagcatgggccacagcgtgagcaagcccgacgtgatcagcttcctggagcagggcaaggagccctggctggtggacagggagctgaccagggaccagtggcccgtgctggagagcaggaccagccccaagaaaaagagaaaagtctaagctgccttctgcggggcttgccttctggccatgcccttcttctctcccttgcacctgtacctcttggtctttgaataaagcctgagtaggaaggctagcaaaaaaaaaaaaaaaaaaaaaaaaaaaaaaaaaaaaaaaaaaaaaaaaaaaaaaaaaaaaaaaaaaaaaaaaaaaaaaaa

SEQ ID NO: 2733 - RNA, 5419 nt, synthetic construct
  source 1..5419: mol_type = other RNA
aggaaataagagagaaaagaagagtaagaagaaatataagagccaccatggcccctaagaagaagcgtaaagtgagccgggtgaacggcagcggcagcggcggcggcatgaaccacgaccaggagttcgacccccctaaggtgtaccctcccgtccccgccgagaagagaaagcccatccgggtcctgagcctgttcgatggcatcgccaccggtctgctggtgctgaaggacctgggcatccaggtggataggtacattgcctccgaggtgtgcgaggactccatcaccgtgggaatggtgcgtcatcagggcaagatcatgtacgtgggcgacgtgcggagcgtgacacagaagcatatccaggagtggggccctttcgacctggtgatcggcggcagcccttgcaatgacctgagcatcgtgaacccagcccggaagggcctgtacgagggaaccggcagactgttcttcgagttttacagactgctgcacgacgcccggcctaaggaaggcgacgaccggcccttcttttggctgttcgagaatgtggtggccatgggagtcagcgacaagcgggatattagccggttcctggagagcaaccccgtgatgatcgatgccaaggaagtgagcgccgcccaccgggccagatacttctggggcaatctgcctggcatgaacagacccctggccagcaccgtgaacgacaagctggagctgcaggagtgcctggagcacggccggatcgccaagttcagcaaggtgagaaccatcaccacccgaagcaacagcatcaaacaaggcaaggaccagcactttcctgtgttcatgaacgagaaggaggacatcctgtggtgtaccgagatggagagagtgttcgggttcccagtccactacacagatgtcagcaacatgtctagactggccagacagagactgctgggaagaagctggtccgtccctgtgatcagacacctgttcgcccctctgaaggagtacttcgcctgcgtgagcagcggcaacagcaacgccaacagccggggccccagcttctctagcggcctggtgccactgtccctgagagggagccacatgggccccatggagatctacaaaaccgtgagcgcctggaagcggcagcctgtgcgcgtgctgagcctgtttcggaatatcgataaagtcctgaaaagcctgggattcctggagagcggctctggctccggcggtggcaccctgaagtacgtggaggatgtgacaaacgtggtcagacgggatgtggagaagtggggccccttcgatctggtgtacggcagcacccaacccctgggcagctcttgtgaccggtgccctggctggtacatgtttcagttccaccggatcctgcagtacgccctgccgagacaggagtcccagcggccattcttttggattttcatggacaacttgctgctgaccgaggatgaccaggaaactaccactcggttcctgcagaccgaagccgtgaccctgcaggacgtgagaggccgggactaccagaacgccatgcgggtgtggtccaacatccctggactgaaaagcaagcacgcacctctgacccctaaagaagaggagtacctgcaggcccaggtgcggagcagaagcaagctggacgcccctaaggtggatctgctggtgaagaattgcctcctgcccctgagagagtacttcaagtatttcagccagaatagtctgcccctgggcggcccaagcagcggcgcccctcctcccagcggcggcagcccagccggctccccaacctctaccgaggagggcacctctgagtccgccacccccgagagcggccctggcacctccaccgagcccagcgagggcagcgcacccggcagccctgccggcagccccacctccacagaggagggaaccagcaccgagcccagcgaaggcagcgccccaggcaccagcaccgagcctagtgagggcggctctggcggcggcagcgcccaggagattaaacggatcaacaagatcagaagaagacttgtgaaagacagcaacaccaagaaggccggcaagacaggccccatgaaaaccctgctggttagagtgatgacacccgatctgagagagcggctggaaaacctgagaaagaagcctgaaaatatcccccagcccatcagcaatacatctagagccaacctgaataagctgctgaccgattacaccgaaatgaagaaggcgatcctgcatgtgtactgggaagagttccagaaggaccctgtgggcctgatgagccgggtggcccagcctgccagcaagaagatcgatcagaacaagctgaaacctgagatggacgagaagggcaacctgaccaccgccggctttgcctgctctcagtgtggccagcccctgttcgtgtacaagctggagcaggtgtctgagaagggcaaggcttacaccaactacttcggacggtgcaatgtggccgagcacgaaaagctgatcctgctggcccagctgaagcccgagaaggatagcgacgaagccgtgacatatagcctgggaaagtttgggcagagggccctggatttctacagcattcatgtgaccaaggagtccacccaccccgtgaagcccctggcccagatcgccggaaacagatacgcctccggacctgtgggaaaggccctgagcgacgcatgtatgggcacaatcgcctccttcctgtctaagtaccaggacatcatcatcgaacaccagaaggtggtgaagggcaaccagaagagactggagagcctgcgggagctggccggcaaggaaaacctggaataccctagcgtgaccctgccacctcagcctcacaccaaggagggcgttgatgcctacaacgaagtgatcgcccgggtgcgaatgtgggtgaacctgaacctgtggcagaagctgaagctaagcagagatgatgccaagcctctgctgagactgaagggattcccttcctttcctctggtcgagagacaggccaacgaagtggactggtgggacatggtgtgtaacgtgaagaagctgatcaacgagaaaaaggaggatggcaaggtgttttggcagaatctggctggctacaagagacaggaagccctgagaccatacctgagcagcgaggaagatcggaagaagggaaagaaattcgctcggtaccagctgggcgacctgctgctgcacctggaaaagaagcacggcgaggactggggaaaggtgtacgacgaggcctgggagcggattgacaagaaagtggaaggcctgagcaagcacatcaagctggaagaggaacggagaagcgaggacgcccagagcaaggccgccctgaccgactggctgcgggctaaggccagcttcgtgatcgagggcctgaaggaggccgacaaggacgagttctgcagatgcgagctgaagctgcagaagtggtacggggacctgcggggaaagcccttcgccatcgaagccgagaacagcatcctggacatcagcggcttcagcaagcagtacaactgtgccttcatctggcagaaggacggcgtgaagaagctgaacctgtacctgatcatcaactacttcaagggcggcaagctgcggttcaagaagatcaaacctgaagccttcgaagccaacagattctacaccgtgatcaacaaaaagagcggcgagatcgtgcccatggaggtgaacttcaacttcgacgaccccaacctgatcatcctgcctctggcctttggcaagagacagggcagagaattcatctggaacgacctgctgtccctggaaaccggcagcctgaagctggccaacggaagagtgatcgagaagacactgtacaacagaagaacccggcaggatgagcctgccctgttcgtggccctgaccttcgagcggcgggaggtcctggactcctccaatatcaaaccaatgaacctgatcggcgtggcaagaggcgaaaacatccccgccgtgatcgccctgaccgaccccgagggctgcccactgagccggtttaaggatagcctgggaaacccaacccacatcctgagaatcggcgagagctataaggagaagcagcggaccatccaggccaagaaggaggtggagcagcggagagccggcggctacagccggaagtacgccagcaaagccaagaatctggcagacgatatggtgagaaacaccgctagagatctgctgtactacgccgtgacccaggatgccatgctgatcttcgccaacctgagccggggcttcggccggcagggcaagcggaccttcatggccgagagacagtacacacggatggaggactggctgaccgccaagctggcctacgagggcctgagcaagacctacctgtccaagacactggcccagtacacctccaagacatgcagcaactgtgggtttaccatcaccagcgccgactacgacagggtgctggagaagctgaagaagacagcaacaggctggatgaccacaattaacggcaaggagctgaaggtggagggccagattacctactacaacagatacaagagacagaacgtagtcaaggacctgtccgtcgagctggatagactgagcgaagaatctgtgaacaacgacatctcctcctggacaaagggcagaagcggagaagctctgagcctcctgaagaaaagattctcccatagacccgtgcaggagaagttcgtgtgcctgaactgcggcttcgagacacacgcagccgagcaagccgccctgaacatcgccagatcctggctgttcctgcggagccaggagtacaagaaataccagacaaacaagacaaccggcaacaccgataagagagccttcgtcgagacctggcagtccttttaccggaagaagcttaaggaggtgtggaaacctgccgtgcggtctggcggatctggcggaggctccacaagcatgatcgagtaccagatccccgtgagcttcaaggacgtggtggtgggcttcacccaggaggagtggcaccagctgagccccgcccagagggccctgtacagggacgtgatgctggagacctacagcaacctggtgagcgtgggctacgagggcaccaagcccgacgtgatcctgaggctggagcaggaggaggccccctggatcggcgaggccgcctgcctgggctgccactgctggggcatcaccagccccaagaaaaagagaaaagtctaagctgccttctgcggggcttgccttctggccatgcccttcttctctcccttgcacctgtacctcttggtctttgaataaagcctgagtaggaaggctagcaaaaaaaaaaaaaaaaaaaaaaaaaaaaaaaaaaaaaaaaaaaaaaaaaaaaaaaaaaaaaaaaaaaaaaaaaaaaaaaa

SEQ ID NO: 2734 - RNA, 5419 nt, synthetic construct
  source 1..5419: mol_type = other RNA
aggaaataagagagaaaagaagagtaagaagaaatataagagccaccatggcccctaagaagaagcgtaaagtgagccgggtgaacggcagcggcagcggcggcggcatgaaccacgaccaggagttcgacccccctaaggtgtaccctcccgtccccgccgagaagagaaagcccatccgggtcctgagcctgttcgatggcatcgccaccggtctgctggtgctgaaggacctgggcatccaggtggataggtacattgcctccgaggtgtgcgaggactccatcaccgtgggaatggtgcgtcatcagggcaagatcatgtacgtgggcgacgtgcggagcgtgacacagaagcatatccaggagtggggccctttcgacctggtgatcggcggcagcccttgcaatgacctgagcatcgtgaacccagcccggaagggcctgtacgagggaaccggcagactgttcttcgagttttacagactgctgcacgacgcccggcctaaggaaggcgacgaccggcccttcttttggctgttcgagaatgtggtggccatgggagtcagcgacaagcgggatattagccggttcctggagagcaaccccgtgatgatcgatgccaaggaagtgagcgccgcccaccgggccagatacttctggggcaatctgcctggcatgaacagacccctggccagcaccgtgaacgacaagctggagctgcaggagtgcctggagcacggccggatcgccaagttcagcaaggtgagaaccatcaccacccgaagcaacagcatcaaacaaggcaaggaccagcactttcctgtgttcatgaacgagaaggaggacatcctgtggtgtaccgagatggagagagtgttcgggttcccagtccactacacagatgtcagcaacatgtctagactggccagacagagactgctgggaagaagctggtccgtccctgtgatcagacacctgttcgcccctctgaaggagtacttcgcctgcgtgagcagcggcaacagcaacgccaacagccggggccccagcttctctagcggcctggtgccactgtccctgagagggagccacatgggccccatggagatctacaaaaccgtgagcgcctggaagcggcagcctgtgcgcgtgctgagcctgtttcggaatatcgataaagtcctgaaaagcctgggattcctggagagcggctctggctccggcggtggcaccctgaagtacgtggaggatgtgacaaacgtggtcagacgggatgtggagaagtggggccccttcgatctggtgtacggcagcacccaacccctgggcagctcttgtgaccggtgccctggctggtacatgtttcagttccaccggatcctgcagtacgccctgccgagacaggagtcccagcggccattcttttggattttcatggacaacttgctgctgaccgaggatgaccaggaaactaccactcggttcctgcagaccgaagccgtgaccctgcaggacgtgagaggccgggactaccagaacgccatgcgggtgtggtccaacatccctggactgaaaagcaagcacgcacctctgacccctaaagaagaggagtacctgcaggcccaggtgcggagcagaagcaagctggacgcccctaaggtggatctgctggtgaagaattgcctcctgcccctgagagagtacttcaagtatttcagccagaatagtctgcccctgggcggcccaagcagcggcgcccctcctcccagcggcggcagcccagccggctccccaacctctaccgaggagggcacctctgagtccgccacccccgagagcggccctggcacctccaccgagcccagcgagggcagcgcacccggcagccctgccggcagccccacctccacagaggagggaaccagcaccgagcccagcgaaggcagcgccccaggcaccagcaccgagcctagtgagggcggctctggcggcggcagcgcccaggagattaaacggatcaacaagatcagaagaagacttgtgaaagacagcaacaccaagaaggccggcaagacaggccccatgaaaaccctgctggttagagtgatgacacccgatctgagagagcggctggaaaacctgagaaagaagcctgaaaatatcccccagcccatcagcaatacatctagagccaacctgaataagctgctgaccgattacaccgaaatgaagaaggcgatcctgcatgtgtactgggaagagttccagaaggaccctgtgggcctgatgagccgggtggcccagcctgccagcaagaagatcgatcagaacaagctgaaacctgagatggacgagaagggcaacctgaccaccgccggctttgcctgctctcagtgtggccagcccctgttcgtgtacaagctggagcaggtgtctgagaagggcaaggcttacaccaactacttcggacggtgcaatgtggccgagcacgaaaagctgatcctgctggcccagctgaagcccgagaaggatagcgacgaagccgtgacatatagcctgggaaagtttgggcagagggccctggatttctacagcattcatgtgaccaaggagtccacccaccccgtgaagcccctggcccagatcgccggaaacagatacgcctccggacctgtgggaaaggccctgagcgacgcatgtatgggcacaatcgcctccttcctgtctaagtaccaggacatcatcatcgaacaccagaaggtggtgaagggcaaccagaagagactggagagcctgcgggagctggccggcaaggaaaacctggaataccctagcgtgaccctgccacctcagcctcacaccaaggagggcgttgatgcctacaacgaagtgatcgcccgggtgcgaatgtgggtgaacctgaacctgtggcagaagctgaagctaagcagagatgatgccaagcctctgctgagactgaagggattcccttcctttcctctggtcgagagacaggccaacgaagtggactggtgggacatggtgtgtaacgtgaagaagctgatcaacgagaaaaaggaggatggcaaggtgttttggcagaatctggctggctacaagagacaggaagccctgagaccatacctgagcagcgaggaagatcggaagaagggaaagaaattcgctcggtaccagctgggcgacctgctgctgcacctggaaaagaagcacggcgaggactggggaaaggtgtacgacgaggcctgggagcggattgacaagaaagtggaaggcctgagcaagcacatcaagctggaagaggaacggagaagcgaggacgcccagagcaaggccgccctgaccgactggctgcgggctaaggccagcttcgtgatcgagggcctgaaggaggccgacaaggacgagttctgcagatgcgagctgaagctgcagaagtggtacggggacctgcggggaaagcccttcgccatcgaagccgagaacagcatcctggacatcagcggcttcagcaagcagtacaactgtgccttcatctggcagaaggacggcgtgaagaagctgaacctgtacctgatcatcaactacttcaagggcggcaagctgcggttcaagaagatcaaacctgaagccttcgaagccaacagattctacaccgtgatcaacaaaaagagcggcgagatcgtgcccatggaggtgaacttcaacttcgacgaccccaacctgatcatcctgcctctggcctttggcaagagacagggcagagaattcatctggaacgacctgctgtccctggaaaccggcagcctgaagctggccaacggaagagtgatcgagaagacactgtacaacagaagaacccggcaggatgagcctgccctgttcgtggccctgaccttcgagcggcgggaggtcctggactcctccaatatcaaaccaatgaacctgatcggcgtggcaagaggcgaaaacatccccgccgtgatcgccctgaccgaccccgagggctgcccactgagccggtttaaggatagcctgggaaacccaacccacatcctgagaatcggcgagagctataaggagaagcagcggaccatccaggccaagaaggaggtggagcagcggagagccggcggctacagccggaagtacgccagcaaagccaagaatctggcagacgatatggtgagaaacaccgctagagatctgctgtactacgccgtgacccaggatgccatgctgatcttcgccaacctgagccggggcttcggccggcagggcaagcggaccttcatggccgagagacagtacacacggatggaggactggctgaccgccaagctggcctacgagggcctgagcaagacctacctgtccaagacactggcccagtacacctccaagacatgcagcaactgtgggtttaccatcaccagcgccgactacgacagggtgctggagaagctgaagaagacagcaacaggctggatgaccacaattaacggcaaggagctgaaggtggagggccagattacctactacaacagatacaagagacagaacgtagtcaaggacctgtccgtcgagctggatagactgagcgaagaatctgtgaacaacgacatctcctcctggacaaagggcagaagcggagaagctctgagcctcctgaagaaaagattctcccatagacccgtgcaggagaagttcgtgtgcctgaactgcggcttcgagacacacgcagccgagcaagccgccctgaacatcgccagatcctggctgttcctgcggagccaggagtacaagaaataccagacaaacaagacaaccggcaacaccgataagagagccttcgtcgagacctggcagtccttttaccggaagaagcttaaggaggtgtggaaacctgccgtgcggtctggcggatctggcggaggctccacaagcgtgcaggagcccgtgaccttcaaggacgtggccgtggacttcacccaggaggagtggggccagctggacctggtgcagaggaccctgtacagggacgtgatgctggagacctacggccacctgctgagcgtgggcaaccagatcgccaagcccgaggtgatcagcctgctggagcagggcgaggagccctggagcgtggagcaggcctgcccccagaggacctgccccgagtgggtgaggaacaccagccccaagaaaaagagaaaagtctaagctgccttctgcggggcttgccttctggccatgcccttcttctctcccttgcacctgtacctcttggtctttgaataaagcctgagtaggaaggctagcaaaaaaaaaaaaaaaaaaaaaaaaaaaaaaaaaaaaaaaaaaaaaaaaaaaaaaaaaaaaaaaaaaaaaaaaaaaaaaaa

SEQ ID NO: 2735 - RNA, 5419 nt, synthetic construct
  source 1..5419: mol_type = other RNA
aggaaataagagagaaaagaagagtaagaagaaatataagagccaccatggcccctaagaagaagcgtaaagtgagccgggtgaacggcagcggcagcggcggcggcatgaaccacgaccaggagttcgacccccctaaggtgtaccctcccgtccccgccgagaagagaaagcccatccgggtcctgagcctgttcgatggcatcgccaccggtctgctggtgctgaaggacctgggcatccaggtggataggtacattgcctccgaggtgtgcgaggactccatcaccgtgggaatggtgcgtcatcagggcaagatcatgtacgtgggcgacgtgcggagcgtgacacagaagcatatccaggagtggggccctttcgacctggtgatcggcggcagcccttgcaatgacctgagcatcgtgaacccagcccggaagggcctgtacgagggaaccggcagactgttcttcgagttttacagactgctgcacgacgcccggcctaaggaaggcgacgaccggcccttcttttggctgttcgagaatgtggtggccatgggagtcagcgacaagcgggatattagccggttcctggagagcaaccccgtgatgatcgatgccaaggaagtgagcgccgcccaccgggccagatacttctggggcaatctgcctggcatgaacagacccctggccagcaccgtgaacgacaagctggagctgcaggagtgcctggagcacggccggatcgccaagttcagcaaggtgagaaccatcaccacccgaagcaacagcatcaaacaaggcaaggaccagcactttcctgtgttcatgaacgagaaggaggacatcctgtggtgtaccgagatggagagagtgttcgggttcccagtccactacacagatgtcagcaacatgtctagactggccagacagagactgctgggaagaagctggtccgtccctgtgatcagacacctgttcgcccctctgaaggagtacttcgcctgcgtgagcagcggcaacagcaacgccaacagccggggccccagcttctctagcggcctggtgccactgtccctgagagggagccacatgggccccatggagatctacaaaaccgtgagcgcctggaagcggcagcctgtgcgcgtgctgagcctgtttcggaatatcgataaagtcctgaaaagcctgggattcctggagagcggctctggctccggcggtggcaccctgaagtacgtggaggatgtgacaaacgtggtcagacgggatgtggagaagtggggccccttcgatctggtgtacggcagcacccaacccctgggcagctcttgtgaccggtgccctggctggtacatgtttcagttccaccggatcctgcagtacgccctgccgagacaggagtcccagcggccattcttttggattttcatggacaacttgctgctgaccgaggatgaccaggaaactaccactcggttcctgcagaccgaagccgtgaccctgcaggacgtgagaggccgggactaccagaacgccatgcgggtgtggtccaacatccctggactgaaaagcaagcacgcacctctgacccctaaagaagaggagtacctgcaggcccaggtgcggagcagaagcaagctggacgcccctaaggtggatctgctggtgaagaattgcctcctgcccctgagagagtacttcaagtatttcagccagaatagtctgcccctgggcggcccaagcagcggcgcccctcctcccagcggcggcagcccagccggctccccaacctctaccgaggagggcacctctgagtccgccacccccgagagcggccctggcacctccaccgagcccagcgagggcagcgcacccggcagccctgccggcagccccacctccacagaggagggaaccagcaccgagcccagcgaaggcagcgccccaggcaccagcaccgagcctagtgagggcggctctggcggcggcagcgcccaggagattaaacggatcaacaagatcagaagaagacttgtgaaagacagcaacaccaagaaggccggcaagacaggccccatgaaaaccctgctggttagagtgatgacacccgatctgagagagcggctggaaaacctgagaaagaagcctgaaaatatcccccagcccatcagcaatacatctagagccaacctgaataagctgctgaccgattacaccgaaatgaagaaggcgatcctgcatgtgtactgggaagagttccagaaggaccctgtgggcctgatgagccgggtggcccagcctgccagcaagaagatcgatcagaacaagctgaaacctgagatggacgagaagggcaacctgaccaccgccggctttgcctgctctcagtgtggccagcccctgttcgtgtacaagctggagcaggtgtctgagaagggcaaggcttacaccaactacttcggacggtgcaatgtggccgagcacgaaaagctgatcctgctggcccagctgaagcccgagaaggatagcgacgaagccgtgacatatagcctgggaaagtttgggcagagggccctggatttctacagcattcatgtgaccaaggagtccacccaccccgtgaagcccctggcccagatcgccggaaacagatacgcctccggacctgtgggaaaggccctgagcgacgcatgtatgggcacaatcgcctccttcctgtctaagtaccaggacatcatcatcgaacaccagaaggtggtgaagggcaaccagaagagactggagagcctgcgggagctggccggcaaggaaaacctggaataccctagcgtgaccctgccacctcagcctcacaccaaggagggcgttgatgcctacaacgaagtgatcgcccgggtgcgaatgtgggtgaacctgaacctgtggcagaagctgaagctaagcagagatgatgccaagcctctgctgagactgaagggattcccttcctttcctctggtcgagagacaggccaacgaagtggactggtgggacatggtgtgtaacgtgaagaagctgatcaacgagaaaaaggaggatggcaaggtgttttggcagaatctggctggctacaagagacaggaagccctgagaccatacctgagcagcgaggaagatcggaagaagggaaagaaattcgctcggtaccagctgggcgacctgctgctgcacctggaaaagaagcacggcgaggactggggaaaggtgtacgacgaggcctgggagcggattgacaagaaagtggaaggcctgagcaagcacatcaagctggaagaggaacggagaagcgaggacgcccagagcaaggccgccctgaccgactggctgcgggctaaggccagcttcgtgatcgagggcctgaaggaggccgacaaggacgagttctgcagatgcgagctgaagctgcagaagtggtacggggacctgcggggaaagcccttcgccatcgaagccgagaacagcatcctggacatcagcggcttcagcaagcagtacaactgtgccttcatctggcagaaggacggcgtgaagaagctgaacctgtacctgatcatcaactacttcaagggcggcaagctgcggttcaagaagatcaaacctgaagccttcgaagccaacagattctacaccgtgatcaacaaaaagagcggcgagatcgtgcccatggaggtgaacttcaacttcgacgaccccaacctgatcatcctgcctctggcctttggcaagagacagggcagagaattcatctggaacgacctgctgtccctggaaaccggcagcctgaagctggccaacggaagagtgatcgagaagacactgtacaacagaagaacccggcaggatgagcctgccctgttcgtggccctgaccttcgagcggcgggaggtcctggactcctccaatatcaaaccaatgaacctgatcggcgtggcaagaggcgaaaacatccccgccgtgatcgccctgaccgaccccgagggctgcccactgagccggtttaaggatagcctgggaaacccaacccacatcctgagaatcggcgagagctataaggagaagcagcggaccatccaggccaagaaggaggtggagcagcggagagccggcggctacagccggaagtacgccagcaaagccaagaatctggcagacgatatggtgagaaacaccgctagagatctgctgtactacgccgtgacccaggatgccatgctgatcttcgccaacctgagccggggcttcggccggcagggcaagcggaccttcatggccgagagacagtacacacggatggaggactggctgaccgccaagctggcctacgagggcctgagcaagacctacctgtccaagacactggcccagtacacctccaagacatgcagcaactgtgggtttaccatcaccagcgccgactacgacagggtgctggagaagctgaagaagacagcaacaggctggatgaccacaattaacggcaaggagctgaaggtggagggccagattacctactacaacagatacaagagacagaacgtagtcaaggacctgtccgtcgagctggatagactgagcgaagaatctgtgaacaacgacatctcctcctggacaaagggcagaagcggagaagctctgagcctcctgaagaaaagattctcccatagacccgtgcaggagaagttcgtgtgcctgaactgcggcttcgagacacacgcagccgagcaagccgccctgaacatcgccagatcctggctgttcctgcggagccaggagtacaagaaataccagacaaacaagacaaccggcaacaccgataagagagccttcgtcgagacctggcagtccttttaccggaagaagcttaaggaggtgtggaaacctgccgtgcggtctggcggatctggcggaggctccacaagcatgatcaactaccagacccccgtgagcttcagggacgtggtggtgggcttcacccaggaggagtggcacaggctgaaccccacccagagggccctgtacagggacgtgatgctggagacctacagcaacctggtgagcgtgggctacgagggcaccaagcccgacgtgatcctgaggctggagcaggaggaggccccctggatcggcgaggccgcctgcctgggctgccactgctggggcatcaccagccccaagaaaaagagaaaagtctaagctgccttctgcggggcttgccttctggccatgcccttcttctctcccttgcacctgtacctcttggtctttgaataaagcctgagtaggaaggctagcaaaaaaaaaaaaaaaaaaaaaaaaaaaaaaaaaaaaaaaaaaaaaaaaaaaaaaaaaaaaaaaaaaaaaaaaaaaaaaaa

SEQ ID NO: 2736 - RNA, 5419 nt, synthetic construct
  source 1..5419: mol_type = other RNA
aggaaataagagagaaaagaagagtaagaagaaatataagagccaccatggcccctaagaagaagcgtaaagtgagccgggtgaacggcagcggcagcggcggcggcatgaaccacgaccaggagttcgacccccctaaggtgtaccctcccgtccccgccgagaagagaaagcccatccgggtcctgagcctgttcgatggcatcgccaccggtctgctggtgctgaaggacctgggcatccaggtggataggtacattgcctccgaggtgtgcgaggactccatcaccgtgggaatggtgcgtcatcagggcaagatcatgtacgtgggcgacgtgcggagcgtgacacagaagcatatccaggagtggggccctttcgacctggtgatcggcggcagcccttgcaatgacctgagcatcgtgaacccagcccggaagggcctgtacgagggaaccggcagactgttcttcgagttttacagactgctgcacgacgcccggcctaaggaaggcgacgaccggcccttcttttggctgttcgagaatgtggtggccatgggagtcagcgacaagcgggatattagccggttcctggagagcaaccccgtgatgatcgatgccaaggaagtgagcgccgcccaccgggccagatacttctggggcaatctgcctggcatgaacagacccctggccagcaccgtgaacgacaagctggagctgcaggagtgcctggagcacggccggatcgccaagttcagcaaggtgagaaccatcaccacccgaagcaacagcatcaaacaaggcaaggaccagcactttcctgtgttcatgaacgagaaggaggacatcctgtggtgtaccgagatggagagagtgttcgggttcccagtccactacacagatgtcagcaacatgtctagactggccagacagagactgctgggaagaagctggtccgtccctgtgatcagacacctgttcgcccctctgaaggagtacttcgcctgcgtgagcagcggcaacagcaacgccaacagccggggccccagcttctctagcggcctggtgccactgtccctgagagggagccacatgggccccatggagatctacaaaaccgtgagcgcctggaagcggcagcctgtgcgcgtgctgagcctgtttcggaatatcgataaagtcctgaaaagcctgggattcctggagagcggctctggctccggcggtggcaccctgaagtacgtggaggatgtgacaaacgtggtcagacgggatgtggagaagtggggccccttcgatctggtgtacggcagcacccaacccctgggcagctcttgtgaccggtgccctggctggtacatgtttcagttccaccggatcctgcagtacgccctgccgagacaggagtcccagcggccattcttttggattttcatggacaacttgctgctgaccgaggatgaccaggaaactaccactcggttcctgcagaccgaagccgtgaccctgcaggacgtgagaggccgggactaccagaacgccatgcgggtgtggtccaacatccctggactgaaaagcaagcacgcacctctgacccctaaagaagaggagtacctgcaggcccaggtgcggagcagaagcaagctggacgcccctaaggtggatctgctggtgaagaattgcctcctgcccctgagagagtacttcaagtatttcagccagaatagtctgcccctgggcggcccaagcagcggcgcccctcctcccagcggcggcagcccagccggctccccaacctctaccgaggagggcacctctgagtccgccacccccgagagcggccctggcacctccaccgagcccagcgagggcagcgcacccggcagccctgccggcagccccacctccacagaggagggaaccagcaccgagcccagcgaaggcagcgccccaggcaccagcaccgagcctagtgagggcggctctggcggcggcagcgcccaggagattaaacggatcaacaagatcagaagaagacttgtgaaagacagcaacaccaagaaggccggcaagacaggccccatgaaaaccctgctggttagagtgatgacacccgatctgagagagcggctggaaaacctgagaaagaagcctgaaaatatcccccagcccatcagcaatacatctagagccaacctgaataagctgctgaccgattacaccgaaatgaagaaggcgatcctgcatgtgtactgggaagagttccagaaggaccctgtgggcctgatgagccgggtggcccagcctgccagcaagaagatcgatcagaacaagctgaaacctgagatggacgagaagggcaacctgaccaccgccggctttgcctgctctcagtgtggccagcccctgttcgtgtacaagctggagcaggtgtctgagaagggcaaggcttacaccaactacttcggacggtgcaatgtggccgagcacgaaaagctgatcctgctggcccagctgaagcccgagaaggatagcgacgaagccgtgacatatagcctgggaaagtttgggcagagggccctggatttctacagcattcatgtgaccaaggagtccacccaccccgtgaagcccctggcccagatcgccggaaacagatacgcctccggacctgtgggaaaggccctgagcgacgcatgtatgggcacaatcgcctccttcctgtctaagtaccaggacatcatcatcgaacaccagaaggtggtgaagggcaaccagaagagactggagagcctgcgggagctggccggcaaggaaaacctggaataccctagcgtgaccctgccacctcagcctcacaccaaggagggcgttgatgcctacaacgaagtgatcgcccgggtgcgaatgtgggtgaacctgaacctgtggcagaagctgaagctaagcagagatgatgccaagcctctgctgagactgaagggattcccttcctttcctctggtcgagagacaggccaacgaagtggactggtgggacatggtgtgtaacgtgaagaagctgatcaacgagaaaaaggaggatggcaaggtgttttggcagaatctggctggctacaagagacaggaagccctgagaccatacctgagcagcgaggaagatcggaagaagggaaagaaattcgctcggtaccagctgggcgacctgctgctgcacctggaaaagaagcacggcgaggactggggaaaggtgtacgacgaggcctgggagcggattgacaagaaagtggaaggcctgagcaagcacatcaagctggaagaggaacggagaagcgaggacgcccagagcaaggccgccctgaccgactggctgcgggctaaggccagcttcgtgatcgagggcctgaaggaggccgacaaggacgagttctgcagatgcgagctgaagctgcagaagtggtacggggacctgcggggaaagcccttcgccatcgaagccgagaacagcatcctggacatcagcggcttcagcaagcagtacaactgtgccttcatctggcagaaggacggcgtgaagaagctgaacctgtacctgatcatcaactacttcaagggcggcaagctgcggttcaagaagatcaaacctgaagccttcgaagccaacagattctacaccgtgatcaacaaaaagagcggcgagatcgtgcccatggaggtgaacttcaacttcgacgaccccaacctgatcatcctgcctctggcctttggcaagagacagggcagagaattcatctggaacgacctgctgtccctggaaaccggcagcctgaagctggccaacggaagagtgatcgagaagacactgtacaacagaagaacccggcaggatgagcctgccctgttcgtggccctgaccttcgagcggcgggaggtcctggactcctccaatatcaaaccaatgaacctgatcggcgtggcaagaggcgaaaacatccccgccgtgatcgccctgaccgaccccgagggctgcccactgagccggtttaaggatagcctgggaaacccaacccacatcctgagaatcggcgagagctataaggagaagcagcggaccatccaggccaagaaggaggtggagcagcggagagccggcggctacagccggaagtacgccagcaaagccaagaatctggcagacgatatggtgagaaacaccgctagagatctgctgtactacgccgtgacccaggatgccatgctgatcttcgccaacctgagccggggcttcggccggcagggcaagcggaccttcatggccgagagacagtacacacggatggaggactggctgaccgccaagctggcctacgagggcctgagcaagacctacctgtccaagacactggcccagtacacctccaagacatgcagcaactgtgggtttaccatcaccagcgccgactacgacagggtgctggagaagctgaagaagacagcaacaggctggatgaccacaattaacggcaaggagctgaaggtggagggccagattacctactacaacagatacaagagacagaacgtagtcaaggacctgtccgtcgagctggatagactgagcgaagaatctgtgaacaacgacatctcctcctggacaaagggcagaagcggagaagctctgagcctcctgaagaaaagattctcccatagacccgtgcaggagaagttcgtgtgcctgaactgcggcttcgagacacacgcagccgagcaagccgccctgaacatcgccagatcctggctgttcctgcggagccaggagtacaagaaataccagacaaacaagacaaccggcaacaccgataagagagccttcgtcgagacctggcagtccttttaccggaagaagcttaaggaggtgtggaaacctgccgtgcggtctggcggatctggcggaggctccacaagcagccaggagcccgtgaccttcgaggacgtggccgtgtacttcacccagaaccagtgggccagcctggaccccatgcagagggccctgtacctggaggtgatgctggagaactacgccaacatcaccagcctggccgccctgcccttccccaagcccgacctgatcctgcagctggagcagggcgaggccccctggggcctggacccctggacccccctggacggcgaggccctgggcggcgtgaccagccccaagaaaaagagaaaagtctaagctgccttctgcggggcttgccttctggccatgcccttcttctctcccttgcacctgtacctcttggtctttgaataaagcctgagtaggaaggctagcaaaaaaaaaaaaaaaaaaaaaaaaaaaaaaaaaaaaaaaaaaaaaaaaaaaaaaaaaaaaaaaaaaaaaaaaaaaaaaaa

SEQ ID NO: 2737 - RNA, 5419 nt, synthetic construct
  source 1..5419: mol_type = other RNA
aggaaataagagagaaaagaagagtaagaagaaatataagagccaccatggcccctaagaagaagcgtaaagtgagccgggtgaacggcagcggcagcggcggcggcatgaaccacgaccaggagttcgacccccctaaggtgtaccctcccgtccccgccgagaagagaaagcccatccgggtcctgagcctgttcgatggcatcgccaccggtctgctggtgctgaaggacctgggcatccaggtggataggtacattgcctccgaggtgtgcgaggactccatcaccgtgggaatggtgcgtcatcagggcaagatcatgtacgtgggcgacgtgcggagcgtgacacagaagcatatccaggagtggggccctttcgacctggtgatcggcggcagcccttgcaatgacctgagcatcgtgaacccagcccggaagggcctgtacgagggaaccggcagactgttcttcgagttttacagactgctgcacgacgcccggcctaaggaaggcgacgaccggcccttcttttggctgttcgagaatgtggtggccatgggagtcagcgacaagcgggatattagccggttcctggagagcaaccccgtgatgatcgatgccaaggaagtgagcgccgcccaccgggccagatacttctggggcaatctgcctggcatgaacagacccctggccagcaccgtgaacgacaagctggagctgcaggagtgcctggagcacggccggatcgccaagttcagcaaggtgagaaccatcaccacccgaagcaacagcatcaaacaaggcaaggaccagcactttcctgtgttcatgaacgagaaggaggacatcctgtggtgtaccgagatggagagagtgttcgggttcccagtccactacacagatgtcagcaacatgtctagactggccagacagagactgctgggaagaagctggtccgtccctgtgatcagacacctgttcgcccctctgaaggagtacttcgcctgcgtgagcagcggcaacagcaacgccaacagccggggccccagcttctctagcggcctggtgccactgtccctgagagggagccacatgggccccatggagatctacaaaaccgtgagcgcctggaagcggcagcctgtgcgcgtgctgagcctgtttcggaatatcgataaagtcctgaaaagcctgggattcctggagagcggctctggctccggcggtggcaccctgaagtacgtggaggatgtgacaaacgtggtcagacgggatgtggagaagtggggccccttcgatctggtgtacggcagcacccaacccctgggcagctcttgtgaccggtgccctggctggtacatgtttcagttccaccggatcctgcagtacgccctgccgagacaggagtcccagcggccattcttttggattttcatggacaacttgctgctgaccgaggatgaccaggaaactaccactcggttcctgcagaccgaagccgtgaccctgcaggacgtgagaggccgggactaccagaacgccatgcgggtgtggtccaacatccctggactgaaaagcaagcacgcacctctgacccctaaagaagaggagtacctgcaggcccaggtgcggagcagaagcaagctggacgcccctaaggtggatctgctggtgaagaattgcctcctgcccctgagagagtacttcaagtatttcagccagaatagtctgcccctgggcggcccaagcagcggcgcccctcctcccagcggcggcagcccagccggctccccaacctctaccgaggagggcacctctgagtccgccacccccgagagcggccctggcacctccaccgagcccagcgagggcagcgcacccggcagccctgccggcagccccacctccacagaggagggaaccagcaccgagcccagcgaaggcagcgccccaggcaccagcaccgagcctagtgagggcggctctggcggcggcagcgcccaggagattaaacggatcaacaagatcagaagaagacttgtgaaagacagcaacaccaagaaggccggcaagacaggccccatgaaaaccctgctggttagagtgatgacacccgatctgagagagcggctggaaaacctgagaaagaagcctgaaaatatcccccagcccatcagcaatacatctagagccaacctgaataagctgctgaccgattacaccgaaatgaagaaggcgatcctgcatgtgtactgggaagagttccagaaggaccctgtgggcctgatgagccgggtggcccagcctgccagcaagaagatcgatcagaacaagctgaaacctgagatggacgagaagggcaacctgaccaccgccggctttgcctgctctcagtgtggccagcccctgttcgtgtacaagctggagcaggtgtctgagaagggcaaggcttacaccaactacttcggacggtgcaatgtggccgagcacgaaaagctgatcctgctggcccagctgaagcccgagaaggatagcgacgaagccgtgacatatagcctgggaaagtttgggcagagggccctggatttctacagcattcatgtgaccaaggagtccacccaccccgtgaagcccctggcccagatcgccggaaacagatacgcctccggacctgtgggaaaggccctgagcgacgcatgtatgggcacaatcgcctccttcctgtctaagtaccaggacatcatcatcgaacaccagaaggtggtgaagggcaaccagaagagactggagagcctgcgggagctggccggcaaggaaaacctggaataccctagcgtgaccctgccacctcagcctcacaccaaggagggcgttgatgcctacaacgaagtgatcgcccgggtgcgaatgtgggtgaacctgaacctgtggcagaagctgaagctaagcagagatgatgccaagcctctgctgagactgaagggattcccttcctttcctctggtcgagagacaggccaacgaagtggactggtgggacatggtgtgtaacgtgaagaagctgatcaacgagaaaaaggaggatggcaaggtgttttggcagaatctggctggctacaagagacaggaagccctgagaccatacctgagcagcgaggaagatcggaagaagggaaagaaattcgctcggtaccagctgggcgacctgctgctgcacctggaaaagaagcacggcgaggactggggaaaggtgtacgacgaggcctgggagcggattgacaagaaagtggaaggcctgagcaagcacatcaagctggaagaggaacggagaagcgaggacgcccagagcaaggccgccctgaccgactggctgcgggctaaggccagcttcgtgatcgagggcctgaaggaggccgacaaggacgagttctgcagatgcgagctgaagctgcagaagtggtacggggacctgcggggaaagcccttcgccatcgaagccgagaacagcatcctggacatcagcggcttcagcaagcagtacaactgtgccttcatctggcagaaggacggcgtgaagaagctgaacctgtacctgatcatcaactacttcaagggcggcaagctgcggttcaagaagatcaaacctgaagccttcgaagccaacagattctacaccgtgatcaacaaaaagagcggcgagatcgtgcccatggaggtgaacttcaacttcgacgaccccaacctgatcatcctgcctctggcctttggcaagagacagggcagagaattcatctggaacgacctgctgtccctggaaaccggcagcctgaagctggccaacggaagagtgatcgagaagacactgtacaacagaagaacccggcaggatgagcctgccctgttcgtggccctgaccttcgagcggcgggaggtcctggactcctccaatatcaaaccaatgaacctgatcggcgtggcaagaggcgaaaacatccccgccgtgatcgccctgaccgaccccgagggctgcccactgagccggtttaaggatagcctgggaaacccaacccacatcctgagaatcggcgagagctataaggagaagcagcggaccatccaggccaagaaggaggtggagcagcggagagccggcggctacagccggaagtacgccagcaaagccaagaatctggcagacgatatggtgagaaacaccgctagagatctgctgtactacgccgtgacccaggatgccatgctgatcttcgccaacctgagccggggcttcggccggcagggcaagcggaccttcatggccgagagacagtacacacggatggaggactggctgaccgccaagctggcctacgagggcctgagcaagacctacctgtccaagacactggcccagtacacctccaagacatgcagcaactgtgggtttaccatcaccagcgccgactacgacagggtgctggagaagctgaagaagacagcaacaggctggatgaccacaattaacggcaaggagctgaaggtggagggccagattacctactacaacagatacaagagacagaacgtagtcaaggacctgtccgtcgagctggatagactgagcgaagaatctgtgaacaacgacatctcctcctggacaaagggcagaagcggagaagctctgagcctcctgaagaaaagattctcccatagacccgtgcaggagaagttcgtgtgcctgaactgcggcttcgagacacacgcagccgagcaagccgccctgaacatcgccagatcctggctgttcctgcggagccaggagtacaagaaataccagacaaacaagacaaccggcaacaccgataagagagccttcgtcgagacctggcagtccttttaccggaagaagcttaaggaggtgtggaaacctgccgtgcggtctggcggatctggcggaggctccacaagcaggcccagggccgtgaagttcgccgacgtggccgtgtacttcagccccgaggagtggggctgcctgaggcccgcccagagggccctgtacagggacgtgatgagggagacctacggccacctgggcgccctgggcttccccggccccaagcccgccctgatcagctggatggagcaggagagcgaggcctggagccccgacgcccaggaccccgaggagggcgagagcctgggcggcgccctgaccagccccaagaaaaagagaaaagtctaagctgccttctgcggggcttgccttctggccatgcccttcttctctcccttgcacctgtacctcttggtctttgaataaagcctgagtaggaaggctagcaaaaaaaaaaaaaaaaaaaaaaaaaaaaaaaaaaaaaaaaaaaaaaaaaaaaaaaaaaaaaaaaaaaaaaaaaaaaaaaa

SEQ ID NO: 2738 - RNA, 5419 nt, synthetic construct
  source 1..5419: mol_type = other RNA
aggaaataagagagaaaagaagagtaagaagaaatataagagccaccatggcccctaagaagaagcgtaaagtgagccgggtgaacggcagcggcagcggcggcggcatgaaccacgaccaggagttcgacccccctaaggtgtaccctcccgtccccgccgagaagagaaagcccatccgggtcctgagcctgttcgatggcatcgccaccggtctgctggtgctgaaggacctgggcatccaggtggataggtacattgcctccgaggtgtgcgaggactccatcaccgtgggaatggtgcgtcatcagggcaagatcatgtacgtgggcgacgtgcggagcgtgacacagaagcatatccaggagtggggccctttcgacctggtgatcggcggcagcccttgcaatgacctgagcatcgtgaacccagcccggaagggcctgtacgagggaaccggcagactgttcttcgagttttacagactgctgcacgacgcccggcctaaggaaggcgacgaccggcccttcttttggctgttcgagaatgtggtggccatgggagtcagcgacaagcgggatattagccggttcctggagagcaaccccgtgatgatcgatgccaaggaagtgagcgccgcccaccgggccagatacttctggggcaatctgcctggcatgaacagacccctggccagcaccgtgaacgacaagctggagctgcaggagtgcctggagcacggccggatcgccaagttcagcaaggtgagaaccatcaccacccgaagcaacagcatcaaacaaggcaaggaccagcactttcctgtgttcatgaacgagaaggaggacatcctgtggtgtaccgagatggagagagtgttcgggttcccagtccactacacagatgtcagcaacatgtctagactggccagacagagactgctgggaagaagctggtccgtccctgtgatcagacacctgttcgcccctctgaaggagtacttcgcctgcgtgagcagcggcaacagcaacgccaacagccggggccccagcttctctagcggcctggtgccactgtccctgagagggagccacatgggccccatggagatctacaaaaccgtgagcgcctggaagcggcagcctgtgcgcgtgctgagcctgtttcggaatatcgataaagtcctgaaaagcctgggattcctggagagcggctctggctccggcggtggcaccctgaagtacgtggaggatgtgacaaacgtggtcagacgggatgtggagaagtggggccccttcgatctggtgtacggcagcacccaacccctgggcagctcttgtgaccggtgccctggctggtacatgtttcagttccaccggatcctgcagtacgccctgccgagacaggagtcccagcggccattcttttggattttcatggacaacttgctgctgaccgaggatgaccaggaaactaccactcggttcctgcagaccgaagccgtgaccctgcaggacgtgagaggccgggactaccagaacgccatgcgggtgtggtccaacatccctggactgaaaagcaagcacgcacctctgacccctaaagaagaggagtacctgcaggcccaggtgcggagcagaagcaagctggacgcccctaaggtggatctgctggtgaagaattgcctcctgcccctgagagagtacttcaagtatttcagccagaatagtctgcccctgggcggcccaagcagcggcgcccctcctcccagcggcggcagcccagccggctccccaacctctaccgaggagggcacctctgagtccgccacccccgagagcggccctggcacctccaccgagcccagcgagggcagcgcacccggcagccctgccggcagccccacctccacagaggagggaaccagcaccgagcccagcgaaggcagcgccccaggcaccagcaccgagcctagtgagggcggctctggcggcggcagcgcccaggagattaaacggatcaacaagatcagaagaagacttgtgaaagacagcaacaccaagaaggccggcaagacaggccccatgaaaaccctgctggttagagtgatgacacccgatctgagagagcggctggaaaacctgagaaagaagcctgaaaatatcccccagcccatcagcaatacatctagagccaacctgaataagctgctgaccgattacaccgaaatgaagaaggcgatcctgcatgtgtactgggaagagttccagaaggaccctgtgggcctgatgagccgggtggcccagcctgccagcaagaagatcgatcagaacaagctgaaacctgagatggacgagaagggcaacctgaccaccgccggctttgcctgctctcagtgtggccagcccctgttcgtgtacaagctggagcaggtgtctgagaagggcaaggcttacaccaactacttcggacggtgcaatgtggccgagcacgaaaagctgatcctgctggcccagctgaagcccgagaaggatagcgacgaagccgtgacatatagcctgggaaagtttgggcagagggccctggatttctacagcattcatgtgaccaaggagtccacccaccccgtgaagcccctggcccagatcgccggaaacagatacgcctccggacctgtgggaaaggccctgagcgacgcatgtatgggcacaatcgcctccttcctgtctaagtaccaggacatcatcatcgaacaccagaaggtggtgaagggcaaccagaagagactggagagcctgcgggagctggccggcaaggaaaacctggaataccctagcgtgaccctgccacctcagcctcacaccaaggagggcgttgatgcctacaacgaagtgatcgcccgggtgcgaatgtgggtgaacctgaacctgtggcagaagctgaagctaagcagagatgatgccaagcctctgctgagactgaagggattcccttcctttcctctggtcgagagacaggccaacgaagtggactggtgggacatggtgtgtaacgtgaagaagctgatcaacgagaaaaaggaggatggcaaggtgttttggcagaatctggctggctacaagagacaggaagccctgagaccatacctgagcagcgaggaagatcggaagaagggaaagaaattcgctcggtaccagctgggcgacctgctgctgcacctggaaaagaagcacggcgaggactggggaaaggtgtacgacgaggcctgggagcggattgacaagaaagtggaaggcctgagcaagcacatcaagctggaagaggaacggagaagcgaggacgcccagagcaaggccgccctgaccgactggctgcgggctaaggccagcttcgtgatcgagggcctgaaggaggccgacaaggacgagttctgcagatgcgagctgaagctgcagaagtggtacggggacctgcggggaaagcccttcgccatcgaagccgagaacagcatcctggacatcagcggcttcagcaagcagtacaactgtgccttcatctggcagaaggacggcgtgaagaagctgaacctgtacctgatcatcaactacttcaagggcggcaagctgcggttcaagaagatcaaacctgaagccttcgaagccaacagattctacaccgtgatcaacaaaaagagcggcgagatcgtgcccatggaggtgaacttcaacttcgacgaccccaacctgatcatcctgcctctggcctttggcaagagacagggcagagaattcatctggaacgacctgctgtccctggaaaccggcagcctgaagctggccaacggaagagtgatcgagaagacactgtacaacagaagaacccggcaggatgagcctgccctgttcgtggccctgaccttcgagcggcgggaggtcctggactcctccaatatcaaaccaatgaacctgatcggcgtggcaagaggcgaaaacatccccgccgtgatcgccctgaccgaccccgagggctgcccactgagccggtttaaggatagcctgggaaacccaacccacatcctgagaatcggcgagagctataaggagaagcagcggaccatccaggccaagaaggaggtggagcagcggagagccggcggctacagccggaagtacgccagcaaagccaagaatctggcagacgatatggtgagaaacaccgctagagatctgctgtactacgccgtgacccaggatgccatgctgatcttcgccaacctgagccggggcttcggccggcagggcaagcggaccttcatggccgagagacagtacacacggatggaggactggctgaccgccaagctggcctacgagggcctgagcaagacctacctgtccaagacactggcccagtacacctccaagacatgcagcaactgtgggtttaccatcaccagcgccgactacgacagggtgctggagaagctgaagaagacagcaacaggctggatgaccacaattaacggcaaggagctgaaggtggagggccagattacctactacaacagatacaagagacagaacgtagtcaaggacctgtccgtcgagctggatagactgagcgaagaatctgtgaacaacgacatctcctcctggacaaagggcagaagcggagaagctctgagcctcctgaagaaaagattctcccatagacccgtgcaggagaagttcgtgtgcctgaactgcggcttcgagacacacgcagccgagcaagccgccctgaacatcgccagatcctggctgttcctgcggagccaggagtacaagaaataccagacaaacaagacaaccggcaacaccgataagagagccttcgtcgagacctggcagtccttttaccggaagaagcttaaggaggtgtggaaacctgccgtgcggtctggcggatctggcggaggctccacaagccagcccgacctggtgaccttcggcgacgtggccgtggacttcagccaggaggagtgggagtggctgaaccccgcccagaggagcctgtacaggaccgtgatgctggacaactacaggagcctggtgagcctgggcgtgagcgccagcaagcccgacgtgatcagcctgctggagcagggcaaggagccctggctggtgaaggaggagggccccaggggcgccaggcccgacagcagccccaccaccagccccaagaaaaagagaaaagtctaagctgccttctgcggggcttgccttctggccatgcccttcttctctcccttgcacctgtacctcttggtctttgaataaagcctgagtaggaaggctagcaaaaaaaaaaaaaaaaaaaaaaaaaaaaaaaaaaaaaaaaaaaaaaaaaaaaaaaaaaaaaaaaaaaaaaaaaaaaaaaa

SEQ ID NO: 2739 - RNA, 5419 nt, synthetic construct
  source 1..5419: mol_type = other RNA
aggaaataagagagaaaagaagagtaagaagaaatataagagccaccatggcccctaagaagaagcgtaaagtgagccgggtgaacggcagcggcagcggcggcggcatgaaccacgaccaggagttcgacccccctaaggtgtaccctcccgtccccgccgagaagagaaagcccatccgggtcctgagcctgttcgatggcatcgccaccggtctgctggtgctgaaggacctgggcatccaggtggataggtacattgcctccgaggtgtgcgaggactccatcaccgtgggaatggtgcgtcatcagggcaagatcatgtacgtgggcgacgtgcggagcgtgacacagaagcatatccaggagtggggccctttcgacctggtgatcggcggcagcccttgcaatgacctgagcatcgtgaacccagcccggaagggcctgtacgagggaaccggcagactgttcttcgagttttacagactgctgcacgacgcccggcctaaggaaggcgacgaccggcccttcttttggctgttcgagaatgtggtggccatgggagtcagcgacaagcgggatattagccggttcctggagagcaaccccgtgatgatcgatgccaaggaagtgagcgccgcccaccgggccagatacttctggggcaatctgcctggcatgaacagacccctggccagcaccgtgaacgacaagctggagctgcaggagtgcctggagcacggccggatcgccaagttcagcaaggtgagaaccatcaccacccgaagcaacagcatcaaacaaggcaaggaccagcactttcctgtgttcatgaacgagaaggaggacatcctgtggtgtaccgagatggagagagtgttcgggttcccagtccactacacagatgtcagcaacatgtctagactggccagacagagactgctgggaagaagctggtccgtccctgtgatcagacacctgttcgcccctctgaaggagtacttcgcctgcgtgagcagcggcaacagcaacgccaacagccggggccccagcttctctagcggcctggtgccactgtccctgagagggagccacatgggccccatggagatctacaaaaccgtgagcgcctggaagcggcagcctgtgcgcgtgctgagcctgtttcggaatatcgataaagtcctgaaaagcctgggattcctggagagcggctctggctccggcggtggcaccctgaagtacgtggaggatgtgacaaacgtggtcagacgggatgtggagaagtggggccccttcgatctggtgtacggcagcacccaacccctgggcagctcttgtgaccggtgccctggctggtacatgtttcagttccaccggatcctgcagtacgccctgccgagacaggagtcccagcggccattcttttggattttcatggacaacttgctgctgaccgaggatgaccaggaaactaccactcggttcctgcagaccgaagccgtgaccctgcaggacgtgagaggccgggactaccagaacgccatgcgggtgtggtccaacatccctggactgaaaagcaagcacgcacctctgacccctaaagaagaggagtacctgcaggcccaggtgcggagcagaagcaagctggacgcccctaaggtggatctgctggtgaagaattgcctcctgcccctgagagagtacttcaagtatttcagccagaatagtctgcccctgggcggcccaagcagcggcgcccctcctcccagcggcggcagcccagccggctccccaacctctaccgaggagggcacctctgagtccgccacccccgagagcggccctggcacctccaccgagcccagcgagggcagcgcacccggcagccctgccggcagccccacctccacagaggagggaaccagcaccgagcccagcgaaggcagcgccccaggcaccagcaccgagcctagtgagggcggctctggcggcggcagcgcccaggagattaaacggatcaacaagatcagaagaagacttgtgaaagacagcaacaccaagaaggccggcaagacaggccccatgaaaaccctgctggttagagtgatgacacccgatctgagagagcggctggaaaacctgagaaagaagcctgaaaatatcccccagcccatcagcaatacatctagagccaacctgaataagctgctgaccgattacaccgaaatgaagaaggcgatcctgcatgtgtactgggaagagttccagaaggaccctgtgggcctgatgagccgggtggcccagcctgccagcaagaagatcgatcagaacaagctgaaacctgagatggacgagaagggcaacctgaccaccgccggctttgcctgctctcagtgtggccagcccctgttcgtgtacaagctggagcaggtgtctgagaagggcaaggcttacaccaactacttcggacggtgcaatgtggccgagcacgaaaagctgatcctgctggcccagctgaagcccgagaaggatagcgacgaagccgtgacatatagcctgggaaagtttgggcagagggccctggatttctacagcattcatgtgaccaaggagtccacccaccccgtgaagcccctggcccagatcgccggaaacagatacgcctccggacctgtgggaaaggccctgagcgacgcatgtatgggcacaatcgcctccttcctgtctaagtaccaggacatcatcatcgaacaccagaaggtggtgaagggcaaccagaagagactggagagcctgcgggagctggccggcaaggaaaacctggaataccctagcgtgaccctgccacctcagcctcacaccaaggagggcgttgatgcctacaacgaagtgatcgcccgggtgcgaatgtgggtgaacctgaacctgtggcagaagctgaagctaagcagagatgatgccaagcctctgctgagactgaagggattcccttcctttcctctggtcgagagacaggccaacgaagtggactggtgggacatggtgtgtaacgtgaagaagctgatcaacgagaaaaaggaggatggcaaggtgttttggcagaatctggctggctacaagagacaggaagccctgagaccatacctgagcagcgaggaagatcggaagaagggaaagaaattcgctcggtaccagctgggcgacctgctgctgcacctggaaaagaagcacggcgaggactggggaaaggtgtacgacgaggcctgggagcggattgacaagaaagtggaaggcctgagcaagcacatcaagctggaagaggaacggagaagcgaggacgcccagagcaaggccgccctgaccgactggctgcgggctaaggccagcttcgtgatcgagggcctgaaggaggccgacaaggacgagttctgcagatgcgagctgaagctgcagaagtggtacggggacctgcggggaaagcccttcgccatcgaagccgagaacagcatcctggacatcagcggcttcagcaagcagtacaactgtgccttcatctggcagaaggacggcgtgaagaagctgaacctgtacctgatcatcaactacttcaagggcggcaagctgcggttcaagaagatcaaacctgaagccttcgaagccaacagattctacaccgtgatcaacaaaaagagcggcgagatcgtgcccatggaggtgaacttcaacttcgacgaccccaacctgatcatcctgcctctggcctttggcaagagacagggcagagaattcatctggaacgacctgctgtccctggaaaccggcagcctgaagctggccaacggaagagtgatcgagaagacactgtacaacagaagaacccggcaggatgagcctgccctgttcgtggccctgaccttcgagcggcgggaggtcctggactcctccaatatcaaaccaatgaacctgatcggcgtggcaagaggcgaaaacatccccgccgtgatcgccctgaccgaccccgagggctgcccactgagccggtttaaggatagcctgggaaacccaacccacatcctgagaatcggcgagagctataaggagaagcagcggaccatccaggccaagaaggaggtggagcagcggagagccggcggctacagccggaagtacgccagcaaagccaagaatctggcagacgatatggtgagaaacaccgctagagatctgctgtactacgccgtgacccaggatgccatgctgatcttcgccaacctgagccggggcttcggccggcagggcaagcggaccttcatggccgagagacagtacacacggatggaggactggctgaccgccaagctggcctacgagggcctgagcaagacctacctgtccaagacactggcccagtacacctccaagacatgcagcaactgtgggtttaccatcaccagcgccgactacgacagggtgctggagaagctgaagaagacagcaacaggctggatgaccacaattaacggcaaggagctgaaggtggagggccagattacctactacaacagatacaagagacagaacgtagtcaaggacctgtccgtcgagctggatagactgagcgaagaatctgtgaacaacgacatctcctcctggacaaagggcagaagcggagaagctctgagcctcctgaagaaaagattctcccatagacccgtgcaggagaagttcgtgtgcctgaactgcggcttcgagacacacgcagccgagcaagccgccctgaacatcgccagatcctggctgttcctgcggagccaggagtacaagaaataccagacaaacaagacaaccggcaacaccgataagagagccttcgtcgagacctggcagtccttttaccggaagaagcttaaggaggtgtggaaacctgccgtgcggtctggcggatctggcggaggctccacaagcagcaaggcccccgtgaccttcggcgacctggccgtgtacttcacccaggccgagtgggagtggctgagccccgtgcagaaggccctgtaccaggacgtgatgctggagaactaccaggtgctggtgagcctgggcctgtgcctgaggaggcccaacctgatcagcctgctggagaagggcaaggccccctgggtggccgagcccgtgaggaggaggaggggccccgacagcgccagcaagttcaccagccccaagaaaaagagaaaagtctaagctgccttctgcggggcttgccttctggccatgcccttcttctctcccttgcacctgtacctcttggtctttgaataaagcctgagtaggaaggctagcaaaaaaaaaaaaaaaaaaaaaaaaaaaaaaaaaaaaaaaaaaaaaaaaaaaaaaaaaaaaaaaaaaaaaaaaaaaaaaaa

SEQ ID NO: 2740 - RNA, 5419 nt, synthetic construct
  source 1..5419: mol_type = other RNA
aggaaataagagagaaaagaagagtaagaagaaatataagagccaccatggcccctaagaagaagcgtaaagtgagccgggtgaacggcagcggcagcggcggcggcatgaaccacgaccaggagttcgacccccctaaggtgtaccctcccgtccccgccgagaagagaaagcccatccgggtcctgagcctgttcgatggcatcgccaccggtctgctggtgctgaaggacctgggcatccaggtggataggtacattgcctccgaggtgtgcgaggactccatcaccgtgggaatggtgcgtcatcagggcaagatcatgtacgtgggcgacgtgcggagcgtgacacagaagcatatccaggagtggggccctttcgacctggtgatcggcggcagcccttgcaatgacctgagcatcgtgaacccagcccggaagggcctgtacgagggaaccggcagactgttcttcgagttttacagactgctgcacgacgcccggcctaaggaaggcgacgaccggcccttcttttggctgttcgagaatgtggtggccatgggagtcagcgacaagcgggatattagccggttcctggagagcaaccccgtgatgatcgatgccaaggaagtgagcgccgcccaccgggccagatacttctggggcaatctgcctggcatgaacagacccctggccagcaccgtgaacgacaagctggagctgcaggagtgcctggagcacggccggatcgccaagttcagcaaggtgagaaccatcaccacccgaagcaacagcatcaaacaaggcaaggaccagcactttcctgtgttcatgaacgagaaggaggacatcctgtggtgtaccgagatggagagagtgttcgggttcccagtccactacacagatgtcagcaacatgtctagactggccagacagagactgctgggaagaagctggtccgtccctgtgatcagacacctgttcgcccctctgaaggagtacttcgcctgcgtgagcagcggcaacagcaacgccaacagccggggccccagcttctctagcggcctggtgccactgtccctgagagggagccacatgggccccatggagatctacaaaaccgtgagcgcctggaagcggcagcctgtgcgcgtgctgagcctgtttcggaatatcgataaagtcctgaaaagcctgggattcctggagagcggctctggctccggcggtggcaccctgaagtacgtggaggatgtgacaaacgtggtcagacgggatgtggagaagtggggccccttcgatctggtgtacggcagcacccaacccctgggcagctcttgtgaccggtgccctggctggtacatgtttcagttccaccggatcctgcagtacgccctgccgagacaggagtcccagcggccattcttttggattttcatggacaacttgctgctgaccgaggatgaccaggaaactaccactcggttcctgcagaccgaagccgtgaccctgcaggacgtgagaggccgggactaccagaacgccatgcgggtgtggtccaacatccctggactgaaaagcaagcacgcacctctgacccctaaagaagaggagtacctgcaggcccaggtgcggagcagaagcaagctggacgcccctaaggtggatctgctggtgaagaattgcctcctgcccctgagagagtacttcaagtatttcagccagaatagtctgcccctgggcggcccaagcagcggcgcccctcctcccagcggcggcagcccagccggctccccaacctctaccgaggagggcacctctgagtccgccacccccgagagcggccctggcacctccaccgagcccagcgagggcagcgcacccggcagccctgccggcagccccacctccacagaggagggaaccagcaccgagcccagcgaaggcagcgccccaggcaccagcaccgagcctagtgagggcggctctggcggcggcagcgcccaggagattaaacggatcaacaagatcagaagaagacttgtgaaagacagcaacaccaagaaggccggcaagacaggccccatgaaaaccctgctggttagagtgatgacacccgatctgagagagcggctggaaaacctgagaaagaagcctgaaaatatcccccagcccatcagcaatacatctagagccaacctgaataagctgctgaccgattacaccgaaatgaagaaggcgatcctgcatgtgtactgggaagagttccagaaggaccctgtgggcctgatgagccgggtggcccagcctgccagcaagaagatcgatcagaacaagctgaaacctgagatggacgagaagggcaacctgaccaccgccggctttgcctgctctcagtgtggccagcccctgttcgtgtacaagctggagcaggtgtctgagaagggcaaggcttacaccaactacttcggacggtgcaatgtggccgagcacgaaaagctgatcctgctggcccagctgaagcccgagaaggatagcgacgaagccgtgacatatagcctgggaaagtttgggcagagggccctggatttctacagcattcatgtgaccaaggagtccacccaccccgtgaagcccctggcccagatcgccggaaacagatacgcctccggacctgtgggaaaggccctgagcgacgcatgtatgggcacaatcgcctccttcctgtctaagtaccaggacatcatcatcgaacaccagaaggtggtgaagggcaaccagaagagactggagagcctgcgggagctggccggcaaggaaaacctggaataccctagcgtgaccctgccacctcagcctcacaccaaggagggcgttgatgcctacaacgaagtgatcgcccgggtgcgaatgtgggtgaacctgaacctgtggcagaagctgaagctaagcagagatgatgccaagcctctgctgagactgaagggattcccttcctttcctctggtcgagagacaggccaacgaagtggactggtgggacatggtgtgtaacgtgaagaagctgatcaacgagaaaaaggaggatggcaaggtgttttggcagaatctggctggctacaagagacaggaagccctgagaccatacctgagcagcgaggaagatcggaagaagggaaagaaattcgctcggtaccagctgggcgacctgctgctgcacctggaaaagaagcacggcgaggactggggaaaggtgtacgacgaggcctgggagcggattgacaagaaagtggaaggcctgagcaagcacatcaagctggaagaggaacggagaagcgaggacgcccagagcaaggccgccctgaccgactggctgcgggctaaggccagcttcgtgatcgagggcctgaaggaggccgacaaggacgagttctgcagatgcgagctgaagctgcagaagtggtacggggacctgcggggaaagcccttcgccatcgaagccgagaacagcatcctggacatcagcggcttcagcaagcagtacaactgtgccttcatctggcagaaggacggcgtgaagaagctgaacctgtacctgatcatcaactacttcaagggcggcaagctgcggttcaagaagatcaaacctgaagccttcgaagccaacagattctacaccgtgatcaacaaaaagagcggcgagatcgtgcccatggaggtgaacttcaacttcgacgaccccaacctgatcatcctgcctctggcctttggcaagagacagggcagagaattcatctggaacgacctgctgtccctggaaaccggcagcctgaagctggccaacggaagagtgatcgagaagacactgtacaacagaagaacccggcaggatgagcctgccctgttcgtggccctgaccttcgagcggcgggaggtcctggactcctccaatatcaaaccaatgaacctgatcggcgtggcaagaggcgaaaacatccccgccgtgatcgccctgaccgaccccgagggctgcccactgagccggtttaaggatagcctgggaaacccaacccacatcctgagaatcggcgagagctataaggagaagcagcggaccatccaggccaagaaggaggtggagcagcggagagccggcggctacagccggaagtacgccagcaaagccaagaatctggcagacgatatggtgagaaacaccgctagagatctgctgtactacgccgtgacccaggatgccatgctgatcttcgccaacctgagccggggcttcggccggcagggcaagcggaccttcatggccgagagacagtacacacggatggaggactggctgaccgccaagctggcctacgagggcctgagcaagacctacctgtccaagacactggcccagtacacctccaagacatgcagcaactgtgggtttaccatcaccagcgccgactacgacagggtgctggagaagctgaagaagacagcaacaggctggatgaccacaattaacggcaaggagctgaaggtggagggccagattacctactacaacagatacaagagacagaacgtagtcaaggacctgtccgtcgagctggatagactgagcgaagaatctgtgaacaacgacatctcctcctggacaaagggcagaagcggagaagctctgagcctcctgaagaaaagattctcccatagacccgtgcaggagaagttcgtgtgcctgaactgcggcttcgagacacacgcagccgagcaagccgccctgaacatcgccagatcctggctgttcctgcggagccaggagtacaagaaataccagacaaacaagacaaccggcaacaccgataagagagccttcgtcgagacctggcagtccttttaccggaagaagcttaaggaggtgtggaaacctgccgtgcggtctggcggatctggcggaggctccacaagcttccaggagcccctgaagttcagggacgtggccgtggagttcagcctggaggagtggcagtgcctggacaccatccagcagaacctgtacaggaacgtgatgctggagaactacaggaacctggtgttcctgggcatcgccgtgagcaagcccgacctgatcacctgcctggagcaggagaaggagccctggaccaggaagaggcacaggatggtggccaagcccgtgacctgcagccacttcaccagccccaagaaaaagagaaaagtctaagctgccttctgcggggcttgccttctggccatgcccttcttctctcccttgcacctgtacctcttggtctttgaataaagcctgagtaggaaggctagcaaaaaaaaaaaaaaaaaaaaaaaaaaaaaaaaaaaaaaaaaaaaaaaaaaaaaaaaaaaaaaaaaaaaaaaaaaaaaaaa

SEQ ID NO: 2741 - RNA, 5419 nt, synthetic construct
  source 1..5419: mol_type = other RNA
aggaaataagagagaaaagaagagtaagaagaaatataagagccaccatggcccctaagaagaagcgtaaagtgagccgggtgaacggcagcggcagcggcggcggcatgaaccacgaccaggagttcgacccccctaaggtgtaccctcccgtccccgccgagaagagaaagcccatccgggtcctgagcctgttcgatggcatcgccaccggtctgctggtgctgaaggacctgggcatccaggtggataggtacattgcctccgaggtgtgcgaggactccatcaccgtgggaatggtgcgtcatcagggcaagatcatgtacgtgggcgacgtgcggagcgtgacacagaagcatatccaggagtggggccctttcgacctggtgatcggcggcagcccttgcaatgacctgagcatcgtgaacccagcccggaagggcctgtacgagggaaccggcagactgttcttcgagttttacagactgctgcacgacgcccggcctaaggaaggcgacgaccggcccttcttttggctgttcgagaatgtggtggccatgggagtcagcgacaagcgggatattagccggttcctggagagcaaccccgtgatgatcgatgccaaggaagtgagcgccgcccaccgggccagatacttctggggcaatctgcctggcatgaacagacccctggccagcaccgtgaacgacaagctggagctgcaggagtgcctggagcacggccggatcgccaagttcagcaaggtgagaaccatcaccacccgaagcaacagcatcaaacaaggcaaggaccagcactttcctgtgttcatgaacgagaaggaggacatcctgtggtgtaccgagatggagagagtgttcgggttcccagtccactacacagatgtcagcaacatgtctagactggccagacagagactgctgggaagaagctggtccgtccctgtgatcagacacctgttcgcccctctgaaggagtacttcgcctgcgtgagcagcggcaacagcaacgccaacagccggggccccagcttctctagcggcctggtgccactgtccctgagagggagccacatgggccccatggagatctacaaaaccgtgagcgcctggaagcggcagcctgtgcgcgtgctgagcctgtttcggaatatcgataaagtcctgaaaagcctgggattcctggagagcggctctggctccggcggtggcaccctgaagtacgtggaggatgtgacaaacgtggtcagacgggatgtggagaagtggggccccttcgatctggtgtacggcagcacccaacccctgggcagctcttgtgaccggtgccctggctggtacatgtttcagttccaccggatcctgcagtacgccctgccgagacaggagtcccagcggccattcttttggattttcatggacaacttgctgctgaccgaggatgaccaggaaactaccactcggttcctgcagaccgaagccgtgaccctgcaggacgtgagaggccgggactaccagaacgccatgcgggtgtggtccaacatccctggactgaaaagcaagcacgcacctctgacccctaaagaagaggagtacctgcaggcccaggtgcggagcagaagcaagctggacgcccctaaggtggatctgctggtgaagaattgcctcctgcccctgagagagtacttcaagtatttcagccagaatagtctgcccctgggcggcccaagcagcggcgcccctcctcccagcggcggcagcccagccggctccccaacctctaccgaggagggcacctctgagtccgccacccccgagagcggccctggcacctccaccgagcccagcgagggcagcgcacccggcagccctgccggcagccccacctccacagaggagggaaccagcaccgagcccagcgaaggcagcgccccaggcaccagcaccgagcctagtgagggcggctctggcggcggcagcgcccaggagattaaacggatcaacaagatcagaagaagacttgtgaaagacagcaacaccaagaaggccggcaagacaggccccatgaaaaccctgctggttagagtgatgacacccgatctgagagagcggctggaaaacctgagaaagaagcctgaaaatatcccccagcccatcagcaatacatctagagccaacctgaataagctgctgaccgattacaccgaaatgaagaaggcgatcctgcatgtgtactgggaagagttccagaaggaccctgtgggcctgatgagccgggtggcccagcctgccagcaagaagatcgatcagaacaagctgaaacctgagatggacgagaagggcaacctgaccaccgccggctttgcctgctctcagtgtggccagcccctgttcgtgtacaagctggagcaggtgtctgagaagggcaaggcttacaccaactacttcggacggtgcaatgtggccgagcacgaaaagctgatcctgctggcccagctgaagcccgagaaggatagcgacgaagccgtgacatatagcctgggaaagtttgggcagagggccctggatttctacagcattcatgtgaccaaggagtccacccaccccgtgaagcccctggcccagatcgccggaaacagatacgcctccggacctgtgggaaaggccctgagcgacgcatgtatgggcacaatcgcctccttcctgtctaagtaccaggacatcatcatcgaacaccagaaggtggtgaagggcaaccagaagagactggagagcctgcgggagctggccggcaaggaaaacctggaataccctagcgtgaccctgccacctcagcctcacaccaaggagggcgttgatgcctacaacgaagtgatcgcccgggtgcgaatgtgggtgaacctgaacctgtggcagaagctgaagctaagcagagatgatgccaagcctctgctgagactgaagggattcccttcctttcctctggtcgagagacaggccaacgaagtggactggtgggacatggtgtgtaacgtgaagaagctgatcaacgagaaaaaggaggatggcaaggtgttttggcagaatctggctggctacaagagacaggaagccctgagaccatacctgagcagcgaggaagatcggaagaagggaaagaaattcgctcggtaccagctgggcgacctgctgctgcacctggaaaagaagcacggcgaggactggggaaaggtgtacgacgaggcctgggagcggattgacaagaaagtggaaggcctgagcaagcacatcaagctggaagaggaacggagaagcgaggacgcccagagcaaggccgccctgaccgactggctgcgggctaaggccagcttcgtgatcgagggcctgaaggaggccgacaaggacgagttctgcagatgcgagctgaagctgcagaagtggtacggggacctgcggggaaagcccttcgccatcgaagccgagaacagcatcctggacatcagcggcttcagcaagcagtacaactgtgccttcatctggcagaaggacggcgtgaagaagctgaacctgtacctgatcatcaactacttcaagggcggcaagctgcggttcaagaagatcaaacctgaagccttcgaagccaacagattctacaccgtgatcaacaaaaagagcggcgagatcgtgcccatggaggtgaacttcaacttcgacgaccccaacctgatcatcctgcctctggcctttggcaagagacagggcagagaattcatctggaacgacctgctgtccctggaaaccggcagcctgaagctggccaacggaagagtgatcgagaagacactgtacaacagaagaacccggcaggatgagcctgccctgttcgtggccctgaccttcgagcggcgggaggtcctggactcctccaatatcaaaccaatgaacctgatcggcgtggcaagaggcgaaaacatccccgccgtgatcgccctgaccgaccccgagggctgcccactgagccggtttaaggatagcctgggaaacccaacccacatcctgagaatcggcgagagctataaggagaagcagcggaccatccaggccaagaaggaggtggagcagcggagagccggcggctacagccggaagtacgccagcaaagccaagaatctggcagacgatatggtgagaaacaccgctagagatctgctgtactacgccgtgacccaggatgccatgctgatcttcgccaacctgagccggggcttcggccggcagggcaagcggaccttcatggccgagagacagtacacacggatggaggactggctgaccgccaagctggcctacgagggcctgagcaagacctacctgtccaagacactggcccagtacacctccaagacatgcagcaactgtgggtttaccatcaccagcgccgactacgacagggtgctggagaagctgaagaagacagcaacaggctggatgaccacaattaacggcaaggagctgaaggtggagggccagattacctactacaacagatacaagagacagaacgtagtcaaggacctgtccgtcgagctggatagactgagcgaagaatctgtgaacaacgacatctcctcctggacaaagggcagaagcggagaagctctgagcctcctgaagaaaagattctcccatagacccgtgcaggagaagttcgtgtgcctgaactgcggcttcgagacacacgcagccgagcaagccgccctgaacatcgccagatcctggctgttcctgcggagccaggagtacaagaaataccagacaaacaagacaaccggcaacaccgataagagagccttcgtcgagacctggcagtccttttaccggaagaagcttaaggaggtgtggaaacctgccgtgcggtctggcggatctggcggaggctccacaagcgagcccggcgccgtgagcttcgccgacgtggccgtgtacttcagccccgaggagtgggagtgcctgaggcccgcccagagggccctgtacagggacgtgatgagggagacctacggccacctgggcgccctgggcttccccggccccaagcccgccctgatcagctggatggagcaggagagcgaggcctggagccccgccgcccaggaccccgagaagggcgagaggctgggcggcgccaggaccagccccaagaaaaagagaaaagtctaagctgccttctgcggggcttgccttctggccatgcccttcttctctcccttgcacctgtacctcttggtctttgaataaagcctgagtaggaaggctagcaaaaaaaaaaaaaaaaaaaaaaaaaaaaaaaaaaaaaaaaaaaaaaaaaaaaaaaaaaaaaaaaaaaaaaaaaaaaaaaa

SEQ ID NO: 2742 - RNA, 5419 nt, synthetic construct
  source 1..5419: mol_type = other RNA
aggaaataagagagaaaagaagagtaagaagaaatataagagccaccatggcccctaagaagaagcgtaaagtgagccgggtgaacggcagcggcagcggcggcggcatgaaccacgaccaggagttcgacccccctaaggtgtaccctcccgtccccgccgagaagagaaagcccatccgggtcctgagcctgttcgatggcatcgccaccggtctgctggtgctgaaggacctgggcatccaggtggataggtacattgcctccgaggtgtgcgaggactccatcaccgtgggaatggtgcgtcatcagggcaagatcatgtacgtgggcgacgtgcggagcgtgacacagaagcatatccaggagtggggccctttcgacctggtgatcggcggcagcccttgcaatgacctgagcatcgtgaacccagcccggaagggcctgtacgagggaaccggcagactgttcttcgagttttacagactgctgcacgacgcccggcctaaggaaggcgacgaccggcccttcttttggctgttcgagaatgtggtggccatgggagtcagcgacaagcgggatattagccggttcctggagagcaaccccgtgatgatcgatgccaaggaagtgagcgccgcccaccgggccagatacttctggggcaatctgcctggcatgaacagacccctggccagcaccgtgaacgacaagctggagctgcaggagtgcctggagcacggccggatcgccaagttcagcaaggtgagaaccatcaccacccgaagcaacagcatcaaacaaggcaaggaccagcactttcctgtgttcatgaacgagaaggaggacatcctgtggtgtaccgagatggagagagtgttcgggttcccagtccactacacagatgtcagcaacatgtctagactggccagacagagactgctgggaagaagctggtccgtccctgtgatcagacacctgttcgcccctctgaaggagtacttcgcctgcgtgagcagcggcaacagcaacgccaacagccggggccccagcttctctagcggcctggtgccactgtccctgagagggagccacatgggccccatggagatctacaaaaccgtgagcgcctggaagcggcagcctgtgcgcgtgctgagcctgtttcggaatatcgataaagtcctgaaaagcctgggattcctggagagcggctctggctccggcggtggcaccctgaagtacgtggaggatgtgacaaacgtggtcagacgggatgtggagaagtggggccccttcgatctggtgtacggcagcacccaacccctgggcagctcttgtgaccggtgccctggctggtacatgtttcagttccaccggatcctgcagtacgccctgccgagacaggagtcccagcggccattcttttggattttcatggacaacttgctgctgaccgaggatgaccaggaaactaccactcggttcctgcagaccgaagccgtgaccctgcaggacgtgagaggccgggactaccagaacgccatgcgggtgtggtccaacatccctggactgaaaagcaagcacgcacctctgacccctaaagaagaggagtacctgcaggcccaggtgcggagcagaagcaagctggacgcccctaaggtggatctgctggtgaagaattgcctcctgcccctgagagagtacttcaagtatttcagccagaatagtctgcccctgggcggcccaagcagcggcgcccctcctcccagcggcggcagcccagccggctccccaacctctaccgaggagggcacctctgagtccgccacccccgagagcggccctggcacctccaccgagcccagcgagggcagcgcacccggcagccctgccggcagccccacctccacagaggagggaaccagcaccgagcccagcgaaggcagcgccccaggcaccagcaccgagcctagtgagggcggctctggcggcggcagcgcccaggagattaaacggatcaacaagatcagaagaagacttgtgaaagacagcaacaccaagaaggccggcaagacaggccccatgaaaaccctgctggttagagtgatgacacccgatctgagagagcggctggaaaacctgagaaagaagcctgaaaatatcccccagcccatcagcaatacatctagagccaacctgaataagctgctgaccgattacaccgaaatgaagaaggcgatcctgcatgtgtactgggaagagttccagaaggaccctgtgggcctgatgagccgggtggcccagcctgccagcaagaagatcgatcagaacaagctgaaacctgagatggacgagaagggcaacctgaccaccgccggctttgcctgctctcagtgtggccagcccctgttcgtgtacaagctggagcaggtgtctgagaagggcaaggcttacaccaactacttcggacggtgcaatgtggccgagcacgaaaagctgatcctgctggcccagctgaagcccgagaaggatagcgacgaagccgtgacatatagcctgggaaagtttgggcagagggccctggatttctacagcattcatgtgaccaaggagtccacccaccccgtgaagcccctggcccagatcgccggaaacagatacgcctccggacctgtgggaaaggccctgagcgacgcatgtatgggcacaatcgcctccttcctgtctaagtaccaggacatcatcatcgaacaccagaaggtggtgaagggcaaccagaagagactggagagcctgcgggagctggccggcaaggaaaacctggaataccctagcgtgaccctgccacctcagcctcacaccaaggagggcgttgatgcctacaacgaagtgatcgcccgggtgcgaatgtgggtgaacctgaacctgtggcagaagctgaagctaagcagagatgatgccaagcctctgctgagactgaagggattcccttcctttcctctggtcgagagacaggccaacgaagtggactggtgggacatggtgtgtaacgtgaagaagctgatcaacgagaaaaaggaggatggcaaggtgttttggcagaatctggctggctacaagagacaggaagccctgagaccatacctgagcagcgaggaagatcggaagaagggaaagaaattcgctcggtaccagctgggcgacctgctgctgcacctggaaaagaagcacggcgaggactggggaaaggtgtacgacgaggcctgggagcggattgacaagaaagtggaaggcctgagcaagcacatcaagctggaagaggaacggagaagcgaggacgcccagagcaaggccgccctgaccgactggctgcgggctaaggccagcttcgtgatcgagggcctgaaggaggccgacaaggacgagttctgcagatgcgagctgaagctgcagaagtggtacggggacctgcggggaaagcccttcgccatcgaagccgagaacagcatcctggacatcagcggcttcagcaagcagtacaactgtgccttcatctggcagaaggacggcgtgaagaagctgaacctgtacctgatcatcaactacttcaagggcggcaagctgcggttcaagaagatcaaacctgaagccttcgaagccaacagattctacaccgtgatcaacaaaaagagcggcgagatcgtgcccatggaggtgaacttcaacttcgacgaccccaacctgatcatcctgcctctggcctttggcaagagacagggcagagaattcatctggaacgacctgctgtccctggaaaccggcagcctgaagctggccaacggaagagtgatcgagaagacactgtacaacagaagaacccggcaggatgagcctgccctgttcgtggccctgaccttcgagcggcgggaggtcctggactcctccaatatcaaaccaatgaacctgatcggcgtggcaagaggcgaaaacatccccgccgtgatcgccctgaccgaccccgagggctgcccactgagccggtttaaggatagcctgggaaacccaacccacatcctgagaatcggcgagagctataaggagaagcagcggaccatccaggccaagaaggaggtggagcagcggagagccggcggctacagccggaagtacgccagcaaagccaagaatctggcagacgatatggtgagaaacaccgctagagatctgctgtactacgccgtgacccaggatgccatgctgatcttcgccaacctgagccggggcttcggccggcagggcaagcggaccttcatggccgagagacagtacacacggatggaggactggctgaccgccaagctggcctacgagggcctgagcaagacctacctgtccaagacactggcccagtacacctccaagacatgcagcaactgtgggtttaccatcaccagcgccgactacgacagggtgctggagaagctgaagaagacagcaacaggctggatgaccacaattaacggcaaggagctgaaggtggagggccagattacctactacaacagatacaagagacagaacgtagtcaaggacctgtccgtcgagctggatagactgagcgaagaatctgtgaacaacgacatctcctcctggacaaagggcagaagcggagaagctctgagcctcctgaagaaaagattctcccatagacccgtgcaggagaagttcgtgtgcctgaactgcggcttcgagacacacgcagccgagcaagccgccctgaacatcgccagatcctggctgttcctgcggagccaggagtacaagaaataccagacaaacaagacaaccggcaacaccgataagagagccttcgtcgagacctggcagtccttttaccggaagaagcttaaggaggtgtggaaacctgccgtgcggtctggcggatctggcggaggctccacaagccaggccgaggtgaccttcgaggacgtggccgtgctgttcagcagggaggagtggggcaggctgggccccgcccagaggggcctgtacagggacgtgatgctggagacctacaggaacctggccagcctgggcgccggcagggccggcagcaagcccggcgtgatcacccagctggagaggggcgacgagccctgggtgctggacgcccagggcgccaagggcaagggccagcccagggtgagcaccagccccaagaaaaagagaaaagtctaagctgccttctgcggggcttgccttctggccatgcccttcttctctcccttgcacctgtacctcttggtctttgaataaagcctgagtaggaaggctagcaaaaaaaaaaaaaaaaaaaaaaaaaaaaaaaaaaaaaaaaaaaaaaaaaaaaaaaaaaaaaaaaaaaaaaaaaaaaaaaa

SEQ ID NO: 2743 - RNA, 5419 nt, synthetic construct
  source 1..5419: mol_type = other RNA
aggaaataagagagaaaagaagagtaagaagaaatataagagccaccatggcccctaagaagaagcgtaaagtgagccgggtgaacggcagcggcagcggcggcggcatgaaccacgaccaggagttcgacccccctaaggtgtaccctcccgtccccgccgagaagagaaagcccatccgggtcctgagcctgttcgatggcatcgccaccggtctgctggtgctgaaggacctgggcatccaggtggataggtacattgcctccgaggtgtgcgaggactccatcaccgtgggaatggtgcgtcatcagggcaagatcatgtacgtgggcgacgtgcggagcgtgacacagaagcatatccaggagtggggccctttcgacctggtgatcggcggcagcccttgcaatgacctgagcatcgtgaacccagcccggaagggcctgtacgagggaaccggcagactgttcttcgagttttacagactgctgcacgacgcccggcctaaggaaggcgacgaccggcccttcttttggctgttcgagaatgtggtggccatgggagtcagcgacaagcgggatattagccggttcctggagagcaaccccgtgatgatcgatgccaaggaagtgagcgccgcccaccgggccagatacttctggggcaatctgcctggcatgaacagacccctggccagcaccgtgaacgacaagctggagctgcaggagtgcctggagcacggccggatcgccaagttcagcaaggtgagaaccatcaccacccgaagcaacagcatcaaacaaggcaaggaccagcactttcctgtgttcatgaacgagaaggaggacatcctgtggtgtaccgagatggagagagtgttcgggttcccagtccactacacagatgtcagcaacatgtctagactggccagacagagactgctgggaagaagctggtccgtccctgtgatcagacacctgttcgcccctctgaaggagtacttcgcctgcgtgagcagcggcaacagcaacgccaacagccggggccccagcttctctagcggcctggtgccactgtccctgagagggagccacatgggccccatggagatctacaaaaccgtgagcgcctggaagcggcagcctgtgcgcgtgctgagcctgtttcggaatatcgataaagtcctgaaaagcctgggattcctggagagcggctctggctccggcggtggcaccctgaagtacgtggaggatgtgacaaacgtggtcagacgggatgtggagaagtggggccccttcgatctggtgtacggcagcacccaacccctgggcagctcttgtgaccggtgccctggctggtacatgtttcagttccaccggatcctgcagtacgccctgccgagacaggagtcccagcggccattcttttggattttcatggacaacttgctgctgaccgaggatgaccaggaaactaccactcggttcctgcagaccgaagccgtgaccctgcaggacgtgagaggccgggactaccagaacgccatgcgggtgtggtccaacatccctggactgaaaagcaagcacgcacctctgacccctaaagaagaggagtacctgcaggcccaggtgcggagcagaagcaagctggacgcccctaaggtggatctgctggtgaagaattgcctcctgcccctgagagagtacttcaagtatttcagccagaatagtctgcccctgggcggcccaagcagcggcgcccctcctcccagcggcggcagcccagccggctccccaacctctaccgaggagggcacctctgagtccgccacccccgagagcggccctggcacctccaccgagcccagcgagggcagcgcacccggcagccctgccggcagccccacctccacagaggagggaaccagcaccgagcccagcgaaggcagcgccccaggcaccagcaccgagcctagtgagggcggctctggcggcggcagcgcccaggagattaaacggatcaacaagatcagaagaagacttgtgaaagacagcaacaccaagaaggccggcaagacaggccccatgaaaaccctgctggttagagtgatgacacccgatctgagagagcggctggaaaacctgagaaagaagcctgaaaatatcccccagcccatcagcaatacatctagagccaacctgaataagctgctgaccgattacaccgaaatgaagaaggcgatcctgcatgtgtactgggaagagttccagaaggaccctgtgggcctgatgagccgggtggcccagcctgccagcaagaagatcgatcagaacaagctgaaacctgagatggacgagaagggcaacctgaccaccgccggctttgcctgctctcagtgtggccagcccctgttcgtgtacaagctggagcaggtgtctgagaagggcaaggcttacaccaactacttcggacggtgcaatgtggccgagcacgaaaagctgatcctgctggcccagctgaagcccgagaaggatagcgacgaagccgtgacatatagcctgggaaagtttgggcagagggccctggatttctacagcattcatgtgaccaaggagtccacccaccccgtgaagcccctggcccagatcgccggaaacagatacgcctccggacctgtgggaaaggccctgagcgacgcatgtatgggcacaatcgcctccttcctgtctaagtaccaggacatcatcatcgaacaccagaaggtggtgaagggcaaccagaagagactggagagcctgcgggagctggccggcaaggaaaacctggaataccctagcgtgaccctgccacctcagcctcacaccaaggagggcgttgatgcctacaacgaagtgatcgcccgggtgcgaatgtgggtgaacctgaacctgtggcagaagctgaagctaagcagagatgatgccaagcctctgctgagactgaagggattcccttcctttcctctggtcgagagacaggccaacgaagtggactggtgggacatggtgtgtaacgtgaagaagctgatcaacgagaaaaaggaggatggcaaggtgttttggcagaatctggctggctacaagagacaggaagccctgagaccatacctgagcagcgaggaagatcggaagaagggaaagaaattcgctcggtaccagctgggcgacctgctgctgcacctggaaaagaagcacggcgaggactggggaaaggtgtacgacgaggcctgggagcggattgacaagaaagtggaaggcctgagcaagcacatcaagctggaagaggaacggagaagcgaggacgcccagagcaaggccgccctgaccgactggctgcgggctaaggccagcttcgtgatcgagggcctgaaggaggccgacaaggacgagttctgcagatgcgagctgaagctgcagaagtggtacggggacctgcggggaaagcccttcgccatcgaagccgagaacagcatcctggacatcagcggcttcagcaagcagtacaactgtgccttcatctggcagaaggacggcgtgaagaagctgaacctgtacctgatcatcaactacttcaagggcggcaagctgcggttcaagaagatcaaacctgaagccttcgaagccaacagattctacaccgtgatcaacaaaaagagcggcgagatcgtgcccatggaggtgaacttcaacttcgacgaccccaacctgatcatcctgcctctggcctttggcaagagacagggcagagaattcatctggaacgacctgctgtccctggaaaccggcagcctgaagctggccaacggaagagtgatcgagaagacactgtacaacagaagaacccggcaggatgagcctgccctgttcgtggccctgaccttcgagcggcgggaggtcctggactcctccaatatcaaaccaatgaacctgatcggcgtggcaagaggcgaaaacatccccgccgtgatcgccctgaccgaccccgagggctgcccactgagccggtttaaggatagcctgggaaacccaacccacatcctgagaatcggcgagagctataaggagaagcagcggaccatccaggccaagaaggaggtggagcagcggagagccggcggctacagccggaagtacgccagcaaagccaagaatctggcagacgatatggtgagaaacaccgctagagatctgctgtactacgccgtgacccaggatgccatgctgatcttcgccaacctgagccggggcttcggccggcagggcaagcggaccttcatggccgagagacagtacacacggatggaggactggctgaccgccaagctggcctacgagggcctgagcaagacctacctgtccaagacactggcccagtacacctccaagacatgcagcaactgtgggtttaccatcaccagcgccgactacgacagggtgctggagaagctgaagaagacagcaacaggctggatgaccacaattaacggcaaggagctgaaggtggagggccagattacctactacaacagatacaagagacagaacgtagtcaaggacctgtccgtcgagctggatagactgagcgaagaatctgtgaacaacgacatctcctcctggacaaagggcagaagcggagaagctctgagcctcctgaagaaaagattctcccatagacccgtgcaggagaagttcgtgtgcctgaactgcggcttcgagacacacgcagccgagcaagccgccctgaacatcgccagatcctggctgttcctgcggagccaggagtacaagaaataccagacaaacaagacaaccggcaacaccgataagagagccttcgtcgagacctggcagtccttttaccggaagaagcttaaggaggtgtggaaacctgccgtgcggtctggcggatctggcggaggctccacaagcaagcccgccgccgtgagcttcgccgacgtggccgtgtacttcagcgtggaggagtggggctgcctgaggcccgcccagagggccctgtacagggacgtgatgagggagacctacggccacctgggcgccctgggcttccccggccccaagcccgccctgatcagctggatggagcaggagagcgaggcctggagccccgccgcccaggaccccgaggagggcgagagcctgggcggcgccctgaccagccccaagaaaaagagaaaagtctaagctgccttctgcggggcttgccttctggccatgcccttcttctctcccttgcacctgtacctcttggtctttgaataaagcctgagtaggaaggctagcaaaaaaaaaaaaaaaaaaaaaaaaaaaaaaaaaaaaaaaaaaaaaaaaaaaaaaaaaaaaaaaaaaaaaaaaaaaaaaaa

SEQ ID NO: 2744 - RNA, 5419 nt, synthetic construct
  source 1..5419: mol_type = other RNA
aggaaataagagagaaaagaagagtaagaagaaatataagagccaccatggcccctaagaagaagcgtaaagtgagccgggtgaacggcagcggcagcggcggcggcatgaaccacgaccaggagttcgacccccctaaggtgtaccctcccgtccccgccgagaagagaaagcccatccgggtcctgagcctgttcgatggcatcgccaccggtctgctggtgctgaaggacctgggcatccaggtggataggtacattgcctccgaggtgtgcgaggactccatcaccgtgggaatggtgcgtcatcagggcaagatcatgtacgtgggcgacgtgcggagcgtgacacagaagcatatccaggagtggggccctttcgacctggtgatcggcggcagcccttgcaatgacctgagcatcgtgaacccagcccggaagggcctgtacgagggaaccggcagactgttcttcgagttttacagactgctgcacgacgcccggcctaaggaaggcgacgaccggcccttcttttggctgttcgagaatgtggtggccatgggagtcagcgacaagcgggatattagccggttcctggagagcaaccccgtgatgatcgatgccaaggaagtgagcgccgcccaccgggccagatacttctggggcaatctgcctggcatgaacagacccctggccagcaccgtgaacgacaagctggagctgcaggagtgcctggagcacggccggatcgccaagttcagcaaggtgagaaccatcaccacccgaagcaacagcatcaaacaaggcaaggaccagcactttcctgtgttcatgaacgagaaggaggacatcctgtggtgtaccgagatggagagagtgttcgggttcccagtccactacacagatgtcagcaacatgtctagactggccagacagagactgctgggaagaagctggtccgtccctgtgatcagacacctgttcgcccctctgaaggagtacttcgcctgcgtgagcagcggcaacagcaacgccaacagccggggccccagcttctctagcggcctggtgccactgtccctgagagggagccacatgggccccatggagatctacaaaaccgtgagcgcctggaagcggcagcctgtgcgcgtgctgagcctgtttcggaatatcgataaagtcctgaaaagcctgggattcctggagagcggctctggctccggcggtggcaccctgaagtacgtggaggatgtgacaaacgtggtcagacgggatgtggagaagtggggccccttcgatctggtgtacggcagcacccaacccctgggcagctcttgtgaccggtgccctggctggtacatgtttcagttccaccggatcctgcagtacgccctgccgagacaggagtcccagcggccattcttttggattttcatggacaacttgctgctgaccgaggatgaccaggaaactaccactcggttcctgcagaccgaagccgtgaccctgcaggacgtgagaggccgggactaccagaacgccatgcgggtgtggtccaacatccctggactgaaaagcaagcacgcacctctgacccctaaagaagaggagtacctgcaggcccaggtgcggagcagaagcaagctggacgcccctaaggtggatctgctggtgaagaattgcctcctgcccctgagagagtacttcaagtatttcagccagaatagtctgcccctgggcggcccaagcagcggcgcccctcctcccagcggcggcagcccagccggctccccaacctctaccgaggagggcacctctgagtccgccacccccgagagcggccctggcacctccaccgagcccagcgagggcagcgcacccggcagccctgccggcagccccacctccacagaggagggaaccagcaccgagcccagcgaaggcagcgccccaggcaccagcaccgagcctagtgagggcggctctggcggcggcagcgcccaggagattaaacggatcaacaagatcagaagaagacttgtgaaagacagcaacaccaagaaggccggcaagacaggccccatgaaaaccctgctggttagagtgatgacacccgatctgagagagcggctggaaaacctgagaaagaagcctgaaaatatcccccagcccatcagcaatacatctagagccaacctgaataagctgctgaccgattacaccgaaatgaagaaggcgatcctgcatgtgtactgggaagagttccagaaggaccctgtgggcctgatgagccgggtggcccagcctgccagcaagaagatcgatcagaacaagctgaaacctgagatggacgagaagggcaacctgaccaccgccggctttgcctgctctcagtgtggccagcccctgttcgtgtacaagctggagcaggtgtctgagaagggcaaggcttacaccaactacttcggacggtgcaatgtggccgagcacgaaaagctgatcctgctggcccagctgaagcccgagaaggatagcgacgaagccgtgacatatagcctgggaaagtttgggcagagggccctggatttctacagcattcatgtgaccaaggagtccacccaccccgtgaagcccctggcccagatcgccggaaacagatacgcctccggacctgtgggaaaggccctgagcgacgcatgtatgggcacaatcgcctccttcctgtctaagtaccaggacatcatcatcgaacaccagaaggtggtgaagggcaaccagaagagactggagagcctgcgggagctggccggcaaggaaaacctggaataccctagcgtgaccctgccacctcagcctcacaccaaggagggcgttgatgcctacaacgaagtgatcgcccgggtgcgaatgtgggtgaacctgaacctgtggcagaagctgaagctaagcagagatgatgccaagcctctgctgagactgaagggattcccttcctttcctctggtcgagagacaggccaacgaagtggactggtgggacatggtgtgtaacgtgaagaagctgatcaacgagaaaaaggaggatggcaaggtgttttggcagaatctggctggctacaagagacaggaagccctgagaccatacctgagcagcgaggaagatcggaagaagggaaagaaattcgctcggtaccagctgggcgacctgctgctgcacctggaaaagaagcacggcgaggactggggaaaggtgtacgacgaggcctgggagcggattgacaagaaagtggaaggcctgagcaagcacatcaagctggaagaggaacggagaagcgaggacgcccagagcaaggccgccctgaccgactggctgcgggctaaggccagcttcgtgatcgagggcctgaaggaggccgacaaggacgagttctgcagatgcgagctgaagctgcagaagtggtacggggacctgcggggaaagcccttcgccatcgaagccgagaacagcatcctggacatcagcggcttcagcaagcagtacaactgtgccttcatctggcagaaggacggcgtgaagaagctgaacctgtacctgatcatcaactacttcaagggcggcaagctgcggttcaagaagatcaaacctgaagccttcgaagccaacagattctacaccgtgatcaacaaaaagagcggcgagatcgtgcccatggaggtgaacttcaacttcgacgaccccaacctgatcatcctgcctctggcctttggcaagagacagggcagagaattcatctggaacgacctgctgtccctggaaaccggcagcctgaagctggccaacggaagagtgatcgagaagacactgtacaacagaagaacccggcaggatgagcctgccctgttcgtggccctgaccttcgagcggcgggaggtcctggactcctccaatatcaaaccaatgaacctgatcggcgtggcaagaggcgaaaacatccccgccgtgatcgccctgaccgaccccgagggctgcccactgagccggtttaaggatagcctgggaaacccaacccacatcctgagaatcggcgagagctataaggagaagcagcggaccatccaggccaagaaggaggtggagcagcggagagccggcggctacagccggaagtacgccagcaaagccaagaatctggcagacgatatggtgagaaacaccgctagagatctgctgtactacgccgtgacccaggatgccatgctgatcttcgccaacctgagccggggcttcggccggcagggcaagcggaccttcatggccgagagacagtacacacggatggaggactggctgaccgccaagctggcctacgagggcctgagcaagacctacctgtccaagacactggcccagtacacctccaagacatgcagcaactgtgggtttaccatcaccagcgccgactacgacagggtgctggagaagctgaagaagacagcaacaggctggatgaccacaattaacggcaaggagctgaaggtggagggccagattacctactacaacagatacaagagacagaacgtagtcaaggacctgtccgtcgagctggatagactgagcgaagaatctgtgaacaacgacatctcctcctggacaaagggcagaagcggagaagctctgagcctcctgaagaaaagattctcccatagacccgtgcaggagaagttcgtgtgcctgaactgcggcttcgagacacacgcagccgagcaagccgccctgaacatcgccagatcctggctgttcctgcggagccaggagtacaagaaataccagacaaacaagacaaccggcaacaccgataagagagccttcgtcgagacctggcagtccttttaccggaagaagcttaaggaggtgtggaaacctgccgtgcggtctggcggatctggcggaggctccacaagcctgcagggcagcgtgaccttccaggacgtggccgtggacttcagctgggaggagtggggccacctgggccccgcccagaaggagctgtacagggaggtgatgctggagaactacggcaacctggtgtgcctgggcctggccgtgagcagccccgacgtggtgtgccagctggagaggggcgagggcccctggatgcccgagggcgacgtgcccggcagcagctgcgccggctgggagaccaagaccagccccaagaaaaagagaaaagtctaagctgccttctgcggggcttgccttctggccatgcccttcttctctcccttgcacctgtacctcttggtctttgaataaagcctgagtaggaaggctagcaaaaaaaaaaaaaaaaaaaaaaaaaaaaaaaaaaaaaaaaaaaaaaaaaaaaaaaaaaaaaaaaaaaaaaaaaaaaaaaa

SEQ ID NO: 2745 - RNA, 5419 nt, synthetic construct
  source 1..5419: mol_type = other RNA
aggaaataagagagaaaagaagagtaagaagaaatataagagccaccatggcccctaagaagaagcgtaaagtgagccgggtgaacggcagcggcagcggcggcggcatgaaccacgaccaggagttcgacccccctaaggtgtaccctcccgtccccgccgagaagagaaagcccatccgggtcctgagcctgttcgatggcatcgccaccggtctgctggtgctgaaggacctgggcatccaggtggataggtacattgcctccgaggtgtgcgaggactccatcaccgtgggaatggtgcgtcatcagggcaagatcatgtacgtgggcgacgtgcggagcgtgacacagaagcatatccaggagtggggccctttcgacctggtgatcggcggcagcccttgcaatgacctgagcatcgtgaacccagcccggaagggcctgtacgagggaaccggcagactgttcttcgagttttacagactgctgcacgacgcccggcctaaggaaggcgacgaccggcccttcttttggctgttcgagaatgtggtggccatgggagtcagcgacaagcgggatattagccggttcctggagagcaaccccgtgatgatcgatgccaaggaagtgagcgccgcccaccgggccagatacttctggggcaatctgcctggcatgaacagacccctggccagcaccgtgaacgacaagctggagctgcaggagtgcctggagcacggccggatcgccaagttcagcaaggtgagaaccatcaccacccgaagcaacagcatcaaacaaggcaaggaccagcactttcctgtgttcatgaacgagaaggaggacatcctgtggtgtaccgagatggagagagtgttcgggttcccagtccactacacagatgtcagcaacatgtctagactggccagacagagactgctgggaagaagctggtccgtccctgtgatcagacacctgttcgcccctctgaaggagtacttcgcctgcgtgagcagcggcaacagcaacgccaacagccggggccccagcttctctagcggcctggtgccactgtccctgagagggagccacatgggccccatggagatctacaaaaccgtgagcgcctggaagcggcagcctgtgcgcgtgctgagcctgtttcggaatatcgataaagtcctgaaaagcctgggattcctggagagcggctctggctccggcggtggcaccctgaagtacgtggaggatgtgacaaacgtggtcagacgggatgtggagaagtggggccccttcgatctggtgtacggcagcacccaacccctgggcagctcttgtgaccggtgccctggctggtacatgtttcagttccaccggatcctgcagtacgccctgccgagacaggagtcccagcggccattcttttggattttcatggacaacttgctgctgaccgaggatgaccaggaaactaccactcggttcctgcagaccgaagccgtgaccctgcaggacgtgagaggccgggactaccagaacgccatgcgggtgtggtccaacatccctggactgaaaagcaagcacgcacctctgacccctaaagaagaggagtacctgcaggcccaggtgcggagcagaagcaagctggacgcccctaaggtggatctgctggtgaagaattgcctcctgcccctgagagagtacttcaagtatttcagccagaatagtctgcccctgggcggcccaagcagcggcgcccctcctcccagcggcggcagcccagccggctccccaacctctaccgaggagggcacctctgagtccgccacccccgagagcggccctggcacctccaccgagcccagcgagggcagcgcacccggcagccctgccggcagccccacctccacagaggagggaaccagcaccgagcccagcgaaggcagcgccccaggcaccagcaccgagcctagtgagggcggctctggcggcggcagcgcccaggagattaaacggatcaacaagatcagaagaagacttgtgaaagacagcaacaccaagaaggccggcaagacaggccccatgaaaaccctgctggttagagtgatgacacccgatctgagagagcggctggaaaacctgagaaagaagcctgaaaatatcccccagcccatcagcaatacatctagagccaacctgaataagctgctgaccgattacaccgaaatgaagaaggcgatcctgcatgtgtactgggaagagttccagaaggaccctgtgggcctgatgagccgggtggcccagcctgccagcaagaagatcgatcagaacaagctgaaacctgagatggacgagaagggcaacctgaccaccgccggctttgcctgctctcagtgtggccagcccctgttcgtgtacaagctggagcaggtgtctgagaagggcaaggcttacaccaactacttcggacggtgcaatgtggccgagcacgaaaagctgatcctgctggcccagctgaagcccgagaaggatagcgacgaagccgtgacatatagcctgggaaagtttgggcagagggccctggatttctacagcattcatgtgaccaaggagtccacccaccccgtgaagcccctggcccagatcgccggaaacagatacgcctccggacctgtgggaaaggccctgagcgacgcatgtatgggcacaatcgcctccttcctgtctaagtaccaggacatcatcatcgaacaccagaaggtggtgaagggcaaccagaagagactggagagcctgcgggagctggccggcaaggaaaacctggaataccctagcgtgaccctgccacctcagcctcacaccaaggagggcgttgatgcctacaacgaagtgatcgcccgggtgcgaatgtgggtgaacctgaacctgtggcagaagctgaagctaagcagagatgatgccaagcctctgctgagactgaagggattcccttcctttcctctggtcgagagacaggccaacgaagtggactggtgggacatggtgtgtaacgtgaagaagctgatcaacgagaaaaaggaggatggcaaggtgttttggcagaatctggctggctacaagagacaggaagccctgagaccatacctgagcagcgaggaagatcggaagaagggaaagaaattcgctcggtaccagctgggcgacctgctgctgcacctggaaaagaagcacggcgaggactggggaaaggtgtacgacgaggcctgggagcggattgacaagaaagtggaaggcctgagcaagcacatcaagctggaagaggaacggagaagcgaggacgcccagagcaaggccgccctgaccgactggctgcgggctaaggccagcttcgtgatcgagggcctgaaggaggccgacaaggacgagttctgcagatgcgagctgaagctgcagaagtggtacggggacctgcggggaaagcccttcgccatcgaagccgagaacagcatcctggacatcagcggcttcagcaagcagtacaactgtgccttcatctggcagaaggacggcgtgaagaagctgaacctgtacctgatcatcaactacttcaagggcggcaagctgcggttcaagaagatcaaacctgaagccttcgaagccaacagattctacaccgtgatcaacaaaaagagcggcgagatcgtgcccatggaggtgaacttcaacttcgacgaccccaacctgatcatcctgcctctggcctttggcaagagacagggcagagaattcatctggaacgacctgctgtccctggaaaccggcagcctgaagctggccaacggaagagtgatcgagaagacactgtacaacagaagaacccggcaggatgagcctgccctgttcgtggccctgaccttcgagcggcgggaggtcctggactcctccaatatcaaaccaatgaacctgatcggcgtggcaagaggcgaaaacatccccgccgtgatcgccctgaccgaccccgagggctgcccactgagccggtttaaggatagcctgggaaacccaacccacatcctgagaatcggcgagagctataaggagaagcagcggaccatccaggccaagaaggaggtggagcagcggagagccggcggctacagccggaagtacgccagcaaagccaagaatctggcagacgatatggtgagaaacaccgctagagatctgctgtactacgccgtgacccaggatgccatgctgatcttcgccaacctgagccggggcttcggccggcagggcaagcggaccttcatggccgagagacagtacacacggatggaggactggctgaccgccaagctggcctacgagggcctgagcaagacctacctgtccaagacactggcccagtacacctccaagacatgcagcaactgtgggtttaccatcaccagcgccgactacgacagggtgctggagaagctgaagaagacagcaacaggctggatgaccacaattaacggcaaggagctgaaggtggagggccagattacctactacaacagatacaagagacagaacgtagtcaaggacctgtccgtcgagctggatagactgagcgaagaatctgtgaacaacgacatctcctcctggacaaagggcagaagcggagaagctctgagcctcctgaagaaaagattctcccatagacccgtgcaggagaagttcgtgtgcctgaactgcggcttcgagacacacgcagccgagcaagccgccctgaacatcgccagatcctggctgttcctgcggagccaggagtacaagaaataccagacaaacaagacaaccggcaacaccgataagagagccttcgtcgagacctggcagtccttttaccggaagaagcttaaggaggtgtggaaacctgccgtgcggtctggcggatctggcggaggctccacaagcaccctggagagcgtgaccttccaggacgtggccgtggacttcacccaggaggagtgggccctgctggacaccagccagaggaccctgttcagggaggtgatgctggagaacatcagccacctggtgagcgtgggcaaccagctgtacaagagcgacgtgatcagccacctggagcagggcgagcagctgagcagggagggcctgggcttcctgcagggccagagccccgtgatcagcgacaggaccagccccaagaaaaagagaaaagtctaagctgccttctgcggggcttgccttctggccatgcccttcttctctcccttgcacctgtacctcttggtctttgaataaagcctgagtaggaaggctagcaaaaaaaaaaaaaaaaaaaaaaaaaaaaaaaaaaaaaaaaaaaaaaaaaaaaaaaaaaaaaaaaaaaaaaaaaaaaaaaa

SEQ ID NO: 2746 - RNA, 5419 nt, synthetic construct
  source 1..5419: mol_type = other RNA
aggaaataagagagaaaagaagagtaagaagaaatataagagccaccatggcccctaagaagaagcgtaaagtgagccgggtgaacggcagcggcagcggcggcggcatgaaccacgaccaggagttcgacccccctaaggtgtaccctcccgtccccgccgagaagagaaagcccatccgggtcctgagcctgttcgatggcatcgccaccggtctgctggtgctgaaggacctgggcatccaggtggataggtacattgcctccgaggtgtgcgaggactccatcaccgtgggaatggtgcgtcatcagggcaagatcatgtacgtgggcgacgtgcggagcgtgacacagaagcatatccaggagtggggccctttcgacctggtgatcggcggcagcccttgcaatgacctgagcatcgtgaacccagcccggaagggcctgtacgagggaaccggcagactgttcttcgagttttacagactgctgcacgacgcccggcctaaggaaggcgacgaccggcccttcttttggctgttcgagaatgtggtggccatgggagtcagcgacaagcgggatattagccggttcctggagagcaaccccgtgatgatcgatgccaaggaagtgagcgccgcccaccgggccagatacttctggggcaatctgcctggcatgaacagacccctggccagcaccgtgaacgacaagctggagctgcaggagtgcctggagcacggccggatcgccaagttcagcaaggtgagaaccatcaccacccgaagcaacagcatcaaacaaggcaaggaccagcactttcctgtgttcatgaacgagaaggaggacatcctgtggtgtaccgagatggagagagtgttcgggttcccagtccactacacagatgtcagcaacatgtctagactggccagacagagactgctgggaagaagctggtccgtccctgtgatcagacacctgttcgcccctctgaaggagtacttcgcctgcgtgagcagcggcaacagcaacgccaacagccggggccccagcttctctagcggcctggtgccactgtccctgagagggagccacatgggccccatggagatctacaaaaccgtgagcgcctggaagcggcagcctgtgcgcgtgctgagcctgtttcggaatatcgataaagtcctgaaaagcctgggattcctggagagcggctctggctccggcggtggcaccctgaagtacgtggaggatgtgacaaacgtggtcagacgggatgtggagaagtggggccccttcgatctggtgtacggcagcacccaacccctgggcagctcttgtgaccggtgccctggctggtacatgtttcagttccaccggatcctgcagtacgccctgccgagacaggagtcccagcggccattcttttggattttcatggacaacttgctgctgaccgaggatgaccaggaaactaccactcggttcctgcagaccgaagccgtgaccctgcaggacgtgagaggccgggactaccagaacgccatgcgggtgtggtccaacatccctggactgaaaagcaagcacgcacctctgacccctaaagaagaggagtacctgcaggcccaggtgcggagcagaagcaagctggacgcccctaaggtggatctgctggtgaagaattgcctcctgcccctgagagagtacttcaagtatttcagccagaatagtctgcccctgggcggcccaagcagcggcgcccctcctcccagcggcggcagcccagccggctccccaacctctaccgaggagggcacctctgagtccgccacccccgagagcggccctggcacctccaccgagcccagcgagggcagcgcacccggcagccctgccggcagccccacctccacagaggagggaaccagcaccgagcccagcgaaggcagcgccccaggcaccagcaccgagcctagtgagggcggctctggcggcggcagcgcccaggagattaaacggatcaacaagatcagaagaagacttgtgaaagacagcaacaccaagaaggccggcaagacaggccccatgaaaaccctgctggttagagtgatgacacccgatctgagagagcggctggaaaacctgagaaagaagcctgaaaatatcccccagcccatcagcaatacatctagagccaacctgaataagctgctgaccgattacaccgaaatgaagaaggcgatcctgcatgtgtactgggaagagttccagaaggaccctgtgggcctgatgagccgggtggcccagcctgccagcaagaagatcgatcagaacaagctgaaacctgagatggacgagaagggcaacctgaccaccgccggctttgcctgctctcagtgtggccagcccctgttcgtgtacaagctggagcaggtgtctgagaagggcaaggcttacaccaactacttcggacggtgcaatgtggccgagcacgaaaagctgatcctgctggcccagctgaagcccgagaaggatagcgacgaagccgtgacatatagcctgggaaagtttgggcagagggccctggatttctacagcattcatgtgaccaaggagtccacccaccccgtgaagcccctggcccagatcgccggaaacagatacgcctccggacctgtgggaaaggccctgagcgacgcatgtatgggcacaatcgcctccttcctgtctaagtaccaggacatcatcatcgaacaccagaaggtggtgaagggcaaccagaagagactggagagcctgcgggagctggccggcaaggaaaacctggaataccctagcgtgaccctgccacctcagcctcacaccaaggagggcgttgatgcctacaacgaagtgatcgcccgggtgcgaatgtgggtgaacctgaacctgtggcagaagctgaagctaagcagagatgatgccaagcctctgctgagactgaagggattcccttcctttcctctggtcgagagacaggccaacgaagtggactggtgggacatggtgtgtaacgtgaagaagctgatcaacgagaaaaaggaggatggcaaggtgttttggcagaatctggctggctacaagagacaggaagccctgagaccatacctgagcagcgaggaagatcggaagaagggaaagaaattcgctcggtaccagctgggcgacctgctgctgcacctggaaaagaagcacggcgaggactggggaaaggtgtacgacgaggcctgggagcggattgacaagaaagtggaaggcctgagcaagcacatcaagctggaagaggaacggagaagcgaggacgcccagagcaaggccgccctgaccgactggctgcgggctaaggccagcttcgtgatcgagggcctgaaggaggccgacaaggacgagttctgcagatgcgagctgaagctgcagaagtggtacggggacctgcggggaaagcccttcgccatcgaagccgagaacagcatcctggacatcagcggcttcagcaagcagtacaactgtgccttcatctggcagaaggacggcgtgaagaagctgaacctgtacctgatcatcaactacttcaagggcggcaagctgcggttcaagaagatcaaacctgaagccttcgaagccaacagattctacaccgtgatcaacaaaaagagcggcgagatcgtgcccatggaggtgaacttcaacttcgacgaccccaacctgatcatcctgcctctggcctttggcaagagacagggcagagaattcatctggaacgacctgctgtccctggaaaccggcagcctgaagctggccaacggaagagtgatcgagaagacactgtacaacagaagaacccggcaggatgagcctgccctgttcgtggccctgaccttcgagcggcgggaggtcctggactcctccaatatcaaaccaatgaacctgatcggcgtggcaagaggcgaaaacatccccgccgtgatcgccctgaccgaccccgagggctgcccactgagccggtttaaggatagcctgggaaacccaacccacatcctgagaatcggcgagagctataaggagaagcagcggaccatccaggccaagaaggaggtggagcagcggagagccggcggctacagccggaagtacgccagcaaagccaagaatctggcagacgatatggtgagaaacaccgctagagatctgctgtactacgccgtgacccaggatgccatgctgatcttcgccaacctgagccggggcttcggccggcagggcaagcggaccttcatggccgagagacagtacacacggatggaggactggctgaccgccaagctggcctacgagggcctgagcaagacctacctgtccaagacactggcccagtacacctccaagacatgcagcaactgtgggtttaccatcaccagcgccgactacgacagggtgctggagaagctgaagaagacagcaacaggctggatgaccacaattaacggcaaggagctgaaggtggagggccagattacctactacaacagatacaagagacagaacgtagtcaaggacctgtccgtcgagctggatagactgagcgaagaatctgtgaacaacgacatctcctcctggacaaagggcagaagcggagaagctctgagcctcctgaagaaaagattctcccatagacccgtgcaggagaagttcgtgtgcctgaactgcggcttcgagacacacgcagccgagcaagccgccctgaacatcgccagatcctggctgttcctgcggagccaggagtacaagaaataccagacaaacaagacaaccggcaacaccgataagagagccttcgtcgagacctggcagtccttttaccggaagaagcttaaggaggtgtggaaacctgccgtgcggtctggcggatctggcggaggctccacaagccaccaggaggtggtgaccttcgaggacgtggccgtgtacttcacccagaccgagtgggccggcctgagccccgcccagagggccctgtacaggagcgtgatgctggagatctacggcaacctgaccagcctgggctaccccgtgcccaagcccgccctggtgagcctgctggagaggggcgacctgcccgtgggcctggagacccaggacaacccccccgcccagggcaccagggacatctacaccagccccaagaaaaagagaaaagtctaagctgccttctgcggggcttgccttctggccatgcccttcttctctcccttgcacctgtacctcttggtctttgaataaagcctgagtaggaaggctagcaaaaaaaaaaaaaaaaaaaaaaaaaaaaaaaaaaaaaaaaaaaaaaaaaaaaaaaaaaaaaaaaaaaaaaaaaaaaaaaa

SEQ ID NO: 2747 - RNA, 5419 nt, synthetic construct
  source 1..5419: mol_type = other RNA
aggaaataagagagaaaagaagagtaagaagaaatataagagccaccatggcccctaagaagaagcgtaaagtgagccgggtgaacggcagcggcagcggcggcggcatgaaccacgaccaggagttcgacccccctaaggtgtaccctcccgtccccgccgagaagagaaagcccatccgggtcctgagcctgttcgatggcatcgccaccggtctgctggtgctgaaggacctgggcatccaggtggataggtacattgcctccgaggtgtgcgaggactccatcaccgtgggaatggtgcgtcatcagggcaagatcatgtacgtgggcgacgtgcggagcgtgacacagaagcatatccaggagtggggccctttcgacctggtgatcggcggcagcccttgcaatgacctgagcatcgtgaacccagcccggaagggcctgtacgagggaaccggcagactgttcttcgagttttacagactgctgcacgacgcccggcctaaggaaggcgacgaccggcccttcttttggctgttcgagaatgtggtggccatgggagtcagcgacaagcgggatattagccggttcctggagagcaaccccgtgatgatcgatgccaaggaagtgagcgccgcccaccgggccagatacttctggggcaatctgcctggcatgaacagacccctggccagcaccgtgaacgacaagctggagctgcaggagtgcctggagcacggccggatcgccaagttcagcaaggtgagaaccatcaccacccgaagcaacagcatcaaacaaggcaaggaccagcactttcctgtgttcatgaacgagaaggaggacatcctgtggtgtaccgagatggagagagtgttcgggttcccagtccactacacagatgtcagcaacatgtctagactggccagacagagactgctgggaagaagctggtccgtccctgtgatcagacacctgttcgcccctctgaaggagtacttcgcctgcgtgagcagcggcaacagcaacgccaacagccggggccccagcttctctagcggcctggtgccactgtccctgagagggagccacatgggccccatggagatctacaaaaccgtgagcgcctggaagcggcagcctgtgcgcgtgctgagcctgtttcggaatatcgataaagtcctgaaaagcctgggattcctggagagcggctctggctccggcggtggcaccctgaagtacgtggaggatgtgacaaacgtggtcagacgggatgtggagaagtggggccccttcgatctggtgtacggcagcacccaacccctgggcagctcttgtgaccggtgccctggctggtacatgtttcagttccaccggatcctgcagtacgccctgccgagacaggagtcccagcggccattcttttggattttcatggacaacttgctgctgaccgaggatgaccaggaaactaccactcggttcctgcagaccgaagccgtgaccctgcaggacgtgagaggccgggactaccagaacgccatgcgggtgtggtccaacatccctggactgaaaagcaagcacgcacctctgacccctaaagaagaggagtacctgcaggcccaggtgcggagcagaagcaagctggacgcccctaaggtggatctgctggtgaagaattgcctcctgcccctgagagagtacttcaagtatttcagccagaatagtctgcccctgggcggcccaagcagcggcgcccctcctcccagcggcggcagcccagccggctccccaacctctaccgaggagggcacctctgagtccgccacccccgagagcggccctggcacctccaccgagcccagcgagggcagcgcacccggcagccctgccggcagccccacctccacagaggagggaaccagcaccgagcccagcgaaggcagcgccccaggcaccagcaccgagcctagtgagggcggctctggcggcggcagcgcccaggagattaaacggatcaacaagatcagaagaagacttgtgaaagacagcaacaccaagaaggccggcaagacaggccccatgaaaaccctgctggttagagtgatgacacccgatctgagagagcggctggaaaacctgagaaagaagcctgaaaatatcccccagcccatcagcaatacatctagagccaacctgaataagctgctgaccgattacaccgaaatgaagaaggcgatcctgcatgtgtactgggaagagttccagaaggaccctgtgggcctgatgagccgggtggcccagcctgccagcaagaagatcgatcagaacaagctgaaacctgagatggacgagaagggcaacctgaccaccgccggctttgcctgctctcagtgtggccagcccctgttcgtgtacaagctggagcaggtgtctgagaagggcaaggcttacaccaactacttcggacggtgcaatgtggccgagcacgaaaagctgatcctgctggcccagctgaagcccgagaaggatagcgacgaagccgtgacatatagcctgggaaagtttgggcagagggccctggatttctacagcattcatgtgaccaaggagtccacccaccccgtgaagcccctggcccagatcgccggaaacagatacgcctccggacctgtgggaaaggccctgagcgacgcatgtatgggcacaatcgcctccttcctgtctaagtaccaggacatcatcatcgaacaccagaaggtggtgaagggcaaccagaagagactggagagcctgcgggagctggccggcaaggaaaacctggaataccctagcgtgaccctgccacctcagcctcacaccaaggagggcgttgatgcctacaacgaagtgatcgcccgggtgcgaatgtgggtgaacctgaacctgtggcagaagctgaagctaagcagagatgatgccaagcctctgctgagactgaagggattcccttcctttcctctggtcgagagacaggccaacgaagtggactggtgggacatggtgtgtaacgtgaagaagctgatcaacgagaaaaaggaggatggcaaggtgttttggcagaatctggctggctacaagagacaggaagccctgagaccatacctgagcagcgaggaagatcggaagaagggaaagaaattcgctcggtaccagctgggcgacctgctgctgcacctggaaaagaagcacggcgaggactggggaaaggtgtacgacgaggcctgggagcggattgacaagaaagtggaaggcctgagcaagcacatcaagctggaagaggaacggagaagcgaggacgcccagagcaaggccgccctgaccgactggctgcgggctaaggccagcttcgtgatcgagggcctgaaggaggccgacaaggacgagttctgcagatgcgagctgaagctgcagaagtggtacggggacctgcggggaaagcccttcgccatcgaagccgagaacagcatcctggacatcagcggcttcagcaagcagtacaactgtgccttcatctggcagaaggacggcgtgaagaagctgaacctgtacctgatcatcaactacttcaagggcggcaagctgcggttcaagaagatcaaacctgaagccttcgaagccaacagattctacaccgtgatcaacaaaaagagcggcgagatcgtgcccatggaggtgaacttcaacttcgacgaccccaacctgatcatcctgcctctggcctttggcaagagacagggcagagaattcatctggaacgacctgctgtccctggaaaccggcagcctgaagctggccaacggaagagtgatcgagaagacactgtacaacagaagaacccggcaggatgagcctgccctgttcgtggccctgaccttcgagcggcgggaggtcctggactcctccaatatcaaaccaatgaacctgatcggcgtggcaagaggcgaaaacatccccgccgtgatcgccctgaccgaccccgagggctgcccactgagccggtttaaggatagcctgggaaacccaacccacatcctgagaatcggcgagagctataaggagaagcagcggaccatccaggccaagaaggaggtggagcagcggagagccggcggctacagccggaagtacgccagcaaagccaagaatctggcagacgatatggtgagaaacaccgctagagatctgctgtactacgccgtgacccaggatgccatgctgatcttcgccaacctgagccggggcttcggccggcagggcaagcggaccttcatggccgagagacagtacacacggatggaggactggctgaccgccaagctggcctacgagggcctgagcaagacctacctgtccaagacactggcccagtacacctccaagacatgcagcaactgtgggtttaccatcaccagcgccgactacgacagggtgctggagaagctgaagaagacagcaacaggctggatgaccacaattaacggcaaggagctgaaggtggagggccagattacctactacaacagatacaagagacagaacgtagtcaaggacctgtccgtcgagctggatagactgagcgaagaatctgtgaacaacgacatctcctcctggacaaagggcagaagcggagaagctctgagcctcctgaagaaaagattctcccatagacccgtgcaggagaagttcgtgtgcctgaactgcggcttcgagacacacgcagccgagcaagccgccctgaacatcgccagatcctggctgttcctgcggagccaggagtacaagaaataccagacaaacaagacaaccggcaacaccgataagagagccttcgtcgagacctggcagtccttttaccggaagaagcttaaggaggtgtggaaacctgccgtgcggtctggcggatctggcggaggctccacaagcctggacgcccccgtgaccttcgaggacgtggccgtgtacttcagcgagaacgagtggacctgcctgacctgcccccagagggccctgtacagggacgtgatgctggagaactacggcgccgtggccagcctggccttcctgttccccaagcccgccctgatcagcaggctggagaggggcgaggccccctggtgcagcgccccccagggcgccctggacggcgagggctggaagggcgtgagcaccagccccaagaaaaagagaaaagtctaagctgccttctgcggggcttgccttctggccatgcccttcttctctcccttgcacctgtacctcttggtctttgaataaagcctgagtaggaaggctagcaaaaaaaaaaaaaaaaaaaaaaaaaaaaaaaaaaaaaaaaaaaaaaaaaaaaaaaaaaaaaaaaaaaaaaaaaaaaaaaa

SEQ ID NO: 2748 - RNA, 5419 nt, synthetic construct
  source 1..5419: mol_type = other RNA
aggaaataagagagaaaagaagagtaagaagaaatataagagccaccatggcccctaagaagaagcgtaaagtgagccgggtgaacggcagcggcagcggcggcggcatgaaccacgaccaggagttcgacccccctaaggtgtaccctcccgtccccgccgagaagagaaagcccatccgggtcctgagcctgttcgatggcatcgccaccggtctgctggtgctgaaggacctgggcatccaggtggataggtacattgcctccgaggtgtgcgaggactccatcaccgtgggaatggtgcgtcatcagggcaagatcatgtacgtgggcgacgtgcggagcgtgacacagaagcatatccaggagtggggccctttcgacctggtgatcggcggcagcccttgcaatgacctgagcatcgtgaacccagcccggaagggcctgtacgagggaaccggcagactgttcttcgagttttacagactgctgcacgacgcccggcctaaggaaggcgacgaccggcccttcttttggctgttcgagaatgtggtggccatgggagtcagcgacaagcgggatattagccggttcctggagagcaaccccgtgatgatcgatgccaaggaagtgagcgccgcccaccgggccagatacttctggggcaatctgcctggcatgaacagacccctggccagcaccgtgaacgacaagctggagctgcaggagtgcctggagcacggccggatcgccaagttcagcaaggtgagaaccatcaccacccgaagcaacagcatcaaacaaggcaaggaccagcactttcctgtgttcatgaacgagaaggaggacatcctgtggtgtaccgagatggagagagtgttcgggttcccagtccactacacagatgtcagcaacatgtctagactggccagacagagactgctgggaagaagctggtccgtccctgtgatcagacacctgttcgcccctctgaaggagtacttcgcctgcgtgagcagcggcaacagcaacgccaacagccggggccccagcttctctagcggcctggtgccactgtccctgagagggagccacatgggccccatggagatctacaaaaccgtgagcgcctggaagcggcagcctgtgcgcgtgctgagcctgtttcggaatatcgataaagtcctgaaaagcctgggattcctggagagcggctctggctccggcggtggcaccctgaagtacgtggaggatgtgacaaacgtggtcagacgggatgtggagaagtggggccccttcgatctggtgtacggcagcacccaacccctgggcagctcttgtgaccggtgccctggctggtacatgtttcagttccaccggatcctgcagtacgccctgccgagacaggagtcccagcggccattcttttggattttcatggacaacttgctgctgaccgaggatgaccaggaaactaccactcggttcctgcagaccgaagccgtgaccctgcaggacgtgagaggccgggactaccagaacgccatgcgggtgtggtccaacatccctggactgaaaagcaagcacgcacctctgacccctaaagaagaggagtacctgcaggcccaggtgcggagcagaagcaagctggacgcccctaaggtggatctgctggtgaagaattgcctcctgcccctgagagagtacttcaagtatttcagccagaatagtctgcccctgggcggcccaagcagcggcgcccctcctcccagcggcggcagcccagccggctccccaacctctaccgaggagggcacctctgagtccgccacccccgagagcggccctggcacctccaccgagcccagcgagggcagcgcacccggcagccctgccggcagccccacctccacagaggagggaaccagcaccgagcccagcgaaggcagcgccccaggcaccagcaccgagcctagtgagggcggctctggcggcggcagcgcccaggagattaaacggatcaacaagatcagaagaagacttgtgaaagacagcaacaccaagaaggccggcaagacaggccccatgaaaaccctgctggttagagtgatgacacccgatctgagagagcggctggaaaacctgagaaagaagcctgaaaatatcccccagcccatcagcaatacatctagagccaacctgaataagctgctgaccgattacaccgaaatgaagaaggcgatcctgcatgtgtactgggaagagttccagaaggaccctgtgggcctgatgagccgggtggcccagcctgccagcaagaagatcgatcagaacaagctgaaacctgagatggacgagaagggcaacctgaccaccgccggctttgcctgctctcagtgtggccagcccctgttcgtgtacaagctggagcaggtgtctgagaagggcaaggcttacaccaactacttcggacggtgcaatgtggccgagcacgaaaagctgatcctgctggcccagctgaagcccgagaaggatagcgacgaagccgtgacatatagcctgggaaagtttgggcagagggccctggatttctacagcattcatgtgaccaaggagtccacccaccccgtgaagcccctggcccagatcgccggaaacagatacgcctccggacctgtgggaaaggccctgagcgacgcatgtatgggcacaatcgcctccttcctgtctaagtaccaggacatcatcatcgaacaccagaaggtggtgaagggcaaccagaagagactggagagcctgcgggagctggccggcaaggaaaacctggaataccctagcgtgaccctgccacctcagcctcacaccaaggagggcgttgatgcctacaacgaagtgatcgcccgggtgcgaatgtgggtgaacctgaacctgtggcagaagctgaagctaagcagagatgatgccaagcctctgctgagactgaagggattcccttcctttcctctggtcgagagacaggccaacgaagtggactggtgggacatggtgtgtaacgtgaagaagctgatcaacgagaaaaaggaggatggcaaggtgttttggcagaatctggctggctacaagagacaggaagccctgagaccatacctgagcagcgaggaagatcggaagaagggaaagaaattcgctcggtaccagctgggcgacctgctgctgcacctggaaaagaagcacggcgaggactggggaaaggtgtacgacgaggcctgggagcggattgacaagaaagtggaaggcctgagcaagcacatcaagctggaagaggaacggagaagcgaggacgcccagagcaaggccgccctgaccgactggctgcgggctaaggccagcttcgtgatcgagggcctgaaggaggccgacaaggacgagttctgcagatgcgagctgaagctgcagaagtggtacggggacctgcggggaaagcccttcgccatcgaagccgagaacagcatcctggacatcagcggcttcagcaagcagtacaactgtgccttcatctggcagaaggacggcgtgaagaagctgaacctgtacctgatcatcaactacttcaagggcggcaagctgcggttcaagaagatcaaacctgaagccttcgaagccaacagattctacaccgtgatcaacaaaaagagcggcgagatcgtgcccatggaggtgaacttcaacttcgacgaccccaacctgatcatcctgcctctggcctttggcaagagacagggcagagaattcatctggaacgacctgctgtccctggaaaccggcagcctgaagctggccaacggaagagtgatcgagaagacactgtacaacagaagaacccggcaggatgagcctgccctgttcgtggccctgaccttcgagcggcgggaggtcctggactcctccaatatcaaaccaatgaacctgatcggcgtggcaagaggcgaaaacatccccgccgtgatcgccctgaccgaccccgagggctgcccactgagccggtttaaggatagcctgggaaacccaacccacatcctgagaatcggcgagagctataaggagaagcagcggaccatccaggccaagaaggaggtggagcagcggagagccggcggctacagccggaagtacgccagcaaagccaagaatctggcagacgatatggtgagaaacaccgctagagatctgctgtactacgccgtgacccaggatgccatgctgatcttcgccaacctgagccggggcttcggccggcagggcaagcggaccttcatggccgagagacagtacacacggatggaggactggctgaccgccaagctggcctacgagggcctgagcaagacctacctgtccaagacactggcccagtacacctccaagacatgcagcaactgtgggtttaccatcaccagcgccgactacgacagggtgctggagaagctgaagaagacagcaacaggctggatgaccacaattaacggcaaggagctgaaggtggagggccagattacctactacaacagatacaagagacagaacgtagtcaaggacctgtccgtcgagctggatagactgagcgaagaatctgtgaacaacgacatctcctcctggacaaagggcagaagcggagaagctctgagcctcctgaagaaaagattctcccatagacccgtgcaggagaagttcgtgtgcctgaactgcggcttcgagacacacgcagccgagcaagccgccctgaacatcgccagatcctggctgttcctgcggagccaggagtacaagaaataccagacaaacaagacaaccggcaacaccgataagagagccttcgtcgagacctggcagtccttttaccggaagaagcttaaggaggtgtggaaacctgccgtgcggtctggcggatctggcggaggctccacaagcatggccgccatgcccctgaaggcccagtaccaggagatggtgaccttcgaggacgtggccgtgcacttcaccaagaccgagtggaccggcctgagccccgcccagagggccctgtacaggagcgtgatgctggagaacttcggcaacctgaccgccctgggctaccccgtgcccaagcccgccctgatcagcctgctggagggcggcgacatggcctggggcctggaggcccaggacgaccccaccagccccaagaaaaagagaaaagtctaagctgccttctgcggggcttgccttctggccatgcccttcttctctcccttgcacctgtacctcttggtctttgaataaagcctgagtaggaaggctagcaaaaaaaaaaaaaaaaaaaaaaaaaaaaaaaaaaaaaaaaaaaaaaaaaaaaaaaaaaaaaaaaaaaaaaaaaaaaaaaa

SEQ ID NO: 2749 - RNA, 5419 nt, synthetic construct
  source 1..5419: mol_type = other RNA
aggaaataagagagaaaagaagagtaagaagaaatataagagccaccatggcccctaagaagaagcgtaaagtgagccgggtgaacggcagcggcagcggcggcggcatgaaccacgaccaggagttcgacccccctaaggtgtaccctcccgtccccgccgagaagagaaagcccatccgggtcctgagcctgttcgatggcatcgccaccggtctgctggtgctgaaggacctgggcatccaggtggataggtacattgcctccgaggtgtgcgaggactccatcaccgtgggaatggtgcgtcatcagggcaagatcatgtacgtgggcgacgtgcggagcgtgacacagaagcatatccaggagtggggccctttcgacctggtgatcggcggcagcccttgcaatgacctgagcatcgtgaacccagcccggaagggcctgtacgagggaaccggcagactgttcttcgagttttacagactgctgcacgacgcccggcctaaggaaggcgacgaccggcccttcttttggctgttcgagaatgtggtggccatgggagtcagcgacaagcgggatattagccggttcctggagagcaaccccgtgatgatcgatgccaaggaagtgagcgccgcccaccgggccagatacttctggggcaatctgcctggcatgaacagacccctggccagcaccgtgaacgacaagctggagctgcaggagtgcctggagcacggccggatcgccaagttcagcaaggtgagaaccatcaccacccgaagcaacagcatcaaacaaggcaaggaccagcactttcctgtgttcatgaacgagaaggaggacatcctgtggtgtaccgagatggagagagtgttcgggttcccagtccactacacagatgtcagcaacatgtctagactggccagacagagactgctgggaagaagctggtccgtccctgtgatcagacacctgttcgcccctctgaaggagtacttcgcctgcgtgagcagcggcaacagcaacgccaacagccggggccccagcttctctagcggcctggtgccactgtccctgagagggagccacatgggccccatggagatctacaaaaccgtgagcgcctggaagcggcagcctgtgcgcgtgctgagcctgtttcggaatatcgataaagtcctgaaaagcctgggattcctggagagcggctctggctccggcggtggcaccctgaagtacgtggaggatgtgacaaacgtggtcagacgggatgtggagaagtggggccccttcgatctggtgtacggcagcacccaacccctgggcagctcttgtgaccggtgccctggctggtacatgtttcagttccaccggatcctgcagtacgccctgccgagacaggagtcccagcggccattcttttggattttcatggacaacttgctgctgaccgaggatgaccaggaaactaccactcggttcctgcagaccgaagccgtgaccctgcaggacgtgagaggccgggactaccagaacgccatgcgggtgtggtccaacatccctggactgaaaagcaagcacgcacctctgacccctaaagaagaggagtacctgcaggcccaggtgcggagcagaagcaagctggacgcccctaaggtggatctgctggtgaagaattgcctcctgcccctgagagagtacttcaagtatttcagccagaatagtctgcccctgggcggcccaagcagcggcgcccctcctcccagcggcggcagcccagccggctccccaacctctaccgaggagggcacctctgagtccgccacccccgagagcggccctggcacctccaccgagcccagcgagggcagcgcacccggcagccctgccggcagccccacctccacagaggagggaaccagcaccgagcccagcgaaggcagcgccccaggcaccagcaccgagcctagtgagggcggctctggcggcggcagcgcccaggagattaaacggatcaacaagatcagaagaagacttgtgaaagacagcaacaccaagaaggccggcaagacaggccccatgaaaaccctgctggttagagtgatgacacccgatctgagagagcggctggaaaacctgagaaagaagcctgaaaatatcccccagcccatcagcaatacatctagagccaacctgaataagctgctgaccgattacaccgaaatgaagaaggcgatcctgcatgtgtactgggaagagttccagaaggaccctgtgggcctgatgagccgggtggcccagcctgccagcaagaagatcgatcagaacaagctgaaacctgagatggacgagaagggcaacctgaccaccgccggctttgcctgctctcagtgtggccagcccctgttcgtgtacaagctggagcaggtgtctgagaagggcaaggcttacaccaactacttcggacggtgcaatgtggccgagcacgaaaagctgatcctgctggcccagctgaagcccgagaaggatagcgacgaagccgtgacatatagcctgggaaagtttgggcagagggccctggatttctacagcattcatgtgaccaaggagtccacccaccccgtgaagcccctggcccagatcgccggaaacagatacgcctccggacctgtgggaaaggccctgagcgacgcatgtatgggcacaatcgcctccttcctgtctaagtaccaggacatcatcatcgaacaccagaaggtggtgaagggcaaccagaagagactggagagcctgcgggagctggccggcaaggaaaacctggaataccctagcgtgaccctgccacctcagcctcacaccaaggagggcgttgatgcctacaacgaagtgatcgcccgggtgcgaatgtgggtgaacctgaacctgtggcagaagctgaagctaagcagagatgatgccaagcctctgctgagactgaagggattcccttcctttcctctggtcgagagacaggccaacgaagtggactggtgggacatggtgtgtaacgtgaagaagctgatcaacgagaaaaaggaggatggcaaggtgttttggcagaatctggctggctacaagagacaggaagccctgagaccatacctgagcagcgaggaagatcggaagaagggaaagaaattcgctcggtaccagctgggcgacctgctgctgcacctggaaaagaagcacggcgaggactggggaaaggtgtacgacgaggcctgggagcggattgacaagaaagtggaaggcctgagcaagcacatcaagctggaagaggaacggagaagcgaggacgcccagagcaaggccgccctgaccgactggctgcgggctaaggccagcttcgtgatcgagggcctgaaggaggccgacaaggacgagttctgcagatgcgagctgaagctgcagaagtggtacggggacctgcggggaaagcccttcgccatcgaagccgagaacagcatcctggacatcagcggcttcagcaagcagtacaactgtgccttcatctggcagaaggacggcgtgaagaagctgaacctgtacctgatcatcaactacttcaagggcggcaagctgcggttcaagaagatcaaacctgaagccttcgaagccaacagattctacaccgtgatcaacaaaaagagcggcgagatcgtgcccatggaggtgaacttcaacttcgacgaccccaacctgatcatcctgcctctggcctttggcaagagacagggcagagaattcatctggaacgacctgctgtccctggaaaccggcagcctgaagctggccaacggaagagtgatcgagaagacactgtacaacagaagaacccggcaggatgagcctgccctgttcgtggccctgaccttcgagcggcgggaggtcctggactcctccaatatcaaaccaatgaacctgatcggcgtggcaagaggcgaaaacatccccgccgtgatcgccctgaccgaccccgagggctgcccactgagccggtttaaggatagcctgggaaacccaacccacatcctgagaatcggcgagagctataaggagaagcagcggaccatccaggccaagaaggaggtggagcagcggagagccggcggctacagccggaagtacgccagcaaagccaagaatctggcagacgatatggtgagaaacaccgctagagatctgctgtactacgccgtgacccaggatgccatgctgatcttcgccaacctgagccggggcttcggccggcagggcaagcggaccttcatggccgagagacagtacacacggatggaggactggctgaccgccaagctggcctacgagggcctgagcaagacctacctgtccaagacactggcccagtacacctccaagacatgcagcaactgtgggtttaccatcaccagcgccgactacgacagggtgctggagaagctgaagaagacagcaacaggctggatgaccacaattaacggcaaggagctgaaggtggagggccagattacctactacaacagatacaagagacagaacgtagtcaaggacctgtccgtcgagctggatagactgagcgaagaatctgtgaacaacgacatctcctcctggacaaagggcagaagcggagaagctctgagcctcctgaagaaaagattctcccatagacccgtgcaggagaagttcgtgtgcctgaactgcggcttcgagacacacgcagccgagcaagccgccctgaacatcgccagatcctggctgttcctgcggagccaggagtacaagaaataccagacaaacaagacaaccggcaacaccgataagagagccttcgtcgagacctggcagtccttttaccggaagaagcttaaggaggtgtggaaacctgccgtgcggtctggcggatctggcggaggctccacaagcagcgtgaccttcagggacgtgatcgtggacttcacccaggaggagtggcagcagctgaagcccgcccagaaggacctgtacagggacgtgatgatggaggtgtactggaacctggtgagcctggacgtggagaccaggcccgacgccaaggagagcgacccccaggaggacgactgggaggacaggcccagcgtggtggtgatcgccgagggccccaccaggaacggcgccaggagctacaccaccagccccaagaaaaagagaaaagtctaagctgccttctgcggggcttgccttctggccatgcccttcttctctcccttgcacctgtacctcttggtctttgaataaagcctgagtaggaaggctagcaaaaaaaaaaaaaaaaaaaaaaaaaaaaaaaaaaaaaaaaaaaaaaaaaaaaaaaaaaaaaaaaaaaaaaaaaaaaaaaa

SEQ ID NO: 2750 - RNA, 5419 nt, synthetic construct
  source 1..5419: mol_type = other RNA
aggaaataagagagaaaagaagagtaagaagaaatataagagccaccatggcccctaagaagaagcgtaaagtgagccgggtgaacggcagcggcagcggcggcggcatgaaccacgaccaggagttcgacccccctaaggtgtaccctcccgtccccgccgagaagagaaagcccatccgggtcctgagcctgttcgatggcatcgccaccggtctgctggtgctgaaggacctgggcatccaggtggataggtacattgcctccgaggtgtgcgaggactccatcaccgtgggaatggtgcgtcatcagggcaagatcatgtacgtgggcgacgtgcggagcgtgacacagaagcatatccaggagtggggccctttcgacctggtgatcggcggcagcccttgcaatgacctgagcatcgtgaacccagcccggaagggcctgtacgagggaaccggcagactgttcttcgagttttacagactgctgcacgacgcccggcctaaggaaggcgacgaccggcccttcttttggctgttcgagaatgtggtggccatgggagtcagcgacaagcgggatattagccggttcctggagagcaaccccgtgatgatcgatgccaaggaagtgagcgccgcccaccgggccagatacttctggggcaatctgcctggcatgaacagacccctggccagcaccgtgaacgacaagctggagctgcaggagtgcctggagcacggccggatcgccaagttcagcaaggtgagaaccatcaccacccgaagcaacagcatcaaacaaggcaaggaccagcactttcctgtgttcatgaacgagaaggaggacatcctgtggtgtaccgagatggagagagtgttcgggttcccagtccactacacagatgtcagcaacatgtctagactggccagacagagactgctgggaagaagctggtccgtccctgtgatcagacacctgttcgcccctctgaaggagtacttcgcctgcgtgagcagcggcaacagcaacgccaacagccggggccccagcttctctagcggcctggtgccactgtccctgagagggagccacatgggccccatggagatctacaaaaccgtgagcgcctggaagcggcagcctgtgcgcgtgctgagcctgtttcggaatatcgataaagtcctgaaaagcctgggattcctggagagcggctctggctccggcggtggcaccctgaagtacgtggaggatgtgacaaacgtggtcagacgggatgtggagaagtggggccccttcgatctggtgtacggcagcacccaacccctgggcagctcttgtgaccggtgccctggctggtacatgtttcagttccaccggatcctgcagtacgccctgccgagacaggagtcccagcggccattcttttggattttcatggacaacttgctgctgaccgaggatgaccaggaaactaccactcggttcctgcagaccgaagccgtgaccctgcaggacgtgagaggccgggactaccagaacgccatgcgggtgtggtccaacatccctggactgaaaagcaagcacgcacctctgacccctaaagaagaggagtacctgcaggcccaggtgcggagcagaagcaagctggacgcccctaaggtggatctgctggtgaagaattgcctcctgcccctgagagagtacttcaagtatttcagccagaatagtctgcccctgggcggcccaagcagcggcgcccctcctcccagcggcggcagcccagccggctccccaacctctaccgaggagggcacctctgagtccgccacccccgagagcggccctggcacctccaccgagcccagcgagggcagcgcacccggcagccctgccggcagccccacctccacagaggagggaaccagcaccgagcccagcgaaggcagcgccccaggcaccagcaccgagcctagtgagggcggctctggcggcggcagcgcccaggagattaaacggatcaacaagatcagaagaagacttgtgaaagacagcaacaccaagaaggccggcaagacaggccccatgaaaaccctgctggttagagtgatgacacccgatctgagagagcggctggaaaacctgagaaagaagcctgaaaatatcccccagcccatcagcaatacatctagagccaacctgaataagctgctgaccgattacaccgaaatgaagaaggcgatcctgcatgtgtactgggaagagttccagaaggaccctgtgggcctgatgagccgggtggcccagcctgccagcaagaagatcgatcagaacaagctgaaacctgagatggacgagaagggcaacctgaccaccgccggctttgcctgctctcagtgtggccagcccctgttcgtgtacaagctggagcaggtgtctgagaagggcaaggcttacaccaactacttcggacggtgcaatgtggccgagcacgaaaagctgatcctgctggcccagctgaagcccgagaaggatagcgacgaagccgtgacatatagcctgggaaagtttgggcagagggccctggatttctacagcattcatgtgaccaaggagtccacccaccccgtgaagcccctggcccagatcgccggaaacagatacgcctccggacctgtgggaaaggccctgagcgacgcatgtatgggcacaatcgcctccttcctgtctaagtaccaggacatcatcatcgaacaccagaaggtggtgaagggcaaccagaagagactggagagcctgcgggagctggccggcaaggaaaacctggaataccctagcgtgaccctgccacctcagcctcacaccaaggagggcgttgatgcctacaacgaagtgatcgcccgggtgcgaatgtgggtgaacctgaacctgtggcagaagctgaagctaagcagagatgatgccaagcctctgctgagactgaagggattcccttcctttcctctggtcgagagacaggccaacgaagtggactggtgggacatggtgtgtaacgtgaagaagctgatcaacgagaaaaaggaggatggcaaggtgttttggcagaatctggctggctacaagagacaggaagccctgagaccatacctgagcagcgaggaagatcggaagaagggaaagaaattcgctcggtaccagctgggcgacctgctgctgcacctggaaaagaagcacggcgaggactggggaaaggtgtacgacgaggcctgggagcggattgacaagaaagtggaaggcctgagcaagcacatcaagctggaagaggaacggagaagcgaggacgcccagagcaaggccgccctgaccgactggctgcgggctaaggccagcttcgtgatcgagggcctgaaggaggccgacaaggacgagttctgcagatgcgagctgaagctgcagaagtggtacggggacctgcggggaaagcccttcgccatcgaagccgagaacagcatcctggacatcagcggcttcagcaagcagtacaactgtgccttcatctggcagaaggacggcgtgaagaagctgaacctgtacctgatcatcaactacttcaagggcggcaagctgcggttcaagaagatcaaacctgaagccttcgaagccaacagattctacaccgtgatcaacaaaaagagcggcgagatcgtgcccatggaggtgaacttcaacttcgacgaccccaacctgatcatcctgcctctggcctttggcaagagacagggcagagaattcatctggaacgacctgctgtccctggaaaccggcagcctgaagctggccaacggaagagtgatcgagaagacactgtacaacagaagaacccggcaggatgagcctgccctgttcgtggccctgaccttcgagcggcgggaggtcctggactcctccaatatcaaaccaatgaacctgatcggcgtggcaagaggcgaaaacatccccgccgtgatcgccctgaccgaccccgagggctgcccactgagccggtttaaggatagcctgggaaacccaacccacatcctgagaatcggcgagagctataaggagaagcagcggaccatccaggccaagaaggaggtggagcagcggagagccggcggctacagccggaagtacgccagcaaagccaagaatctggcagacgatatggtgagaaacaccgctagagatctgctgtactacgccgtgacccaggatgccatgctgatcttcgccaacctgagccggggcttcggccggcagggcaagcggaccttcatggccgagagacagtacacacggatggaggactggctgaccgccaagctggcctacgagggcctgagcaagacctacctgtccaagacactggcccagtacacctccaagacatgcagcaactgtgggtttaccatcaccagcgccgactacgacagggtgctggagaagctgaagaagacagcaacaggctggatgaccacaattaacggcaaggagctgaaggtggagggccagattacctactacaacagatacaagagacagaacgtagtcaaggacctgtccgtcgagctggatagactgagcgaagaatctgtgaacaacgacatctcctcctggacaaagggcagaagcggagaagctctgagcctcctgaagaaaagattctcccatagacccgtgcaggagaagttcgtgtgcctgaactgcggcttcgagacacacgcagccgagcaagccgccctgaacatcgccagatcctggctgttcctgcggagccaggagtacaagaaataccagacaaacaagacaaccggcaacaccgataagagagccttcgtcgagacctggcagtccttttaccggaagaagcttaaggaggtgtggaaacctgccgtgcggtctggcggatctggcggaggctccacaagcagccacgagctgctgaccttcaaggacatcagcgtggacttcacccaggaggagtggggccagctggcccccgcctaccagaacctgtacagggaggtgatgctggagaactacagcaacctggtgagcgtggccggctaccagctgagcaagcccagcgtgatcagccagctggagaagggcgaggagccctggatggccgagaaggagggccccggcgaccccagcagcgacctgaagagcaccagccccaagaaaaagagaaaagtctaagctgccttctgcggggcttgccttctggccatgcccttcttctctcccttgcacctgtacctcttggtctttgaataaagcctgagtaggaaggctagcaaaaaaaaaaaaaaaaaaaaaaaaaaaaaaaaaaaaaaaaaaaaaaaaaaaaaaaaaaaaaaaaaaaaaaaaaaaaaaaa

SEQ ID NO: 2751 - RNA, 5419 nt, synthetic construct
  source 1..5419: mol_type = other RNA
aggaaataagagagaaaagaagagtaagaagaaatataagagccaccatggcccctaagaagaagcgtaaagtgagccgggtgaacggcagcggcagcggcggcggcatgaaccacgaccaggagttcgacccccctaaggtgtaccctcccgtccccgccgagaagagaaagcccatccgggtcctgagcctgttcgatggcatcgccaccggtctgctggtgctgaaggacctgggcatccaggtggataggtacattgcctccgaggtgtgcgaggactccatcaccgtgggaatggtgcgtcatcagggcaagatcatgtacgtgggcgacgtgcggagcgtgacacagaagcatatccaggagtggggccctttcgacctggtgatcggcggcagcccttgcaatgacctgagcatcgtgaacccagcccggaagggcctgtacgagggaaccggcagactgttcttcgagttttacagactgctgcacgacgcccggcctaaggaaggcgacgaccggcccttcttttggctgttcgagaatgtggtggccatgggagtcagcgacaagcgggatattagccggttcctggagagcaaccccgtgatgatcgatgccaaggaagtgagcgccgcccaccgggccagatacttctggggcaatctgcctggcatgaacagacccctggccagcaccgtgaacgacaagctggagctgcaggagtgcctggagcacggccggatcgccaagttcagcaaggtgagaaccatcaccacccgaagcaacagcatcaaacaaggcaaggaccagcactttcctgtgttcatgaacgagaaggaggacatcctgtggtgtaccgagatggagagagtgttcgggttcccagtccactacacagatgtcagcaacatgtctagactggccagacagagactgctgggaagaagctggtccgtccctgtgatcagacacctgttcgcccctctgaaggagtacttcgcctgcgtgagcagcggcaacagcaacgccaacagccggggccccagcttctctagcggcctggtgccactgtccctgagagggagccacatgggccccatggagatctacaaaaccgtgagcgcctggaagcggcagcctgtgcgcgtgctgagcctgtttcggaatatcgataaagtcctgaaaagcctgggattcctggagagcggctctggctccggcggtggcaccctgaagtacgtggaggatgtgacaaacgtggtcagacgggatgtggagaagtggggccccttcgatctggtgtacggcagcacccaacccctgggcagctcttgtgaccggtgccctggctggtacatgtttcagttccaccggatcctgcagtacgccctgccgagacaggagtcccagcggccattcttttggattttcatggacaacttgctgctgaccgaggatgaccaggaaactaccactcggttcctgcagaccgaagccgtgaccctgcaggacgtgagaggccgggactaccagaacgccatgcgggtgtggtccaacatccctggactgaaaagcaagcacgcacctctgacccctaaagaagaggagtacctgcaggcccaggtgcggagcagaagcaagctggacgcccctaaggtggatctgctggtgaagaattgcctcctgcccctgagagagtacttcaagtatttcagccagaatagtctgcccctgggcggcccaagcagcggcgcccctcctcccagcggcggcagcccagccggctccccaacctctaccgaggagggcacctctgagtccgccacccccgagagcggccctggcacctccaccgagcccagcgagggcagcgcacccggcagccctgccggcagccccacctccacagaggagggaaccagcaccgagcccagcgaaggcagcgccccaggcaccagcaccgagcctagtgagggcggctctggcggcggcagcgcccaggagattaaacggatcaacaagatcagaagaagacttgtgaaagacagcaacaccaagaaggccggcaagacaggccccatgaaaaccctgctggttagagtgatgacacccgatctgagagagcggctggaaaacctgagaaagaagcctgaaaatatcccccagcccatcagcaatacatctagagccaacctgaataagctgctgaccgattacaccgaaatgaagaaggcgatcctgcatgtgtactgggaagagttccagaaggaccctgtgggcctgatgagccgggtggcccagcctgccagcaagaagatcgatcagaacaagctgaaacctgagatggacgagaagggcaacctgaccaccgccggctttgcctgctctcagtgtggccagcccctgttcgtgtacaagctggagcaggtgtctgagaagggcaaggcttacaccaactacttcggacggtgcaatgtggccgagcacgaaaagctgatcctgctggcccagctgaagcccgagaaggatagcgacgaagccgtgacatatagcctgggaaagtttgggcagagggccctggatttctacagcattcatgtgaccaaggagtccacccaccccgtgaagcccctggcccagatcgccggaaacagatacgcctccggacctgtgggaaaggccctgagcgacgcatgtatgggcacaatcgcctccttcctgtctaagtaccaggacatcatcatcgaacaccagaaggtggtgaagggcaaccagaagagactggagagcctgcgggagctggccggcaaggaaaacctggaataccctagcgtgaccctgccacctcagcctcacaccaaggagggcgttgatgcctacaacgaagtgatcgcccgggtgcgaatgtgggtgaacctgaacctgtggcagaagctgaagctaagcagagatgatgccaagcctctgctgagactgaagggattcccttcctttcctctggtcgagagacaggccaacgaagtggactggtgggacatggtgtgtaacgtgaagaagctgatcaacgagaaaaaggaggatggcaaggtgttttggcagaatctggctggctacaagagacaggaagccctgagaccatacctgagcagcgaggaagatcggaagaagggaaagaaattcgctcggtaccagctgggcgacctgctgctgcacctggaaaagaagcacggcgaggactggggaaaggtgtacgacgaggcctgggagcggattgacaagaaagtggaaggcctgagcaagcacatcaagctggaagaggaacggagaagcgaggacgcccagagcaaggccgccctgaccgactggctgcgggctaaggccagcttcgtgatcgagggcctgaaggaggccgacaaggacgagttctgcagatgcgagctgaagctgcagaagtggtacggggacctgcggggaaagcccttcgccatcgaagccgagaacagcatcctggacatcagcggcttcagcaagcagtacaactgtgccttcatctggcagaaggacggcgtgaagaagctgaacctgtacctgatcatcaactacttcaagggcggcaagctgcggttcaagaagatcaaacctgaagccttcgaagccaacagattctacaccgtgatcaacaaaaagagcggcgagatcgtgcccatggaggtgaacttcaacttcgacgaccccaacctgatcatcctgcctctggcctttggcaagagacagggcagagaattcatctggaacgacctgctgtccctggaaaccggcagcctgaagctggccaacggaagagtgatcgagaagacactgtacaacagaagaacccggcaggatgagcctgccctgttcgtggccctgaccttcgagcggcgggaggtcctggactcctccaatatcaaaccaatgaacctgatcggcgtggcaagaggcgaaaacatccccgccgtgatcgccctgaccgaccccgagggctgcccactgagccggtttaaggatagcctgggaaacccaacccacatcctgagaatcggcgagagctataaggagaagcagcggaccatccaggccaagaaggaggtggagcagcggagagccggcggctacagccggaagtacgccagcaaagccaagaatctggcagacgatatggtgagaaacaccgctagagatctgctgtactacgccgtgacccaggatgccatgctgatcttcgccaacctgagccggggcttcggccggcagggcaagcggaccttcatggccgagagacagtacacacggatggaggactggctgaccgccaagctggcctacgagggcctgagcaagacctacctgtccaagacactggcccagtacacctccaagacatgcagcaactgtgggtttaccatcaccagcgccgactacgacagggtgctggagaagctgaagaagacagcaacaggctggatgaccacaattaacggcaaggagctgaaggtggagggccagattacctactacaacagatacaagagacagaacgtagtcaaggacctgtccgtcgagctggatagactgagcgaagaatctgtgaacaacgacatctcctcctggacaaagggcagaagcggagaagctctgagcctcctgaagaaaagattctcccatagacccgtgcaggagaagttcgtgtgcctgaactgcggcttcgagacacacgcagccgagcaagccgccctgaacatcgccagatcctggctgttcctgcggagccaggagtacaagaaataccagacaaacaagacaaccggcaacaccgataagagagccttcgtcgagacctggcagtccttttaccggaagaagcttaaggaggtgtggaaacctgccgtgcggtctggcggatctggcggaggctccacaagcatggagctggtgaccttcgaggacgtggccgtgtacttcaccaggaaggagtggggctggctggaccccgcccagagggacctgtacagggacgtgatgctggagaactacggcaacttcgtgagcatgggcctgcccttcagcaagcccgacgtgatcagccagctggagcagggcgaggagagctgggtggaggacctgcaggagtgcgaggagggcgagttcagccccgtggtgcacagcaccagccccaagaaaaagagaaaagtctaagctgccttctgcggggcttgccttctggccatgcccttcttctctcccttgcacctgtacctcttggtctttgaataaagcctgagtaggaaggctagcaaaaaaaaaaaaaaaaaaaaaaaaaaaaaaaaaaaaaaaaaaaaaaaaaaaaaaaaaaaaaaaaaaaaaaaaaaaaaaaa

SEQ ID NO: 2752 - RNA, 5419 nt, synthetic construct
  source 1..5419: mol_type = other RNA
aggaaataagagagaaaagaagagtaagaagaaatataagagccaccatggcccctaagaagaagcgtaaagtgagccgggtgaacggcagcggcagcggcggcggcatgaaccacgaccaggagttcgacccccctaaggtgtaccctcccgtccccgccgagaagagaaagcccatccgggtcctgagcctgttcgatggcatcgccaccggtctgctggtgctgaaggacctgggcatccaggtggataggtacattgcctccgaggtgtgcgaggactccatcaccgtgggaatggtgcgtcatcagggcaagatcatgtacgtgggcgacgtgcggagcgtgacacagaagcatatccaggagtggggccctttcgacctggtgatcggcggcagcccttgcaatgacctgagcatcgtgaacccagcccggaagggcctgtacgagggaaccggcagactgttcttcgagttttacagactgctgcacgacgcccggcctaaggaaggcgacgaccggcccttcttttggctgttcgagaatgtggtggccatgggagtcagcgacaagcgggatattagccggttcctggagagcaaccccgtgatgatcgatgccaaggaagtgagcgccgcccaccgggccagatacttctggggcaatctgcctggcatgaacagacccctggccagcaccgtgaacgacaagctggagctgcaggagtgcctggagcacggccggatcgccaagttcagcaaggtgagaaccatcaccacccgaagcaacagcatcaaacaaggcaaggaccagcactttcctgtgttcatgaacgagaaggaggacatcctgtggtgtaccgagatggagagagtgttcgggttcccagtccactacacagatgtcagcaacatgtctagactggccagacagagactgctgggaagaagctggtccgtccctgtgatcagacacctgttcgcccctctgaaggagtacttcgcctgcgtgagcagcggcaacagcaacgccaacagccggggccccagcttctctagcggcctggtgccactgtccctgagagggagccacatgggccccatggagatctacaaaaccgtgagcgcctggaagcggcagcctgtgcgcgtgctgagcctgtttcggaatatcgataaagtcctgaaaagcctgggattcctggagagcggctctggctccggcggtggcaccctgaagtacgtggaggatgtgacaaacgtggtcagacgggatgtggagaagtggggccccttcgatctggtgtacggcagcacccaacccctgggcagctcttgtgaccggtgccctggctggtacatgtttcagttccaccggatcctgcagtacgccctgccgagacaggagtcccagcggccattcttttggattttcatggacaacttgctgctgaccgaggatgaccaggaaactaccactcggttcctgcagaccgaagccgtgaccctgcaggacgtgagaggccgggactaccagaacgccatgcgggtgtggtccaacatccctggactgaaaagcaagcacgcacctctgacccctaaagaagaggagtacctgcaggcccaggtgcggagcagaagcaagctggacgcccctaaggtggatctgctggtgaagaattgcctcctgcccctgagagagtacttcaagtatttcagccagaatagtctgcccctgggcggcccaagcagcggcgcccctcctcccagcggcggcagcccagccggctccccaacctctaccgaggagggcacctctgagtccgccacccccgagagcggccctggcacctccaccgagcccagcgagggcagcgcacccggcagccctgccggcagccccacctccacagaggagggaaccagcaccgagcccagcgaaggcagcgccccaggcaccagcaccgagcctagtgagggcggctctggcggcggcagcgcccaggagattaaacggatcaacaagatcagaagaagacttgtgaaagacagcaacaccaagaaggccggcaagacaggccccatgaaaaccctgctggttagagtgatgacacccgatctgagagagcggctggaaaacctgagaaagaagcctgaaaatatcccccagcccatcagcaatacatctagagccaacctgaataagctgctgaccgattacaccgaaatgaagaaggcgatcctgcatgtgtactgggaagagttccagaaggaccctgtgggcctgatgagccgggtggcccagcctgccagcaagaagatcgatcagaacaagctgaaacctgagatggacgagaagggcaacctgaccaccgccggctttgcctgctctcagtgtggccagcccctgttcgtgtacaagctggagcaggtgtctgagaagggcaaggcttacaccaactacttcggacggtgcaatgtggccgagcacgaaaagctgatcctgctggcccagctgaagcccgagaaggatagcgacgaagccgtgacatatagcctgggaaagtttgggcagagggccctggatttctacagcattcatgtgaccaaggagtccacccaccccgtgaagcccctggcccagatcgccggaaacagatacgcctccggacctgtgggaaaggccctgagcgacgcatgtatgggcacaatcgcctccttcctgtctaagtaccaggacatcatcatcgaacaccagaaggtggtgaagggcaaccagaagagactggagagcctgcgggagctggccggcaaggaaaacctggaataccctagcgtgaccctgccacctcagcctcacaccaaggagggcgttgatgcctacaacgaagtgatcgcccgggtgcgaatgtgggtgaacctgaacctgtggcagaagctgaagctaagcagagatgatgccaagcctctgctgagactgaagggattcccttcctttcctctggtcgagagacaggccaacgaagtggactggtgggacatggtgtgtaacgtgaagaagctgatcaacgagaaaaaggaggatggcaaggtgttttggcagaatctggctggctacaagagacaggaagccctgagaccatacctgagcagcgaggaagatcggaagaagggaaagaaattcgctcggtaccagctgggcgacctgctgctgcacctggaaaagaagcacggcgaggactggggaaaggtgtacgacgaggcctgggagcggattgacaagaaagtggaaggcctgagcaagcacatcaagctggaagaggaacggagaagcgaggacgcccagagcaaggccgccctgaccgactggctgcgggctaaggccagcttcgtgatcgagggcctgaaggaggccgacaaggacgagttctgcagatgcgagctgaagctgcagaagtggtacggggacctgcggggaaagcccttcgccatcgaagccgagaacagcatcctggacatcagcggcttcagcaagcagtacaactgtgccttcatctggcagaaggacggcgtgaagaagctgaacctgtacctgatcatcaactacttcaagggcggcaagctgcggttcaagaagatcaaacctgaagccttcgaagccaacagattctacaccgtgatcaacaaaaagagcggcgagatcgtgcccatggaggtgaacttcaacttcgacgaccccaacctgatcatcctgcctctggcctttggcaagagacagggcagagaattcatctggaacgacctgctgtccctggaaaccggcagcctgaagctggccaacggaagagtgatcgagaagacactgtacaacagaagaacccggcaggatgagcctgccctgttcgtggccctgaccttcgagcggcgggaggtcctggactcctccaatatcaaaccaatgaacctgatcggcgtggcaagaggcgaaaacatccccgccgtgatcgccctgaccgaccccgagggctgcccactgagccggtttaaggatagcctgggaaacccaacccacatcctgagaatcggcgagagctataaggagaagcagcggaccatccaggccaagaaggaggtggagcagcggagagccggcggctacagccggaagtacgccagcaaagccaagaatctggcagacgatatggtgagaaacaccgctagagatctgctgtactacgccgtgacccaggatgccatgctgatcttcgccaacctgagccggggcttcggccggcagggcaagcggaccttcatggccgagagacagtacacacggatggaggactggctgaccgccaagctggcctacgagggcctgagcaagacctacctgtccaagacactggcccagtacacctccaagacatgcagcaactgtgggtttaccatcaccagcgccgactacgacagggtgctggagaagctgaagaagacagcaacaggctggatgaccacaattaacggcaaggagctgaaggtggagggccagattacctactacaacagatacaagagacagaacgtagtcaaggacctgtccgtcgagctggatagactgagcgaagaatctgtgaacaacgacatctcctcctggacaaagggcagaagcggagaagctctgagcctcctgaagaaaagattctcccatagacccgtgcaggagaagttcgtgtgcctgaactgcggcttcgagacacacgcagccgagcaagccgccctgaacatcgccagatcctggctgttcctgcggagccaggagtacaagaaataccagacaaacaagacaaccggcaacaccgataagagagccttcgtcgagacctggcagtccttttaccggaagaagcttaaggaggtgtggaaacctgccgtgcggtctggcggatctggcggaggctccacaagcatggccgccatgcccctgaaggccaggtaccaggagatggtgaccttcgaggacgtggccgtgcacttcaccaagaccgagtggaccggcctgagccccgcccagagggccctgtacaggagcgtgatgctggagaacttcggcaacctgaccgccctgggctaccccgtgcccaagcccgccctgatcagcctgctggagggcggcgacatggcctggggcctggaggcccaggacgaccccaccagccccaagaaaaagagaaaagtctaagctgccttctgcggggcttgccttctggccatgcccttcttctctcccttgcacctgtacctcttggtctttgaataaagcctgagtaggaaggctagcaaaaaaaaaaaaaaaaaaaaaaaaaaaaaaaaaaaaaaaaaaaaaaaaaaaaaaaaaaaaaaaaaaaaaaaaaaaaaaaa

SEQ ID NO: 2753 - RNA, 5419 nt, synthetic construct
  source 1..5419: mol_type = other RNA
aggaaataagagagaaaagaagagtaagaagaaatataagagccaccatggcccctaagaagaagcgtaaagtgagccgggtgaacggcagcggcagcggcggcggcatgaaccacgaccaggagttcgacccccctaaggtgtaccctcccgtccccgccgagaagagaaagcccatccgggtcctgagcctgttcgatggcatcgccaccggtctgctggtgctgaaggacctgggcatccaggtggataggtacattgcctccgaggtgtgcgaggactccatcaccgtgggaatggtgcgtcatcagggcaagatcatgtacgtgggcgacgtgcggagcgtgacacagaagcatatccaggagtggggccctttcgacctggtgatcggcggcagcccttgcaatgacctgagcatcgtgaacccagcccggaagggcctgtacgagggaaccggcagactgttcttcgagttttacagactgctgcacgacgcccggcctaaggaaggcgacgaccggcccttcttttggctgttcgagaatgtggtggccatgggagtcagcgacaagcgggatattagccggttcctggagagcaaccccgtgatgatcgatgccaaggaagtgagcgccgcccaccgggccagatacttctggggcaatctgcctggcatgaacagacccctggccagcaccgtgaacgacaagctggagctgcaggagtgcctggagcacggccggatcgccaagttcagcaaggtgagaaccatcaccacccgaagcaacagcatcaaacaaggcaaggaccagcactttcctgtgttcatgaacgagaaggaggacatcctgtggtgtaccgagatggagagagtgttcgggttcccagtccactacacagatgtcagcaacatgtctagactggccagacagagactgctgggaagaagctggtccgtccctgtgatcagacacctgttcgcccctctgaaggagtacttcgcctgcgtgagcagcggcaacagcaacgccaacagccggggccccagcttctctagcggcctggtgccactgtccctgagagggagccacatgggccccatggagatctacaaaaccgtgagcgcctggaagcggcagcctgtgcgcgtgctgagcctgtttcggaatatcgataaagtcctgaaaagcctgggattcctggagagcggctctggctccggcggtggcaccctgaagtacgtggaggatgtgacaaacgtggtcagacgggatgtggagaagtggggccccttcgatctggtgtacggcagcacccaacccctgggcagctcttgtgaccggtgccctggctggtacatgtttcagttccaccggatcctgcagtacgccctgccgagacaggagtcccagcggccattcttttggattttcatggacaacttgctgctgaccgaggatgaccaggaaactaccactcggttcctgcagaccgaagccgtgaccctgcaggacgtgagaggccgggactaccagaacgccatgcgggtgtggtccaacatccctggactgaaaagcaagcacgcacctctgacccctaaagaagaggagtacctgcaggcccaggtgcggagcagaagcaagctggacgcccctaaggtggatctgctggtgaagaattgcctcctgcccctgagagagtacttcaagtatttcagccagaatagtctgcccctgggcggcccaagcagcggcgcccctcctcccagcggcggcagcccagccggctccccaacctctaccgaggagggcacctctgagtccgccacccccgagagcggccctggcacctccaccgagcccagcgagggcagcgcacccggcagccctgccggcagccccacctccacagaggagggaaccagcaccgagcccagcgaaggcagcgccccaggcaccagcaccgagcctagtgagggcggctctggcggcggcagcgcccaggagattaaacggatcaacaagatcagaagaagacttgtgaaagacagcaacaccaagaaggccggcaagacaggccccatgaaaaccctgctggttagagtgatgacacccgatctgagagagcggctggaaaacctgagaaagaagcctgaaaatatcccccagcccatcagcaatacatctagagccaacctgaataagctgctgaccgattacaccgaaatgaagaaggcgatcctgcatgtgtactgggaagagttccagaaggaccctgtgggcctgatgagccgggtggcccagcctgccagcaagaagatcgatcagaacaagctgaaacctgagatggacgagaagggcaacctgaccaccgccggctttgcctgctctcagtgtggccagcccctgttcgtgtacaagctggagcaggtgtctgagaagggcaaggcttacaccaactacttcggacggtgcaatgtggccgagcacgaaaagctgatcctgctggcccagctgaagcccgagaaggatagcgacgaagccgtgacatatagcctgggaaagtttgggcagagggccctggatttctacagcattcatgtgaccaaggagtccacccaccccgtgaagcccctggcccagatcgccggaaacagatacgcctccggacctgtgggaaaggccctgagcgacgcatgtatgggcacaatcgcctccttcctgtctaagtaccaggacatcatcatcgaacaccagaaggtggtgaagggcaaccagaagagactggagagcctgcgggagctggccggcaaggaaaacctggaataccctagcgtgaccctgccacctcagcctcacaccaaggagggcgttgatgcctacaacgaagtgatcgcccgggtgcgaatgtgggtgaacctgaacctgtggcagaagctgaagctaagcagagatgatgccaagcctctgctgagactgaagggattcccttcctttcctctggtcgagagacaggccaacgaagtggactggtgggacatggtgtgtaacgtgaagaagctgatcaacgagaaaaaggaggatggcaaggtgttttggcagaatctggctggctacaagagacaggaagccctgagaccatacctgagcagcgaggaagatcggaagaagggaaagaaattcgctcggtaccagctgggcgacctgctgctgcacctggaaaagaagcacggcgaggactggggaaaggtgtacgacgaggcctgggagcggattgacaagaaagtggaaggcctgagcaagcacatcaagctggaagaggaacggagaagcgaggacgcccagagcaaggccgccctgaccgactggctgcgggctaaggccagcttcgtgatcgagggcctgaaggaggccgacaaggacgagttctgcagatgcgagctgaagctgcagaagtggtacggggacctgcggggaaagcccttcgccatcgaagccgagaacagcatcctggacatcagcggcttcagcaagcagtacaactgtgccttcatctggcagaaggacggcgtgaagaagctgaacctgtacctgatcatcaactacttcaagggcggcaagctgcggttcaagaagatcaaacctgaagccttcgaagccaacagattctacaccgtgatcaacaaaaagagcggcgagatcgtgcccatggaggtgaacttcaacttcgacgaccccaacctgatcatcctgcctctggcctttggcaagagacagggcagagaattcatctggaacgacctgctgtccctggaaaccggcagcctgaagctggccaacggaagagtgatcgagaagacactgtacaacagaagaacccggcaggatgagcctgccctgttcgtggccctgaccttcgagcggcgggaggtcctggactcctccaatatcaaaccaatgaacctgatcggcgtggcaagaggcgaaaacatccccgccgtgatcgccctgaccgaccccgagggctgcccactgagccggtttaaggatagcctgggaaacccaacccacatcctgagaatcggcgagagctataaggagaagcagcggaccatccaggccaagaaggaggtggagcagcggagagccggcggctacagccggaagtacgccagcaaagccaagaatctggcagacgatatggtgagaaacaccgctagagatctgctgtactacgccgtgacccaggatgccatgctgatcttcgccaacctgagccggggcttcggccggcagggcaagcggaccttcatggccgagagacagtacacacggatggaggactggctgaccgccaagctggcctacgagggcctgagcaagacctacctgtccaagacactggcccagtacacctccaagacatgcagcaactgtgggtttaccatcaccagcgccgactacgacagggtgctggagaagctgaagaagacagcaacaggctggatgaccacaattaacggcaaggagctgaaggtggagggccagattacctactacaacagatacaagagacagaacgtagtcaaggacctgtccgtcgagctggatagactgagcgaagaatctgtgaacaacgacatctcctcctggacaaagggcagaagcggagaagctctgagcctcctgaagaaaagattctcccatagacccgtgcaggagaagttcgtgtgcctgaactgcggcttcgagacacacgcagccgagcaagccgccctgaacatcgccagatcctggctgttcctgcggagccaggagtacaagaaataccagacaaacaagacaaccggcaacaccgataagagagccttcgtcgagacctggcagtccttttaccggaagaagcttaaggaggtgtggaaacctgccgtgcggtctggcggatctggcggaggctccacaagcgcccaggagagcgtggtgttcagcgacgtgagcatcgacttcagccaggaggagtgggagtgcctgaacgacgaccagagggacctgtacagggacgtgatgctggagaactacagccacctggtgagcatggccggccacagcgtgagcaagcccgacgtgatcagcgtgctggagcagggcaaggagccctggctggtggacagggagctgaccagggagcagtggcccgtgctggagagcaccagccccaagaaaaagagaaaagtctaagctgccttctgcggggcttgccttctggccatgcccttcttctctcccttgcacctgtacctcttggtctttgaataaagcctgagtaggaaggctagcaaaaaaaaaaaaaaaaaaaaaaaaaaaaaaaaaaaaaaaaaaaaaaaaaaaaaaaaaaaaaaaaaaaaaaaaaaaaaaaa

SEQ ID NO: 2754 - RNA, 5419 nt, synthetic construct
  source 1..5419: mol_type = other RNA
aggaaataagagagaaaagaagagtaagaagaaatataagagccaccatggcccctaagaagaagcgtaaagtgagccgggtgaacggcagcggcagcggcggcggcatgaaccacgaccaggagttcgacccccctaaggtgtaccctcccgtccccgccgagaagagaaagcccatccgggtcctgagcctgttcgatggcatcgccaccggtctgctggtgctgaaggacctgggcatccaggtggataggtacattgcctccgaggtgtgcgaggactccatcaccgtgggaatggtgcgtcatcagggcaagatcatgtacgtgggcgacgtgcggagcgtgacacagaagcatatccaggagtggggccctttcgacctggtgatcggcggcagcccttgcaatgacctgagcatcgtgaacccagcccggaagggcctgtacgagggaaccggcagactgttcttcgagttttacagactgctgcacgacgcccggcctaaggaaggcgacgaccggcccttcttttggctgttcgagaatgtggtggccatgggagtcagcgacaagcgggatattagccggttcctggagagcaaccccgtgatgatcgatgccaaggaagtgagcgccgcccaccgggccagatacttctggggcaatctgcctggcatgaacagacccctggccagcaccgtgaacgacaagctggagctgcaggagtgcctggagcacggccggatcgccaagttcagcaaggtgagaaccatcaccacccgaagcaacagcatcaaacaaggcaaggaccagcactttcctgtgttcatgaacgagaaggaggacatcctgtggtgtaccgagatggagagagtgttcgggttcccagtccactacacagatgtcagcaacatgtctagactggccagacagagactgctgggaagaagctggtccgtccctgtgatcagacacctgttcgcccctctgaaggagtacttcgcctgcgtgagcagcggcaacagcaacgccaacagccggggccccagcttctctagcggcctggtgccactgtccctgagagggagccacatgggccccatggagatctacaaaaccgtgagcgcctggaagcggcagcctgtgcgcgtgctgagcctgtttcggaatatcgataaagtcctgaaaagcctgggattcctggagagcggctctggctccggcggtggcaccctgaagtacgtggaggatgtgacaaacgtggtcagacgggatgtggagaagtggggccccttcgatctggtgtacggcagcacccaacccctgggcagctcttgtgaccggtgccctggctggtacatgtttcagttccaccggatcctgcagtacgccctgccgagacaggagtcccagcggccattcttttggattttcatggacaacttgctgctgaccgaggatgaccaggaaactaccactcggttcctgcagaccgaagccgtgaccctgcaggacgtgagaggccgggactaccagaacgccatgcgggtgtggtccaacatccctggactgaaaagcaagcacgcacctctgacccctaaagaagaggagtacctgcaggcccaggtgcggagcagaagcaagctggacgcccctaaggtggatctgctggtgaagaattgcctcctgcccctgagagagtacttcaagtatttcagccagaatagtctgcccctgggcggcccaagcagcggcgcccctcctcccagcggcggcagcccagccggctccccaacctctaccgaggagggcacctctgagtccgccacccccgagagcggccctggcacctccaccgagcccagcgagggcagcgcacccggcagccctgccggcagccccacctccacagaggagggaaccagcaccgagcccagcgaaggcagcgccccaggcaccagcaccgagcctagtgagggcggctctggcggcggcagcgcccaggagattaaacggatcaacaagatcagaagaagacttgtgaaagacagcaacaccaagaaggccggcaagacaggccccatgaaaaccctgctggttagagtgatgacacccgatctgagagagcggctggaaaacctgagaaagaagcctgaaaatatcccccagcccatcagcaatacatctagagccaacctgaataagctgctgaccgattacaccgaaatgaagaaggcgatcctgcatgtgtactgggaagagttccagaaggaccctgtgggcctgatgagccgggtggcccagcctgccagcaagaagatcgatcagaacaagctgaaacctgagatggacgagaagggcaacctgaccaccgccggctttgcctgctctcagtgtggccagcccctgttcgtgtacaagctggagcaggtgtctgagaagggcaaggcttacaccaactacttcggacggtgcaatgtggccgagcacgaaaagctgatcctgctggcccagctgaagcccgagaaggatagcgacgaagccgtgacatatagcctgggaaagtttgggcagagggccctggatttctacagcattcatgtgaccaaggagtccacccaccccgtgaagcccctggcccagatcgccggaaacagatacgcctccggacctgtgggaaaggccctgagcgacgcatgtatgggcacaatcgcctccttcctgtctaagtaccaggacatcatcatcgaacaccagaaggtggtgaagggcaaccagaagagactggagagcctgcgggagctggccggcaaggaaaacctggaataccctagcgtgaccctgccacctcagcctcacaccaaggagggcgttgatgcctacaacgaagtgatcgcccgggtgcgaatgtgggtgaacctgaacctgtggcagaagctgaagctaagcagagatgatgccaagcctctgctgagactgaagggattcccttcctttcctctggtcgagagacaggccaacgaagtggactggtgggacatggtgtgtaacgtgaagaagctgatcaacgagaaaaaggaggatggcaaggtgttttggcagaatctggctggctacaagagacaggaagccctgagaccatacctgagcagcgaggaagatcggaagaagggaaagaaattcgctcggtaccagctgggcgacctgctgctgcacctggaaaagaagcacggcgaggactggggaaaggtgtacgacgaggcctgggagcggattgacaagaaagtggaaggcctgagcaagcacatcaagctggaagaggaacggagaagcgaggacgcccagagcaaggccgccctgaccgactggctgcgggctaaggccagcttcgtgatcgagggcctgaaggaggccgacaaggacgagttctgcagatgcgagctgaagctgcagaagtggtacggggacctgcggggaaagcccttcgccatcgaagccgagaacagcatcctggacatcagcggcttcagcaagcagtacaactgtgccttcatctggcagaaggacggcgtgaagaagctgaacctgtacctgatcatcaactacttcaagggcggcaagctgcggttcaagaagatcaaacctgaagccttcgaagccaacagattctacaccgtgatcaacaaaaagagcggcgagatcgtgcccatggaggtgaacttcaacttcgacgaccccaacctgatcatcctgcctctggcctttggcaagagacagggcagagaattcatctggaacgacctgctgtccctggaaaccggcagcctgaagctggccaacggaagagtgatcgagaagacactgtacaacagaagaacccggcaggatgagcctgccctgttcgtggccctgaccttcgagcggcgggaggtcctggactcctccaatatcaaaccaatgaacctgatcggcgtggcaagaggcgaaaacatccccgccgtgatcgccctgaccgaccccgagggctgcccactgagccggtttaaggatagcctgggaaacccaacccacatcctgagaatcggcgagagctataaggagaagcagcggaccatccaggccaagaaggaggtggagcagcggagagccggcggctacagccggaagtacgccagcaaagccaagaatctggcagacgatatggtgagaaacaccgctagagatctgctgtactacgccgtgacccaggatgccatgctgatcttcgccaacctgagccggggcttcggccggcagggcaagcggaccttcatggccgagagacagtacacacggatggaggactggctgaccgccaagctggcctacgagggcctgagcaagacctacctgtccaagacactggcccagtacacctccaagacatgcagcaactgtgggtttaccatcaccagcgccgactacgacagggtgctggagaagctgaagaagacagcaacaggctggatgaccacaattaacggcaaggagctgaaggtggagggccagattacctactacaacagatacaagagacagaacgtagtcaaggacctgtccgtcgagctggatagactgagcgaagaatctgtgaacaacgacatctcctcctggacaaagggcagaagcggagaagctctgagcctcctgaagaaaagattctcccatagacccgtgcaggagaagttcgtgtgcctgaactgcggcttcgagacacacgcagccgagcaagccgccctgaacatcgccagatcctggctgttcctgcggagccaggagtacaagaaataccagacaaacaagacaaccggcaacaccgataagagagccttcgtcgagacctggcagtccttttaccggaagaagcttaaggaggtgtggaaacctgccgtgcggtctggcggatctggcggaggctccacaagcatggagggcctggtgatgttccaggacctgttcatcgacttcagccaggaggagtgggagtgcctggacaccgcccagaaggacctgtacagggacgtgatgatggagaactacagcagcctggtgagcctgggcctgtgcatccccaagcccgacgtgatcagcctgctggagcagggcaaggagccctggatggtgagcagggacgtgctgggcggctggtgccccgacagcgagttcaggaccagccccaagaaaaagagaaaagtctaagctgccttctgcggggcttgccttctggccatgcccttcttctctcccttgcacctgtacctcttggtctttgaataaagcctgagtaggaaggctagcaaaaaaaaaaaaaaaaaaaaaaaaaaaaaaaaaaaaaaaaaaaaaaaaaaaaaaaaaaaaaaaaaaaaaaaaaaaaaaaa

SEQ ID NO: 2755 - RNA, 5419 nt, synthetic construct
  source 1..5419: mol_type = other RNA
aggaaataagagagaaaagaagagtaagaagaaatataagagccaccatggcccctaagaagaagcgtaaagtgagccgggtgaacggcagcggcagcggcggcggcatgaaccacgaccaggagttcgacccccctaaggtgtaccctcccgtccccgccgagaagagaaagcccatccgggtcctgagcctgttcgatggcatcgccaccggtctgctggtgctgaaggacctgggcatccaggtggataggtacattgcctccgaggtgtgcgaggactccatcaccgtgggaatggtgcgtcatcagggcaagatcatgtacgtgggcgacgtgcggagcgtgacacagaagcatatccaggagtggggccctttcgacctggtgatcggcggcagcccttgcaatgacctgagcatcgtgaacccagcccggaagggcctgtacgagggaaccggcagactgttcttcgagttttacagactgctgcacgacgcccggcctaaggaaggcgacgaccggcccttcttttggctgttcgagaatgtggtggccatgggagtcagcgacaagcgggatattagccggttcctggagagcaaccccgtgatgatcgatgccaaggaagtgagcgccgcccaccgggccagatacttctggggcaatctgcctggcatgaacagacccctggccagcaccgtgaacgacaagctggagctgcaggagtgcctggagcacggccggatcgccaagttcagcaaggtgagaaccatcaccacccgaagcaacagcatcaaacaaggcaaggaccagcactttcctgtgttcatgaacgagaaggaggacatcctgtggtgtaccgagatggagagagtgttcgggttcccagtccactacacagatgtcagcaacatgtctagactggccagacagagactgctgggaagaagctggtccgtccctgtgatcagacacctgttcgcccctctgaaggagtacttcgcctgcgtgagcagcggcaacagcaacgccaacagccggggccccagcttctctagcggcctggtgccactgtccctgagagggagccacatgggccccatggagatctacaaaaccgtgagcgcctggaagcggcagcctgtgcgcgtgctgagcctgtttcggaatatcgataaagtcctgaaaagcctgggattcctggagagcggctctggctccggcggtggcaccctgaagtacgtggaggatgtgacaaacgtggtcagacgggatgtggagaagtggggccccttcgatctggtgtacggcagcacccaacccctgggcagctcttgtgaccggtgccctggctggtacatgtttcagttccaccggatcctgcagtacgccctgccgagacaggagtcccagcggccattcttttggattttcatggacaacttgctgctgaccgaggatgaccaggaaactaccactcggttcctgcagaccgaagccgtgaccctgcaggacgtgagaggccgggactaccagaacgccatgcgggtgtggtccaacatccctggactgaaaagcaagcacgcacctctgacccctaaagaagaggagtacctgcaggcccaggtgcggagcagaagcaagctggacgcccctaaggtggatctgctggtgaagaattgcctcctgcccctgagagagtacttcaagtatttcagccagaatagtctgcccctgggcggcccaagcagcggcgcccctcctcccagcggcggcagcccagccggctccccaacctctaccgaggagggcacctctgagtccgccacccccgagagcggccctggcacctccaccgagcccagcgagggcagcgcacccggcagccctgccggcagccccacctccacagaggagggaaccagcaccgagcccagcgaaggcagcgccccaggcaccagcaccgagcctagtgagggcggctctggcggcggcagcgcccaggagattaaacggatcaacaagatcagaagaagacttgtgaaagacagcaacaccaagaaggccggcaagacaggccccatgaaaaccctgctggttagagtgatgacacccgatctgagagagcggctggaaaacctgagaaagaagcctgaaaatatcccccagcccatcagcaatacatctagagccaacctgaataagctgctgaccgattacaccgaaatgaagaaggcgatcctgcatgtgtactgggaagagttccagaaggaccctgtgggcctgatgagccgggtggcccagcctgccagcaagaagatcgatcagaacaagctgaaacctgagatggacgagaagggcaacctgaccaccgccggctttgcctgctctcagtgtggccagcccctgttcgtgtacaagctggagcaggtgtctgagaagggcaaggcttacaccaactacttcggacggtgcaatgtggccgagcacgaaaagctgatcctgctggcccagctgaagcccgagaaggatagcgacgaagccgtgacatatagcctgggaaagtttgggcagagggccctggatttctacagcattcatgtgaccaaggagtccacccaccccgtgaagcccctggcccagatcgccggaaacagatacgcctccggacctgtgggaaaggccctgagcgacgcatgtatgggcacaatcgcctccttcctgtctaagtaccaggacatcatcatcgaacaccagaaggtggtgaagggcaaccagaagagactggagagcctgcgggagctggccggcaaggaaaacctggaataccctagcgtgaccctgccacctcagcctcacaccaaggagggcgttgatgcctacaacgaagtgatcgcccgggtgcgaatgtgggtgaacctgaacctgtggcagaagctgaagctaagcagagatgatgccaagcctctgctgagactgaagggattcccttcctttcctctggtcgagagacaggccaacgaagtggactggtgggacatggtgtgtaacgtgaagaagctgatcaacgagaaaaaggaggatggcaaggtgttttggcagaatctggctggctacaagagacaggaagccctgagaccatacctgagcagcgaggaagatcggaagaagggaaagaaattcgctcggtaccagctgggcgacctgctgctgcacctggaaaagaagcacggcgaggactggggaaaggtgtacgacgaggcctgggagcggattgacaagaaagtggaaggcctgagcaagcacatcaagctggaagaggaacggagaagcgaggacgcccagagcaaggccgccctgaccgactggctgcgggctaaggccagcttcgtgatcgagggcctgaaggaggccgacaaggacgagttctgcagatgcgagctgaagctgcagaagtggtacggggacctgcggggaaagcccttcgccatcgaagccgagaacagcatcctggacatcagcggcttcagcaagcagtacaactgtgccttcatctggcagaaggacggcgtgaagaagctgaacctgtacctgatcatcaactacttcaagggcggcaagctgcggttcaagaagatcaaacctgaagccttcgaagccaacagattctacaccgtgatcaacaaaaagagcggcgagatcgtgcccatggaggtgaacttcaacttcgacgaccccaacctgatcatcctgcctctggcctttggcaagagacagggcagagaattcatctggaacgacctgctgtccctggaaaccggcagcctgaagctggccaacggaagagtgatcgagaagacactgtacaacagaagaacccggcaggatgagcctgccctgttcgtggccctgaccttcgagcggcgggaggtcctggactcctccaatatcaaaccaatgaacctgatcggcgtggcaagaggcgaaaacatccccgccgtgatcgccctgaccgaccccgagggctgcccactgagccggtttaaggatagcctgggaaacccaacccacatcctgagaatcggcgagagctataaggagaagcagcggaccatccaggccaagaaggaggtggagcagcggagagccggcggctacagccggaagtacgccagcaaagccaagaatctggcagacgatatggtgagaaacaccgctagagatctgctgtactacgccgtgacccaggatgccatgctgatcttcgccaacctgagccggggcttcggccggcagggcaagcggaccttcatggccgagagacagtacacacggatggaggactggctgaccgccaagctggcctacgagggcctgagcaagacctacctgtccaagacactggcccagtacacctccaagacatgcagcaactgtgggtttaccatcaccagcgccgactacgacagggtgctggagaagctgaagaagacagcaacaggctggatgaccacaattaacggcaaggagctgaaggtggagggccagattacctactacaacagatacaagagacagaacgtagtcaaggacctgtccgtcgagctggatagactgagcgaagaatctgtgaacaacgacatctcctcctggacaaagggcagaagcggagaagctctgagcctcctgaagaaaagattctcccatagacccgtgcaggagaagttcgtgtgcctgaactgcggcttcgagacacacgcagccgagcaagccgccctgaacatcgccagatcctggctgttcctgcggagccaggagtacaagaaataccagacaaacaagacaaccggcaacaccgataagagagccttcgtcgagacctggcagtccttttaccggaagaagcttaaggaggtgtggaaacctgccgtgcggtctggcggatctggcggaggctccacaagcaggaccagcgccttccccttccaggcccccgtgaccttcggcgacctggccatctacttcagccaggaggagtgggagtggctgagccccatccagaaggacctgtacgaggacgtgatgctggagaactaccagaacctggtgagcctgggcctgtgcttcaggaggcccaacgtgatcaccctgctggagaagggcaaggccccctggatggtggaccccgtgaagaggaggaggggcctgaccagccccaagaaaaagagaaaagtctaagctgccttctgcggggcttgccttctggccatgcccttcttctctcccttgcacctgtacctcttggtctttgaataaagcctgagtaggaaggctagcaaaaaaaaaaaaaaaaaaaaaaaaaaaaaaaaaaaaaaaaaaaaaaaaaaaaaaaaaaaaaaaaaaaaaaaaaaaaaaaa

SEQ ID NO: 2756 - RNA, 5419 nt, synthetic construct
  source 1..5419: mol_type = other RNA
aggaaataagagagaaaagaagagtaagaagaaatataagagccaccatggcccctaagaagaagcgtaaagtgagccgggtgaacggcagcggcagcggcggcggcatgaaccacgaccaggagttcgacccccctaaggtgtaccctcccgtccccgccgagaagagaaagcccatccgggtcctgagcctgttcgatggcatcgccaccggtctgctggtgctgaaggacctgggcatccaggtggataggtacattgcctccgaggtgtgcgaggactccatcaccgtgggaatggtgcgtcatcagggcaagatcatgtacgtgggcgacgtgcggagcgtgacacagaagcatatccaggagtggggccctttcgacctggtgatcggcggcagcccttgcaatgacctgagcatcgtgaacccagcccggaagggcctgtacgagggaaccggcagactgttcttcgagttttacagactgctgcacgacgcccggcctaaggaaggcgacgaccggcccttcttttggctgttcgagaatgtggtggccatgggagtcagcgacaagcgggatattagccggttcctggagagcaaccccgtgatgatcgatgccaaggaagtgagcgccgcccaccgggccagatacttctggggcaatctgcctggcatgaacagacccctggccagcaccgtgaacgacaagctggagctgcaggagtgcctggagcacggccggatcgccaagttcagcaaggtgagaaccatcaccacccgaagcaacagcatcaaacaaggcaaggaccagcactttcctgtgttcatgaacgagaaggaggacatcctgtggtgtaccgagatggagagagtgttcgggttcccagtccactacacagatgtcagcaacatgtctagactggccagacagagactgctgggaagaagctggtccgtccctgtgatcagacacctgttcgcccctctgaaggagtacttcgcctgcgtgagcagcggcaacagcaacgccaacagccggggccccagcttctctagcggcctggtgccactgtccctgagagggagccacatgggccccatggagatctacaaaaccgtgagcgcctggaagcggcagcctgtgcgcgtgctgagcctgtttcggaatatcgataaagtcctgaaaagcctgggattcctggagagcggctctggctccggcggtggcaccctgaagtacgtggaggatgtgacaaacgtggtcagacgggatgtggagaagtggggccccttcgatctggtgtacggcagcacccaacccctgggcagctcttgtgaccggtgccctggctggtacatgtttcagttccaccggatcctgcagtacgccctgccgagacaggagtcccagcggccattcttttggattttcatggacaacttgctgctgaccgaggatgaccaggaaactaccactcggttcctgcagaccgaagccgtgaccctgcaggacgtgagaggccgggactaccagaacgccatgcgggtgtggtccaacatccctggactgaaaagcaagcacgcacctctgacccctaaagaagaggagtacctgcaggcccaggtgcggagcagaagcaagctggacgcccctaaggtggatctgctggtgaagaattgcctcctgcccctgagagagtacttcaagtatttcagccagaatagtctgcccctgggcggcccaagcagcggcgcccctcctcccagcggcggcagcccagccggctccccaacctctaccgaggagggcacctctgagtccgccacccccgagagcggccctggcacctccaccgagcccagcgagggcagcgcacccggcagccctgccggcagccccacctccacagaggagggaaccagcaccgagcccagcgaaggcagcgccccaggcaccagcaccgagcctagtgagggcggctctggcggcggcagcgcccaggagattaaacggatcaacaagatcagaagaagacttgtgaaagacagcaacaccaagaaggccggcaagacaggccccatgaaaaccctgctggttagagtgatgacacccgatctgagagagcggctggaaaacctgagaaagaagcctgaaaatatcccccagcccatcagcaatacatctagagccaacctgaataagctgctgaccgattacaccgaaatgaagaaggcgatcctgcatgtgtactgggaagagttccagaaggaccctgtgggcctgatgagccgggtggcccagcctgccagcaagaagatcgatcagaacaagctgaaacctgagatggacgagaagggcaacctgaccaccgccggctttgcctgctctcagtgtggccagcccctgttcgtgtacaagctggagcaggtgtctgagaagggcaaggcttacaccaactacttcggacggtgcaatgtggccgagcacgaaaagctgatcctgctggcccagctgaagcccgagaaggatagcgacgaagccgtgacatatagcctgggaaagtttgggcagagggccctggatttctacagcattcatgtgaccaaggagtccacccaccccgtgaagcccctggcccagatcgccggaaacagatacgcctccggacctgtgggaaaggccctgagcgacgcatgtatgggcacaatcgcctccttcctgtctaagtaccaggacatcatcatcgaacaccagaaggtggtgaagggcaaccagaagagactggagagcctgcgggagctggccggcaaggaaaacctggaataccctagcgtgaccctgccacctcagcctcacaccaaggagggcgttgatgcctacaacgaagtgatcgcccgggtgcgaatgtgggtgaacctgaacctgtggcagaagctgaagctaagcagagatgatgccaagcctctgctgagactgaagggattcccttcctttcctctggtcgagagacaggccaacgaagtggactggtgggacatggtgtgtaacgtgaagaagctgatcaacgagaaaaaggaggatggcaaggtgttttggcagaatctggctggctacaagagacaggaagccctgagaccatacctgagcagcgaggaagatcggaagaagggaaagaaattcgctcggtaccagctgggcgacctgctgctgcacctggaaaagaagcacggcgaggactggggaaaggtgtacgacgaggcctgggagcggattgacaagaaagtggaaggcctgagcaagcacatcaagctggaagaggaacggagaagcgaggacgcccagagcaaggccgccctgaccgactggctgcgggctaaggccagcttcgtgatcgagggcctgaaggaggccgacaaggacgagttctgcagatgcgagctgaagctgcagaagtggtacggggacctgcggggaaagcccttcgccatcgaagccgagaacagcatcctggacatcagcggcttcagcaagcagtacaactgtgccttcatctggcagaaggacggcgtgaagaagctgaacctgtacctgatcatcaactacttcaagggcggcaagctgcggttcaagaagatcaaacctgaagccttcgaagccaacagattctacaccgtgatcaacaaaaagagcggcgagatcgtgcccatggaggtgaacttcaacttcgacgaccccaacctgatcatcctgcctctggcctttggcaagagacagggcagagaattcatctggaacgacctgctgtccctggaaaccggcagcctgaagctggccaacggaagagtgatcgagaagacactgtacaacagaagaacccggcaggatgagcctgccctgttcgtggccctgaccttcgagcggcgggaggtcctggactcctccaatatcaaaccaatgaacctgatcggcgtggcaagaggcgaaaacatccccgccgtgatcgccctgaccgaccccgagggctgcccactgagccggtttaaggatagcctgggaaacccaacccacatcctgagaatcggcgagagctataaggagaagcagcggaccatccaggccaagaaggaggtggagcagcggagagccggcggctacagccggaagtacgccagcaaagccaagaatctggcagacgatatggtgagaaacaccgctagagatctgctgtactacgccgtgacccaggatgccatgctgatcttcgccaacctgagccggggcttcggccggcagggcaagcggaccttcatggccgagagacagtacacacggatggaggactggctgaccgccaagctggcctacgagggcctgagcaagacctacctgtccaagacactggcccagtacacctccaagacatgcagcaactgtgggtttaccatcaccagcgccgactacgacagggtgctggagaagctgaagaagacagcaacaggctggatgaccacaattaacggcaaggagctgaaggtggagggccagattacctactacaacagatacaagagacagaacgtagtcaaggacctgtccgtcgagctggatagactgagcgaagaatctgtgaacaacgacatctcctcctggacaaagggcagaagcggagaagctctgagcctcctgaagaaaagattctcccatagacccgtgcaggagaagttcgtgtgcctgaactgcggcttcgagacacacgcagccgagcaagccgccctgaacatcgccagatcctggctgttcctgcggagccaggagtacaagaaataccagacaaacaagacaaccggcaacaccgataagagagccttcgtcgagacctggcagtccttttaccggaagaagcttaaggaggtgtggaaacctgccgtgcggtctggcggatctggcggaggctccacaagcgcccaggtgctggtgaccttccaggacgtggccgtggacttcacccaggaggagtggaggctgctggaccccggccagaaggagctgtacaaggaggtgatgctggagaacgtgcagaacgtgctgagcctgggcctgcccgtgcccagggaggactggatcagccacttcgaccagggcagggccccctggatgctggagggcgagggccccagcaacagctgcctgggcagggagaggaggaccagccccaagaaaaagagaaaagtctaagctgccttctgcggggcttgccttctggccatgcccttcttctctcccttgcacctgtacctcttggtctttgaataaagcctgagtaggaaggctagcaaaaaaaaaaaaaaaaaaaaaaaaaaaaaaaaaaaaaaaaaaaaaaaaaaaaaaaaaaaaaaaaaaaaaaaaaaaaaaaa

SEQ ID NO: 2757 - RNA, 5419 nt, synthetic construct
  source 1..5419: mol_type = other RNA
aggaaataagagagaaaagaagagtaagaagaaatataagagccaccatggcccctaagaagaagcgtaaagtgagccgggtgaacggcagcggcagcggcggcggcatgaaccacgaccaggagttcgacccccctaaggtgtaccctcccgtccccgccgagaagagaaagcccatccgggtcctgagcctgttcgatggcatcgccaccggtctgctggtgctgaaggacctgggcatccaggtggataggtacattgcctccgaggtgtgcgaggactccatcaccgtgggaatggtgcgtcatcagggcaagatcatgtacgtgggcgacgtgcggagcgtgacacagaagcatatccaggagtggggccctttcgacctggtgatcggcggcagcccttgcaatgacctgagcatcgtgaacccagcccggaagggcctgtacgagggaaccggcagactgttcttcgagttttacagactgctgcacgacgcccggcctaaggaaggcgacgaccggcccttcttttggctgttcgagaatgtggtggccatgggagtcagcgacaagcgggatattagccggttcctggagagcaaccccgtgatgatcgatgccaaggaagtgagcgccgcccaccgggccagatacttctggggcaatctgcctggcatgaacagacccctggccagcaccgtgaacgacaagctggagctgcaggagtgcctggagcacggccggatcgccaagttcagcaaggtgagaaccatcaccacccgaagcaacagcatcaaacaaggcaaggaccagcactttcctgtgttcatgaacgagaaggaggacatcctgtggtgtaccgagatggagagagtgttcgggttcccagtccactacacagatgtcagcaacatgtctagactggccagacagagactgctgggaagaagctggtccgtccctgtgatcagacacctgttcgcccctctgaaggagtacttcgcctgcgtgagcagcggcaacagcaacgccaacagccggggccccagcttctctagcggcctggtgccactgtccctgagagggagccacatgggccccatggagatctacaaaaccgtgagcgcctggaagcggcagcctgtgcgcgtgctgagcctgtttcggaatatcgataaagtcctgaaaagcctgggattcctggagagcggctctggctccggcggtggcaccctgaagtacgtggaggatgtgacaaacgtggtcagacgggatgtggagaagtggggccccttcgatctggtgtacggcagcacccaacccctgggcagctcttgtgaccggtgccctggctggtacatgtttcagttccaccggatcctgcagtacgccctgccgagacaggagtcccagcggccattcttttggattttcatggacaacttgctgctgaccgaggatgaccaggaaactaccactcggttcctgcagaccgaagccgtgaccctgcaggacgtgagaggccgggactaccagaacgccatgcgggtgtggtccaacatccctggactgaaaagcaagcacgcacctctgacccctaaagaagaggagtacctgcaggcccaggtgcggagcagaagcaagctggacgcccctaaggtggatctgctggtgaagaattgcctcctgcccctgagagagtacttcaagtatttcagccagaatagtctgcccctgggcggcccaagcagcggcgcccctcctcccagcggcggcagcccagccggctccccaacctctaccgaggagggcacctctgagtccgccacccccgagagcggccctggcacctccaccgagcccagcgagggcagcgcacccggcagccctgccggcagccccacctccacagaggagggaaccagcaccgagcccagcgaaggcagcgccccaggcaccagcaccgagcctagtgagggcggctctggcggcggcagcgcccaggagattaaacggatcaacaagatcagaagaagacttgtgaaagacagcaacaccaagaaggccggcaagacaggccccatgaaaaccctgctggttagagtgatgacacccgatctgagagagcggctggaaaacctgagaaagaagcctgaaaatatcccccagcccatcagcaatacatctagagccaacctgaataagctgctgaccgattacaccgaaatgaagaaggcgatcctgcatgtgtactgggaagagttccagaaggaccctgtgggcctgatgagccgggtggcccagcctgccagcaagaagatcgatcagaacaagctgaaacctgagatggacgagaagggcaacctgaccaccgccggctttgcctgctctcagtgtggccagcccctgttcgtgtacaagctggagcaggtgtctgagaagggcaaggcttacaccaactacttcggacggtgcaatgtggccgagcacgaaaagctgatcctgctggcccagctgaagcccgagaaggatagcgacgaagccgtgacatatagcctgggaaagtttgggcagagggccctggatttctacagcattcatgtgaccaaggagtccacccaccccgtgaagcccctggcccagatcgccggaaacagatacgcctccggacctgtgggaaaggccctgagcgacgcatgtatgggcacaatcgcctccttcctgtctaagtaccaggacatcatcatcgaacaccagaaggtggtgaagggcaaccagaagagactggagagcctgcgggagctggccggcaaggaaaacctggaataccctagcgtgaccctgccacctcagcctcacaccaaggagggcgttgatgcctacaacgaagtgatcgcccgggtgcgaatgtgggtgaacctgaacctgtggcagaagctgaagctaagcagagatgatgccaagcctctgctgagactgaagggattcccttcctttcctctggtcgagagacaggccaacgaagtggactggtgggacatggtgtgtaacgtgaagaagctgatcaacgagaaaaaggaggatggcaaggtgttttggcagaatctggctggctacaagagacaggaagccctgagaccatacctgagcagcgaggaagatcggaagaagggaaagaaattcgctcggtaccagctgggcgacctgctgctgcacctggaaaagaagcacggcgaggactggggaaaggtgtacgacgaggcctgggagcggattgacaagaaagtggaaggcctgagcaagcacatcaagctggaagaggaacggagaagcgaggacgcccagagcaaggccgccctgaccgactggctgcgggctaaggccagcttcgtgatcgagggcctgaaggaggccgacaaggacgagttctgcagatgcgagctgaagctgcagaagtggtacggggacctgcggggaaagcccttcgccatcgaagccgagaacagcatcctggacatcagcggcttcagcaagcagtacaactgtgccttcatctggcagaaggacggcgtgaagaagctgaacctgtacctgatcatcaactacttcaagggcggcaagctgcggttcaagaagatcaaacctgaagccttcgaagccaacagattctacaccgtgatcaacaaaaagagcggcgagatcgtgcccatggaggtgaacttcaacttcgacgaccccaacctgatcatcctgcctctggcctttggcaagagacagggcagagaattcatctggaacgacctgctgtccctggaaaccggcagcctgaagctggccaacggaagagtgatcgagaagacactgtacaacagaagaacccggcaggatgagcctgccctgttcgtggccctgaccttcgagcggcgggaggtcctggactcctccaatatcaaaccaatgaacctgatcggcgtggcaagaggcgaaaacatccccgccgtgatcgccctgaccgaccccgagggctgcccactgagccggtttaaggatagcctgggaaacccaacccacatcctgagaatcggcgagagctataaggagaagcagcggaccatccaggccaagaaggaggtggagcagcggagagccggcggctacagccggaagtacgccagcaaagccaagaatctggcagacgatatggtgagaaacaccgctagagatctgctgtactacgccgtgacccaggatgccatgctgatcttcgccaacctgagccggggcttcggccggcagggcaagcggaccttcatggccgagagacagtacacacggatggaggactggctgaccgccaagctggcctacgagggcctgagcaagacctacctgtccaagacactggcccagtacacctccaagacatgcagcaactgtgggtttaccatcaccagcgccgactacgacagggtgctggagaagctgaagaagacagcaacaggctggatgaccacaattaacggcaaggagctgaaggtggagggccagattacctactacaacagatacaagagacagaacgtagtcaaggacctgtccgtcgagctggatagactgagcgaagaatctgtgaacaacgacatctcctcctggacaaagggcagaagcggagaagctctgagcctcctgaagaaaagattctcccatagacccgtgcaggagaagttcgtgtgcctgaactgcggcttcgagacacacgcagccgagcaagccgccctgaacatcgccagatcctggctgttcctgcggagccaggagtacaagaaataccagacaaacaagacaaccggcaacaccgataagagagccttcgtcgagacctggcagtccttttaccggaagaagcttaaggaggtgtggaaacctgccgtgcggtctggcggatctggcggaggctccacaagcaggagggagcccgtgaccttcgaggacgtggccgtgtacttcagcgagaacgagtggagcagcctggcccccgcccagagggccctgtacagggacgtgatgctggagaactacggcgccgtggccagcctggccttcagcttccccaagcccgccctgatcagccagctggagaggggcgaggccccctggagcctggccccccagggcgccctggacggcgagggcagcaggggcatcagcaccagccccaagaaaaagagaaaagtctaagctgccttctgcggggcttgccttctggccatgcccttcttctctcccttgcacctgtacctcttggtctttgaataaagcctgagtaggaaggctagcaaaaaaaaaaaaaaaaaaaaaaaaaaaaaaaaaaaaaaaaaaaaaaaaaaaaaaaaaaaaaaaaaaaaaaaaaaaaaaaa

SEQ ID NO: 2758 - RNA, 5419 nt, synthetic construct
  source 1..5419: mol_type = other RNA
aggaaataagagagaaaagaagagtaagaagaaatataagagccaccatggcccctaagaagaagcgtaaagtgagccgggtgaacggcagcggcagcggcggcggcatgaaccacgaccaggagttcgacccccctaaggtgtaccctcccgtccccgccgagaagagaaagcccatccgggtcctgagcctgttcgatggcatcgccaccggtctgctggtgctgaaggacctgggcatccaggtggataggtacattgcctccgaggtgtgcgaggactccatcaccgtgggaatggtgcgtcatcagggcaagatcatgtacgtgggcgacgtgcggagcgtgacacagaagcatatccaggagtggggccctttcgacctggtgatcggcggcagcccttgcaatgacctgagcatcgtgaacccagcccggaagggcctgtacgagggaaccggcagactgttcttcgagttttacagactgctgcacgacgcccggcctaaggaaggcgacgaccggcccttcttttggctgttcgagaatgtggtggccatgggagtcagcgacaagcgggatattagccggttcctggagagcaaccccgtgatgatcgatgccaaggaagtgagcgccgcccaccgggccagatacttctggggcaatctgcctggcatgaacagacccctggccagcaccgtgaacgacaagctggagctgcaggagtgcctggagcacggccggatcgccaagttcagcaaggtgagaaccatcaccacccgaagcaacagcatcaaacaaggcaaggaccagcactttcctgtgttcatgaacgagaaggaggacatcctgtggtgtaccgagatggagagagtgttcgggttcccagtccactacacagatgtcagcaacatgtctagactggccagacagagactgctgggaagaagctggtccgtccctgtgatcagacacctgttcgcccctctgaaggagtacttcgcctgcgtgagcagcggcaacagcaacgccaacagccggggccccagcttctctagcggcctggtgccactgtccctgagagggagccacatgggccccatggagatctacaaaaccgtgagcgcctggaagcggcagcctgtgcgcgtgctgagcctgtttcggaatatcgataaagtcctgaaaagcctgggattcctggagagcggctctggctccggcggtggcaccctgaagtacgtggaggatgtgacaaacgtggtcagacgggatgtggagaagtggggccccttcgatctggtgtacggcagcacccaacccctgggcagctcttgtgaccggtgccctggctggtacatgtttcagttccaccggatcctgcagtacgccctgccgagacaggagtcccagcggccattcttttggattttcatggacaacttgctgctgaccgaggatgaccaggaaactaccactcggttcctgcagaccgaagccgtgaccctgcaggacgtgagaggccgggactaccagaacgccatgcgggtgtggtccaacatccctggactgaaaagcaagcacgcacctctgacccctaaagaagaggagtacctgcaggcccaggtgcggagcagaagcaagctggacgcccctaaggtggatctgctggtgaagaattgcctcctgcccctgagagagtacttcaagtatttcagccagaatagtctgcccctgggcggcccaagcagcggcgcccctcctcccagcggcggcagcccagccggctccccaacctctaccgaggagggcacctctgagtccgccacccccgagagcggccctggcacctccaccgagcccagcgagggcagcgcacccggcagccctgccggcagccccacctccacagaggagggaaccagcaccgagcccagcgaaggcagcgccccaggcaccagcaccgagcctagtgagggcggctctggcggcggcagcgcccaggagattaaacggatcaacaagatcagaagaagacttgtgaaagacagcaacaccaagaaggccggcaagacaggccccatgaaaaccctgctggttagagtgatgacacccgatctgagagagcggctggaaaacctgagaaagaagcctgaaaatatcccccagcccatcagcaatacatctagagccaacctgaataagctgctgaccgattacaccgaaatgaagaaggcgatcctgcatgtgtactgggaagagttccagaaggaccctgtgggcctgatgagccgggtggcccagcctgccagcaagaagatcgatcagaacaagctgaaacctgagatggacgagaagggcaacctgaccaccgccggctttgcctgctctcagtgtggccagcccctgttcgtgtacaagctggagcaggtgtctgagaagggcaaggcttacaccaactacttcggacggtgcaatgtggccgagcacgaaaagctgatcctgctggcccagctgaagcccgagaaggatagcgacgaagccgtgacatatagcctgggaaagtttgggcagagggccctggatttctacagcattcatgtgaccaaggagtccacccaccccgtgaagcccctggcccagatcgccggaaacagatacgcctccggacctgtgggaaaggccctgagcgacgcatgtatgggcacaatcgcctccttcctgtctaagtaccaggacatcatcatcgaacaccagaaggtggtgaagggcaaccagaagagactggagagcctgcgggagctggccggcaaggaaaacctggaataccctagcgtgaccctgccacctcagcctcacaccaaggagggcgttgatgcctacaacgaagtgatcgcccgggtgcgaatgtgggtgaacctgaacctgtggcagaagctgaagctaagcagagatgatgccaagcctctgctgagactgaagggattcccttcctttcctctggtcgagagacaggccaacgaagtggactggtgggacatggtgtgtaacgtgaagaagctgatcaacgagaaaaaggaggatggcaaggtgttttggcagaatctggctggctacaagagacaggaagccctgagaccatacctgagcagcgaggaagatcggaagaagggaaagaaattcgctcggtaccagctgggcgacctgctgctgcacctggaaaagaagcacggcgaggactggggaaaggtgtacgacgaggcctgggagcggattgacaagaaagtggaaggcctgagcaagcacatcaagctggaagaggaacggagaagcgaggacgcccagagcaaggccgccctgaccgactggctgcgggctaaggccagcttcgtgatcgagggcctgaaggaggccgacaaggacgagttctgcagatgcgagctgaagctgcagaagtggtacggggacctgcggggaaagcccttcgccatcgaagccgagaacagcatcctggacatcagcggcttcagcaagcagtacaactgtgccttcatctggcagaaggacggcgtgaagaagctgaacctgtacctgatcatcaactacttcaagggcggcaagctgcggttcaagaagatcaaacctgaagccttcgaagccaacagattctacaccgtgatcaacaaaaagagcggcgagatcgtgcccatggaggtgaacttcaacttcgacgaccccaacctgatcatcctgcctctggcctttggcaagagacagggcagagaattcatctggaacgacctgctgtccctggaaaccggcagcctgaagctggccaacggaagagtgatcgagaagacactgtacaacagaagaacccggcaggatgagcctgccctgttcgtggccctgaccttcgagcggcgggaggtcctggactcctccaatatcaaaccaatgaacctgatcggcgtggcaagaggcgaaaacatccccgccgtgatcgccctgaccgaccccgagggctgcccactgagccggtttaaggatagcctgggaaacccaacccacatcctgagaatcggcgagagctataaggagaagcagcggaccatccaggccaagaaggaggtggagcagcggagagccggcggctacagccggaagtacgccagcaaagccaagaatctggcagacgatatggtgagaaacaccgctagagatctgctgtactacgccgtgacccaggatgccatgctgatcttcgccaacctgagccggggcttcggccggcagggcaagcggaccttcatggccgagagacagtacacacggatggaggactggctgaccgccaagctggcctacgagggcctgagcaagacctacctgtccaagacactggcccagtacacctccaagacatgcagcaactgtgggtttaccatcaccagcgccgactacgacagggtgctggagaagctgaagaagacagcaacaggctggatgaccacaattaacggcaaggagctgaaggtggagggccagattacctactacaacagatacaagagacagaacgtagtcaaggacctgtccgtcgagctggatagactgagcgaagaatctgtgaacaacgacatctcctcctggacaaagggcagaagcggagaagctctgagcctcctgaagaaaagattctcccatagacccgtgcaggagaagttcgtgtgcctgaactgcggcttcgagacacacgcagccgagcaagccgccctgaacatcgccagatcctggctgttcctgcggagccaggagtacaagaaataccagacaaacaagacaaccggcaacaccgataagagagccttcgtcgagacctggcagtccttttaccggaagaagcttaaggaggtgtggaaacctgccgtgcggtctggcggatctggcggaggctccacaagcatgggcgccgtgacctacgacgacgtgcacatcaacttcacccaggaggagtgggccctgctgaaccccagccagaagaggctgtacaaggacgtgatgcacgacacctacagcaacctgaccgccaccggctacagcctggaggaccactacatcgaggagcactgccagagcagcaggaggtgcaggaggcacctgcagaggcacaagaaggtgcacatcggcgagaagccctacgagagcaccagccccaagaaaaagagaaaagtctaagctgccttctgcggggcttgccttctggccatgcccttcttctctcccttgcacctgtacctcttggtctttgaataaagcctgagtaggaaggctagcaaaaaaaaaaaaaaaaaaaaaaaaaaaaaaaaaaaaaaaaaaaaaaaaaaaaaaaaaaaaaaaaaaaaaaaaaaaaaaaa

SEQ ID NO: 2759 - RNA, 5419 nt, synthetic construct
  source 1..5419: mol_type = other RNA
aggaaataagagagaaaagaagagtaagaagaaatataagagccaccatggcccctaagaagaagcgtaaagtgagccgggtgaacggcagcggcagcggcggcggcatgaaccacgaccaggagttcgacccccctaaggtgtaccctcccgtccccgccgagaagagaaagcccatccgggtcctgagcctgttcgatggcatcgccaccggtctgctggtgctgaaggacctgggcatccaggtggataggtacattgcctccgaggtgtgcgaggactccatcaccgtgggaatggtgcgtcatcagggcaagatcatgtacgtgggcgacgtgcggagcgtgacacagaagcatatccaggagtggggccctttcgacctggtgatcggcggcagcccttgcaatgacctgagcatcgtgaacccagcccggaagggcctgtacgagggaaccggcagactgttcttcgagttttacagactgctgcacgacgcccggcctaaggaaggcgacgaccggcccttcttttggctgttcgagaatgtggtggccatgggagtcagcgacaagcgggatattagccggttcctggagagcaaccccgtgatgatcgatgccaaggaagtgagcgccgcccaccgggccagatacttctggggcaatctgcctggcatgaacagacccctggccagcaccgtgaacgacaagctggagctgcaggagtgcctggagcacggccggatcgccaagttcagcaaggtgagaaccatcaccacccgaagcaacagcatcaaacaaggcaaggaccagcactttcctgtgttcatgaacgagaaggaggacatcctgtggtgtaccgagatggagagagtgttcgggttcccagtccactacacagatgtcagcaacatgtctagactggccagacagagactgctgggaagaagctggtccgtccctgtgatcagacacctgttcgcccctctgaaggagtacttcgcctgcgtgagcagcggcaacagcaacgccaacagccggggccccagcttctctagcggcctggtgccactgtccctgagagggagccacatgggccccatggagatctacaaaaccgtgagcgcctggaagcggcagcctgtgcgcgtgctgagcctgtttcggaatatcgataaagtcctgaaaagcctgggattcctggagagcggctctggctccggcggtggcaccctgaagtacgtggaggatgtgacaaacgtggtcagacgggatgtggagaagtggggccccttcgatctggtgtacggcagcacccaacccctgggcagctcttgtgaccggtgccctggctggtacatgtttcagttccaccggatcctgcagtacgccctgccgagacaggagtcccagcggccattcttttggattttcatggacaacttgctgctgaccgaggatgaccaggaaactaccactcggttcctgcagaccgaagccgtgaccctgcaggacgtgagaggccgggactaccagaacgccatgcgggtgtggtccaacatccctggactgaaaagcaagcacgcacctctgacccctaaagaagaggagtacctgcaggcccaggtgcggagcagaagcaagctggacgcccctaaggtggatctgctggtgaagaattgcctcctgcccctgagagagtacttcaagtatttcagccagaatagtctgcccctgggcggcccaagcagcggcgcccctcctcccagcggcggcagcccagccggctccccaacctctaccgaggagggcacctctgagtccgccacccccgagagcggccctggcacctccaccgagcccagcgagggcagcgcacccggcagccctgccggcagccccacctccacagaggagggaaccagcaccgagcccagcgaaggcagcgccccaggcaccagcaccgagcctagtgagggcggctctggcggcggcagcgcccaggagattaaacggatcaacaagatcagaagaagacttgtgaaagacagcaacaccaagaaggccggcaagacaggccccatgaaaaccctgctggttagagtgatgacacccgatctgagagagcggctggaaaacctgagaaagaagcctgaaaatatcccccagcccatcagcaatacatctagagccaacctgaataagctgctgaccgattacaccgaaatgaagaaggcgatcctgcatgtgtactgggaagagttccagaaggaccctgtgggcctgatgagccgggtggcccagcctgccagcaagaagatcgatcagaacaagctgaaacctgagatggacgagaagggcaacctgaccaccgccggctttgcctgctctcagtgtggccagcccctgttcgtgtacaagctggagcaggtgtctgagaagggcaaggcttacaccaactacttcggacggtgcaatgtggccgagcacgaaaagctgatcctgctggcccagctgaagcccgagaaggatagcgacgaagccgtgacatatagcctgggaaagtttgggcagagggccctggatttctacagcattcatgtgaccaaggagtccacccaccccgtgaagcccctggcccagatcgccggaaacagatacgcctccggacctgtgggaaaggccctgagcgacgcatgtatgggcacaatcgcctccttcctgtctaagtaccaggacatcatcatcgaacaccagaaggtggtgaagggcaaccagaagagactggagagcctgcgggagctggccggcaaggaaaacctggaataccctagcgtgaccctgccacctcagcctcacaccaaggagggcgttgatgcctacaacgaagtgatcgcccgggtgcgaatgtgggtgaacctgaacctgtggcagaagctgaagctaagcagagatgatgccaagcctctgctgagactgaagggattcccttcctttcctctggtcgagagacaggccaacgaagtggactggtgggacatggtgtgtaacgtgaagaagctgatcaacgagaaaaaggaggatggcaaggtgttttggcagaatctggctggctacaagagacaggaagccctgagaccatacctgagcagcgaggaagatcggaagaagggaaagaaattcgctcggtaccagctgggcgacctgctgctgcacctggaaaagaagcacggcgaggactggggaaaggtgtacgacgaggcctgggagcggattgacaagaaagtggaaggcctgagcaagcacatcaagctggaagaggaacggagaagcgaggacgcccagagcaaggccgccctgaccgactggctgcgggctaaggccagcttcgtgatcgagggcctgaaggaggccgacaaggacgagttctgcagatgcgagctgaagctgcagaagtggtacggggacctgcggggaaagcccttcgccatcgaagccgagaacagcatcctggacatcagcggcttcagcaagcagtacaactgtgccttcatctggcagaaggacggcgtgaagaagctgaacctgtacctgatcatcaactacttcaagggcggcaagctgcggttcaagaagatcaaacctgaagccttcgaagccaacagattctacaccgtgatcaacaaaaagagcggcgagatcgtgcccatggaggtgaacttcaacttcgacgaccccaacctgatcatcctgcctctggcctttggcaagagacagggcagagaattcatctggaacgacctgctgtccctggaaaccggcagcctgaagctggccaacggaagagtgatcgagaagacactgtacaacagaagaacccggcaggatgagcctgccctgttcgtggccctgaccttcgagcggcgggaggtcctggactcctccaatatcaaaccaatgaacctgatcggcgtggcaagaggcgaaaacatccccgccgtgatcgccctgaccgaccccgagggctgcccactgagccggtttaaggatagcctgggaaacccaacccacatcctgagaatcggcgagagctataaggagaagcagcggaccatccaggccaagaaggaggtggagcagcggagagccggcggctacagccggaagtacgccagcaaagccaagaatctggcagacgatatggtgagaaacaccgctagagatctgctgtactacgccgtgacccaggatgccatgctgatcttcgccaacctgagccggggcttcggccggcagggcaagcggaccttcatggccgagagacagtacacacggatggaggactggctgaccgccaagctggcctacgagggcctgagcaagacctacctgtccaagacactggcccagtacacctccaagacatgcagcaactgtgggtttaccatcaccagcgccgactacgacagggtgctggagaagctgaagaagacagcaacaggctggatgaccacaattaacggcaaggagctgaaggtggagggccagattacctactacaacagatacaagagacagaacgtagtcaaggacctgtccgtcgagctggatagactgagcgaagaatctgtgaacaacgacatctcctcctggacaaagggcagaagcggagaagctctgagcctcctgaagaaaagattctcccatagacccgtgcaggagaagttcgtgtgcctgaactgcggcttcgagacacacgcagccgagcaagccgccctgaacatcgccagatcctggctgttcctgcggagccaggagtacaagaaataccagacaaacaagacaaccggcaacaccgataagagagccttcgtcgagacctggcagtccttttaccggaagaagcttaaggaggtgtggaaacctgccgtgcggtctggcggatctggcggaggctccacaagcagccaggagcccgtgaccttcgaggacgtggccgtgtacttcacccagaaccagtgggccagcctggaccccatgcagagggccctgtacctggaggtgatgctggagaactacgccaacatcaccagcctggccctgcccttccccaagcccgacctgatcctgcagctggagcagggcggcgccccctggggcctggacccctggacccccctggagggcgaggccctgggcggcgtgcacaccagccccaagaaaaagagaaaagtctaagctgccttctgcggggcttgccttctggccatgcccttcttctctcccttgcacctgtacctcttggtctttgaataaagcctgagtaggaaggctagcaaaaaaaaaaaaaaaaaaaaaaaaaaaaaaaaaaaaaaaaaaaaaaaaaaaaaaaaaaaaaaaaaaaaaaaaaaaaaaaa

SEQ ID NO: 2760 - RNA, 5419 nt, synthetic construct
  source 1..5419: mol_type = other RNA
aggaaataagagagaaaagaagagtaagaagaaatataagagccaccatggcccctaagaagaagcgtaaagtgagccgggtgaacggcagcggcagcggcggcggcatgaaccacgaccaggagttcgacccccctaaggtgtaccctcccgtccccgccgagaagagaaagcccatccgggtcctgagcctgttcgatggcatcgccaccggtctgctggtgctgaaggacctgggcatccaggtggataggtacattgcctccgaggtgtgcgaggactccatcaccgtgggaatggtgcgtcatcagggcaagatcatgtacgtgggcgacgtgcggagcgtgacacagaagcatatccaggagtggggccctttcgacctggtgatcggcggcagcccttgcaatgacctgagcatcgtgaacccagcccggaagggcctgtacgagggaaccggcagactgttcttcgagttttacagactgctgcacgacgcccggcctaaggaaggcgacgaccggcccttcttttggctgttcgagaatgtggtggccatgggagtcagcgacaagcgggatattagccggttcctggagagcaaccccgtgatgatcgatgccaaggaagtgagcgccgcccaccgggccagatacttctggggcaatctgcctggcatgaacagacccctggccagcaccgtgaacgacaagctggagctgcaggagtgcctggagcacggccggatcgccaagttcagcaaggtgagaaccatcaccacccgaagcaacagcatcaaacaaggcaaggaccagcactttcctgtgttcatgaacgagaaggaggacatcctgtggtgtaccgagatggagagagtgttcgggttcccagtccactacacagatgtcagcaacatgtctagactggccagacagagactgctgggaagaagctggtccgtccctgtgatcagacacctgttcgcccctctgaaggagtacttcgcctgcgtgagcagcggcaacagcaacgccaacagccggggccccagcttctctagcggcctggtgccactgtccctgagagggagccacatgggccccatggagatctacaaaaccgtgagcgcctggaagcggcagcctgtgcgcgtgctgagcctgtttcggaatatcgataaagtcctgaaaagcctgggattcctggagagcggctctggctccggcggtggcaccctgaagtacgtggaggatgtgacaaacgtggtcagacgggatgtggagaagtggggccccttcgatctggtgtacggcagcacccaacccctgggcagctcttgtgaccggtgccctggctggtacatgtttcagttccaccggatcctgcagtacgccctgccgagacaggagtcccagcggccattcttttggattttcatggacaacttgctgctgaccgaggatgaccaggaaactaccactcggttcctgcagaccgaagccgtgaccctgcaggacgtgagaggccgggactaccagaacgccatgcgggtgtggtccaacatccctggactgaaaagcaagcacgcacctctgacccctaaagaagaggagtacctgcaggcccaggtgcggagcagaagcaagctggacgcccctaaggtggatctgctggtgaagaattgcctcctgcccctgagagagtacttcaagtatttcagccagaatagtctgcccctgggcggcccaagcagcggcgcccctcctcccagcggcggcagcccagccggctccccaacctctaccgaggagggcacctctgagtccgccacccccgagagcggccctggcacctccaccgagcccagcgagggcagcgcacccggcagccctgccggcagccccacctccacagaggagggaaccagcaccgagcccagcgaaggcagcgccccaggcaccagcaccgagcctagtgagggcggctctggcggcggcagcgcccaggagattaaacggatcaacaagatcagaagaagacttgtgaaagacagcaacaccaagaaggccggcaagacaggccccatgaaaaccctgctggttagagtgatgacacccgatctgagagagcggctggaaaacctgagaaagaagcctgaaaatatcccccagcccatcagcaatacatctagagccaacctgaataagctgctgaccgattacaccgaaatgaagaaggcgatcctgcatgtgtactgggaagagttccagaaggaccctgtgggcctgatgagccgggtggcccagcctgccagcaagaagatcgatcagaacaagctgaaacctgagatggacgagaagggcaacctgaccaccgccggctttgcctgctctcagtgtggccagcccctgttcgtgtacaagctggagcaggtgtctgagaagggcaaggcttacaccaactacttcggacggtgcaatgtggccgagcacgaaaagctgatcctgctggcccagctgaagcccgagaaggatagcgacgaagccgtgacatatagcctgggaaagtttgggcagagggccctggatttctacagcattcatgtgaccaaggagtccacccaccccgtgaagcccctggcccagatcgccggaaacagatacgcctccggacctgtgggaaaggccctgagcgacgcatgtatgggcacaatcgcctccttcctgtctaagtaccaggacatcatcatcgaacaccagaaggtggtgaagggcaaccagaagagactggagagcctgcgggagctggccggcaaggaaaacctggaataccctagcgtgaccctgccacctcagcctcacaccaaggagggcgttgatgcctacaacgaagtgatcgcccgggtgcgaatgtgggtgaacctgaacctgtggcagaagctgaagctaagcagagatgatgccaagcctctgctgagactgaagggattcccttcctttcctctggtcgagagacaggccaacgaagtggactggtgggacatggtgtgtaacgtgaagaagctgatcaacgagaaaaaggaggatggcaaggtgttttggcagaatctggctggctacaagagacaggaagccctgagaccatacctgagcagcgaggaagatcggaagaagggaaagaaattcgctcggtaccagctgggcgacctgctgctgcacctggaaaagaagcacggcgaggactggggaaaggtgtacgacgaggcctgggagcggattgacaagaaagtggaaggcctgagcaagcacatcaagctggaagaggaacggagaagcgaggacgcccagagcaaggccgccctgaccgactggctgcgggctaaggccagcttcgtgatcgagggcctgaaggaggccgacaaggacgagttctgcagatgcgagctgaagctgcagaagtggtacggggacctgcggggaaagcccttcgccatcgaagccgagaacagcatcctggacatcagcggcttcagcaagcagtacaactgtgccttcatctggcagaaggacggcgtgaagaagctgaacctgtacctgatcatcaactacttcaagggcggcaagctgcggttcaagaagatcaaacctgaagccttcgaagccaacagattctacaccgtgatcaacaaaaagagcggcgagatcgtgcccatggaggtgaacttcaacttcgacgaccccaacctgatcatcctgcctctggcctttggcaagagacagggcagagaattcatctggaacgacctgctgtccctggaaaccggcagcctgaagctggccaacggaagagtgatcgagaagacactgtacaacagaagaacccggcaggatgagcctgccctgttcgtggccctgaccttcgagcggcgggaggtcctggactcctccaatatcaaaccaatgaacctgatcggcgtggcaagaggcgaaaacatccccgccgtgatcgccctgaccgaccccgagggctgcccactgagccggtttaaggatagcctgggaaacccaacccacatcctgagaatcggcgagagctataaggagaagcagcggaccatccaggccaagaaggaggtggagcagcggagagccggcggctacagccggaagtacgccagcaaagccaagaatctggcagacgatatggtgagaaacaccgctagagatctgctgtactacgccgtgacccaggatgccatgctgatcttcgccaacctgagccggggcttcggccggcagggcaagcggaccttcatggccgagagacagtacacacggatggaggactggctgaccgccaagctggcctacgagggcctgagcaagacctacctgtccaagacactggcccagtacacctccaagacatgcagcaactgtgggtttaccatcaccagcgccgactacgacagggtgctggagaagctgaagaagacagcaacaggctggatgaccacaattaacggcaaggagctgaaggtggagggccagattacctactacaacagatacaagagacagaacgtagtcaaggacctgtccgtcgagctggatagactgagcgaagaatctgtgaacaacgacatctcctcctggacaaagggcagaagcggagaagctctgagcctcctgaagaaaagattctcccatagacccgtgcaggagaagttcgtgtgcctgaactgcggcttcgagacacacgcagccgagcaagccgccctgaacatcgccagatcctggctgttcctgcggagccaggagtacaagaaataccagacaaacaagacaaccggcaacaccgataagagagccttcgtcgagacctggcagtccttttaccggaagaagcttaaggaggtgtggaaacctgccgtgcggtctggcggatctggcggaggctccacaagctaccaggagatggtgaccttcgaggacgtggccgtgcacttcaccaagaccgagtggaccggcctgagccccgcccagagggccctgtacaggagcgtgatgctggagaacttcggcaacctgaccgccctgggctaccccgtgcccaagcccgccctgatcagcctgctggagaggggcgacatggcctggggcctggaggcccaggacgacccccccgccgagaggaccaagaacgtgtgcaccagccccaagaaaaagagaaaagtctaagctgccttctgcggggcttgccttctggccatgcccttcttctctcccttgcacctgtacctcttggtctttgaataaagcctgagtaggaaggctagcaaaaaaaaaaaaaaaaaaaaaaaaaaaaaaaaaaaaaaaaaaaaaaaaaaaaaaaaaaaaaaaaaaaaaaaaaaaaaaaa

SEQ ID NO: 2761 - RNA, 5419 nt, synthetic construct
  source 1..5419: mol_type = other RNA
aggaaataagagagaaaagaagagtaagaagaaatataagagccaccatggcccctaagaagaagcgtaaagtgagccgggtgaacggcagcggcagcggcggcggcatgaaccacgaccaggagttcgacccccctaaggtgtaccctcccgtccccgccgagaagagaaagcccatccgggtcctgagcctgttcgatggcatcgccaccggtctgctggtgctgaaggacctgggcatccaggtggataggtacattgcctccgaggtgtgcgaggactccatcaccgtgggaatggtgcgtcatcagggcaagatcatgtacgtgggcgacgtgcggagcgtgacacagaagcatatccaggagtggggccctttcgacctggtgatcggcggcagcccttgcaatgacctgagcatcgtgaacccagcccggaagggcctgtacgagggaaccggcagactgttcttcgagttttacagactgctgcacgacgcccggcctaaggaaggcgacgaccggcccttcttttggctgttcgagaatgtggtggccatgggagtcagcgacaagcgggatattagccggttcctggagagcaaccccgtgatgatcgatgccaaggaagtgagcgccgcccaccgggccagatacttctggggcaatctgcctggcatgaacagacccctggccagcaccgtgaacgacaagctggagctgcaggagtgcctggagcacggccggatcgccaagttcagcaaggtgagaaccatcaccacccgaagcaacagcatcaaacaaggcaaggaccagcactttcctgtgttcatgaacgagaaggaggacatcctgtggtgtaccgagatggagagagtgttcgggttcccagtccactacacagatgtcagcaacatgtctagactggccagacagagactgctgggaagaagctggtccgtccctgtgatcagacacctgttcgcccctctgaaggagtacttcgcctgcgtgagcagcggcaacagcaacgccaacagccggggccccagcttctctagcggcctggtgccactgtccctgagagggagccacatgggccccatggagatctacaaaaccgtgagcgcctggaagcggcagcctgtgcgcgtgctgagcctgtttcggaatatcgataaagtcctgaaaagcctgggattcctggagagcggctctggctccggcggtggcaccctgaagtacgtggaggatgtgacaaacgtggtcagacgggatgtggagaagtggggccccttcgatctggtgtacggcagcacccaacccctgggcagctcttgtgaccggtgccctggctggtacatgtttcagttccaccggatcctgcagtacgccctgccgagacaggagtcccagcggccattcttttggattttcatggacaacttgctgctgaccgaggatgaccaggaaactaccactcggttcctgcagaccgaagccgtgaccctgcaggacgtgagaggccgggactaccagaacgccatgcgggtgtggtccaacatccctggactgaaaagcaagcacgcacctctgacccctaaagaagaggagtacctgcaggcccaggtgcggagcagaagcaagctggacgcccctaaggtggatctgctggtgaagaattgcctcctgcccctgagagagtacttcaagtatttcagccagaatagtctgcccctgggcggcccaagcagcggcgcccctcctcccagcggcggcagcccagccggctccccaacctctaccgaggagggcacctctgagtccgccacccccgagagcggccctggcacctccaccgagcccagcgagggcagcgcacccggcagccctgccggcagccccacctccacagaggagggaaccagcaccgagcccagcgaaggcagcgccccaggcaccagcaccgagcctagtgagggcggctctggcggcggcagcgcccaggagattaaacggatcaacaagatcagaagaagacttgtgaaagacagcaacaccaagaaggccggcaagacaggccccatgaaaaccctgctggttagagtgatgacacccgatctgagagagcggctggaaaacctgagaaagaagcctgaaaatatcccccagcccatcagcaatacatctagagccaacctgaataagctgctgaccgattacaccgaaatgaagaaggcgatcctgcatgtgtactgggaagagttccagaaggaccctgtgggcctgatgagccgggtggcccagcctgccagcaagaagatcgatcagaacaagctgaaacctgagatggacgagaagggcaacctgaccaccgccggctttgcctgctctcagtgtggccagcccctgttcgtgtacaagctggagcaggtgtctgagaagggcaaggcttacaccaactacttcggacggtgcaatgtggccgagcacgaaaagctgatcctgctggcccagctgaagcccgagaaggatagcgacgaagccgtgacatatagcctgggaaagtttgggcagagggccctggatttctacagcattcatgtgaccaaggagtccacccaccccgtgaagcccctggcccagatcgccggaaacagatacgcctccggacctgtgggaaaggccctgagcgacgcatgtatgggcacaatcgcctccttcctgtctaagtaccaggacatcatcatcgaacaccagaaggtggtgaagggcaaccagaagagactggagagcctgcgggagctggccggcaaggaaaacctggaataccctagcgtgaccctgccacctcagcctcacaccaaggagggcgttgatgcctacaacgaagtgatcgcccgggtgcgaatgtgggtgaacctgaacctgtggcagaagctgaagctaagcagagatgatgccaagcctctgctgagactgaagggattcccttcctttcctctggtcgagagacaggccaacgaagtggactggtgggacatggtgtgtaacgtgaagaagctgatcaacgagaaaaaggaggatggcaaggtgttttggcagaatctggctggctacaagagacaggaagccctgagaccatacctgagcagcgaggaagatcggaagaagggaaagaaattcgctcggtaccagctgggcgacctgctgctgcacctggaaaagaagcacggcgaggactggggaaaggtgtacgacgaggcctgggagcggattgacaagaaagtggaaggcctgagcaagcacatcaagctggaagaggaacggagaagcgaggacgcccagagcaaggccgccctgaccgactggctgcgggctaaggccagcttcgtgatcgagggcctgaaggaggccgacaaggacgagttctgcagatgcgagctgaagctgcagaagtggtacggggacctgcggggaaagcccttcgccatcgaagccgagaacagcatcctggacatcagcggcttcagcaagcagtacaactgtgccttcatctggcagaaggacggcgtgaagaagctgaacctgtacctgatcatcaactacttcaagggcggcaagctgcggttcaagaagatcaaacctgaagccttcgaagccaacagattctacaccgtgatcaacaaaaagagcggcgagatcgtgcccatggaggtgaacttcaacttcgacgaccccaacctgatcatcctgcctctggcctttggcaagagacagggcagagaattcatctggaacgacctgctgtccctggaaaccggcagcctgaagctggccaacggaagagtgatcgagaagacactgtacaacagaagaacccggcaggatgagcctgccctgttcgtggccctgaccttcgagcggcgggaggtcctggactcctccaatatcaaaccaatgaacctgatcggcgtggcaagaggcgaaaacatccccgccgtgatcgccctgaccgaccccgagggctgcccactgagccggtttaaggatagcctgggaaacccaacccacatcctgagaatcggcgagagctataaggagaagcagcggaccatccaggccaagaaggaggtggagcagcggagagccggcggctacagccggaagtacgccagcaaagccaagaatctggcagacgatatggtgagaaacaccgctagagatctgctgtactacgccgtgacccaggatgccatgctgatcttcgccaacctgagccggggcttcggccggcagggcaagcggaccttcatggccgagagacagtacacacggatggaggactggctgaccgccaagctggcctacgagggcctgagcaagacctacctgtccaagacactggcccagtacacctccaagacatgcagcaactgtgggtttaccatcaccagcgccgactacgacagggtgctggagaagctgaagaagacagcaacaggctggatgaccacaattaacggcaaggagctgaaggtggagggccagattacctactacaacagatacaagagacagaacgtagtcaaggacctgtccgtcgagctggatagactgagcgaagaatctgtgaacaacgacatctcctcctggacaaagggcagaagcggagaagctctgagcctcctgaagaaaagattctcccatagacccgtgcaggagaagttcgtgtgcctgaactgcggcttcgagacacacgcagccgagcaagccgccctgaacatcgccagatcctggctgttcctgcggagccaggagtacaagaaataccagacaaacaagacaaccggcaacaccgataagagagccttcgtcgagacctggcagtccttttaccggaagaagcttaaggaggtgtggaaacctgccgtgcggtctggcggatctggcggaggctccacaagcagccagagcctggtgaccttcggcgacgtggccgtggacttcagccaggaggagtgggagaggctgaacagcgcccagaggggcctgtacagggacgtgatgctggagaactacaggagcctggtgagcctgggcctgtgcttcagcaagcccgacatgatcagcagcctggagcagaggaaggagccctggatgcccaagaggaagctgatgaggggccagtgccccggctggaaggccgtgaccagccccaagaaaaagagaaaagtctaagctgccttctgcggggcttgccttctggccatgcccttcttctctcccttgcacctgtacctcttggtctttgaataaagcctgagtaggaaggctagcaaaaaaaaaaaaaaaaaaaaaaaaaaaaaaaaaaaaaaaaaaaaaaaaaaaaaaaaaaaaaaaaaaaaaaaaaaaaaaaa

SEQ ID NO: 2762 - RNA, 5419 nt, synthetic construct
  source 1..5419: mol_type = other RNA
aggaaataagagagaaaagaagagtaagaagaaatataagagccaccatggcccctaagaagaagcgtaaagtgagccgggtgaacggcagcggcagcggcggcggcatgaaccacgaccaggagttcgacccccctaaggtgtaccctcccgtccccgccgagaagagaaagcccatccgggtcctgagcctgttcgatggcatcgccaccggtctgctggtgctgaaggacctgggcatccaggtggataggtacattgcctccgaggtgtgcgaggactccatcaccgtgggaatggtgcgtcatcagggcaagatcatgtacgtgggcgacgtgcggagcgtgacacagaagcatatccaggagtggggccctttcgacctggtgatcggcggcagcccttgcaatgacctgagcatcgtgaacccagcccggaagggcctgtacgagggaaccggcagactgttcttcgagttttacagactgctgcacgacgcccggcctaaggaaggcgacgaccggcccttcttttggctgttcgagaatgtggtggccatgggagtcagcgacaagcgggatattagccggttcctggagagcaaccccgtgatgatcgatgccaaggaagtgagcgccgcccaccgggccagatacttctggggcaatctgcctggcatgaacagacccctggccagcaccgtgaacgacaagctggagctgcaggagtgcctggagcacggccggatcgccaagttcagcaaggtgagaaccatcaccacccgaagcaacagcatcaaacaaggcaaggaccagcactttcctgtgttcatgaacgagaaggaggacatcctgtggtgtaccgagatggagagagtgttcgggttcccagtccactacacagatgtcagcaacatgtctagactggccagacagagactgctgggaagaagctggtccgtccctgtgatcagacacctgttcgcccctctgaaggagtacttcgcctgcgtgagcagcggcaacagcaacgccaacagccggggccccagcttctctagcggcctggtgccactgtccctgagagggagccacatgggccccatggagatctacaaaaccgtgagcgcctggaagcggcagcctgtgcgcgtgctgagcctgtttcggaatatcgataaagtcctgaaaagcctgggattcctggagagcggctctggctccggcggtggcaccctgaagtacgtggaggatgtgacaaacgtggtcagacgggatgtggagaagtggggccccttcgatctggtgtacggcagcacccaacccctgggcagctcttgtgaccggtgccctggctggtacatgtttcagttccaccggatcctgcagtacgccctgccgagacaggagtcccagcggccattcttttggattttcatggacaacttgctgctgaccgaggatgaccaggaaactaccactcggttcctgcagaccgaagccgtgaccctgcaggacgtgagaggccgggactaccagaacgccatgcgggtgtggtccaacatccctggactgaaaagcaagcacgcacctctgacccctaaagaagaggagtacctgcaggcccaggtgcggagcagaagcaagctggacgcccctaaggtggatctgctggtgaagaattgcctcctgcccctgagagagtacttcaagtatttcagccagaatagtctgcccctgggcggcccaagcagcggcgcccctcctcccagcggcggcagcccagccggctccccaacctctaccgaggagggcacctctgagtccgccacccccgagagcggccctggcacctccaccgagcccagcgagggcagcgcacccggcagccctgccggcagccccacctccacagaggagggaaccagcaccgagcccagcgaaggcagcgccccaggcaccagcaccgagcctagtgagggcggctctggcggcggcagcgcccaggagattaaacggatcaacaagatcagaagaagacttgtgaaagacagcaacaccaagaaggccggcaagacaggccccatgaaaaccctgctggttagagtgatgacacccgatctgagagagcggctggaaaacctgagaaagaagcctgaaaatatcccccagcccatcagcaatacatctagagccaacctgaataagctgctgaccgattacaccgaaatgaagaaggcgatcctgcatgtgtactgggaagagttccagaaggaccctgtgggcctgatgagccgggtggcccagcctgccagcaagaagatcgatcagaacaagctgaaacctgagatggacgagaagggcaacctgaccaccgccggctttgcctgctctcagtgtggccagcccctgttcgtgtacaagctggagcaggtgtctgagaagggcaaggcttacaccaactacttcggacggtgcaatgtggccgagcacgaaaagctgatcctgctggcccagctgaagcccgagaaggatagcgacgaagccgtgacatatagcctgggaaagtttgggcagagggccctggatttctacagcattcatgtgaccaaggagtccacccaccccgtgaagcccctggcccagatcgccggaaacagatacgcctccggacctgtgggaaaggccctgagcgacgcatgtatgggcacaatcgcctccttcctgtctaagtaccaggacatcatcatcgaacaccagaaggtggtgaagggcaaccagaagagactggagagcctgcgggagctggccggcaaggaaaacctggaataccctagcgtgaccctgccacctcagcctcacaccaaggagggcgttgatgcctacaacgaagtgatcgcccgggtgcgaatgtgggtgaacctgaacctgtggcagaagctgaagctaagcagagatgatgccaagcctctgctgagactgaagggattcccttcctttcctctggtcgagagacaggccaacgaagtggactggtgggacatggtgtgtaacgtgaagaagctgatcaacgagaaaaaggaggatggcaaggtgttttggcagaatctggctggctacaagagacaggaagccctgagaccatacctgagcagcgaggaagatcggaagaagggaaagaaattcgctcggtaccagctgggcgacctgctgctgcacctggaaaagaagcacggcgaggactggggaaaggtgtacgacgaggcctgggagcggattgacaagaaagtggaaggcctgagcaagcacatcaagctggaagaggaacggagaagcgaggacgcccagagcaaggccgccctgaccgactggctgcgggctaaggccagcttcgtgatcgagggcctgaaggaggccgacaaggacgagttctgcagatgcgagctgaagctgcagaagtggtacggggacctgcggggaaagcccttcgccatcgaagccgagaacagcatcctggacatcagcggcttcagcaagcagtacaactgtgccttcatctggcagaaggacggcgtgaagaagctgaacctgtacctgatcatcaactacttcaagggcggcaagctgcggttcaagaagatcaaacctgaagccttcgaagccaacagattctacaccgtgatcaacaaaaagagcggcgagatcgtgcccatggaggtgaacttcaacttcgacgaccccaacctgatcatcctgcctctggcctttggcaagagacagggcagagaattcatctggaacgacctgctgtccctggaaaccggcagcctgaagctggccaacggaagagtgatcgagaagacactgtacaacagaagaacccggcaggatgagcctgccctgttcgtggccctgaccttcgagcggcgggaggtcctggactcctccaatatcaaaccaatgaacctgatcggcgtggcaagaggcgaaaacatccccgccgtgatcgccctgaccgaccccgagggctgcccactgagccggtttaaggatagcctgggaaacccaacccacatcctgagaatcggcgagagctataaggagaagcagcggaccatccaggccaagaaggaggtggagcagcggagagccggcggctacagccggaagtacgccagcaaagccaagaatctggcagacgatatggtgagaaacaccgctagagatctgctgtactacgccgtgacccaggatgccatgctgatcttcgccaacctgagccggggcttcggccggcagggcaagcggaccttcatggccgagagacagtacacacggatggaggactggctgaccgccaagctggcctacgagggcctgagcaagacctacctgtccaagacactggcccagtacacctccaagacatgcagcaactgtgggtttaccatcaccagcgccgactacgacagggtgctggagaagctgaagaagacagcaacaggctggatgaccacaattaacggcaaggagctgaaggtggagggccagattacctactacaacagatacaagagacagaacgtagtcaaggacctgtccgtcgagctggatagactgagcgaagaatctgtgaacaacgacatctcctcctggacaaagggcagaagcggagaagctctgagcctcctgaagaaaagattctcccatagacccgtgcaggagaagttcgtgtgcctgaactgcggcttcgagacacacgcagccgagcaagccgccctgaacatcgccagatcctggctgttcctgcggagccaggagtacaagaaataccagacaaacaagacaaccggcaacaccgataagagagccttcgtcgagacctggcagtccttttaccggaagaagcttaaggaggtgtggaaacctgccgtgcggtctggcggatctggcggaggctccacaagcggctgctgcagcctggagacccacagcatcagggacaagaacgccgtgacctacggcgacgtgcacgtgaacttcacccaggaggagtgggccctgctggaccccagccagaagaagctgtacaaggacgtgatgctggagacctacaggaacctgaacgccatcggcttcaactgggacgacaagaacaccgaggagcactgccccagcaccaggaggtggaggaggttctacaggatgcagaccagccccaagaaaaagagaaaagtctaagctgccttctgcggggcttgccttctggccatgcccttcttctctcccttgcacctgtacctcttggtctttgaataaagcctgagtaggaaggctagcaaaaaaaaaaaaaaaaaaaaaaaaaaaaaaaaaaaaaaaaaaaaaaaaaaaaaaaaaaaaaaaaaaaaaaaaaaaaaaaa

SEQ ID NO: 2763 - RNA, 5419 nt, synthetic construct
  source 1..5419: mol_type = other RNA
aggaaataagagagaaaagaagagtaagaagaaatataagagccaccatggcccctaagaagaagcgtaaagtgagccgggtgaacggcagcggcagcggcggcggcatgaaccacgaccaggagttcgacccccctaaggtgtaccctcccgtccccgccgagaagagaaagcccatccgggtcctgagcctgttcgatggcatcgccaccggtctgctggtgctgaaggacctgggcatccaggtggataggtacattgcctccgaggtgtgcgaggactccatcaccgtgggaatggtgcgtcatcagggcaagatcatgtacgtgggcgacgtgcggagcgtgacacagaagcatatccaggagtggggccctttcgacctggtgatcggcggcagcccttgcaatgacctgagcatcgtgaacccagcccggaagggcctgtacgagggaaccggcagactgttcttcgagttttacagactgctgcacgacgcccggcctaaggaaggcgacgaccggcccttcttttggctgttcgagaatgtggtggccatgggagtcagcgacaagcgggatattagccggttcctggagagcaaccccgtgatgatcgatgccaaggaagtgagcgccgcccaccgggccagatacttctggggcaatctgcctggcatgaacagacccctggccagcaccgtgaacgacaagctggagctgcaggagtgcctggagcacggccggatcgccaagttcagcaaggtgagaaccatcaccacccgaagcaacagcatcaaacaaggcaaggaccagcactttcctgtgttcatgaacgagaaggaggacatcctgtggtgtaccgagatggagagagtgttcgggttcccagtccactacacagatgtcagcaacatgtctagactggccagacagagactgctgggaagaagctggtccgtccctgtgatcagacacctgttcgcccctctgaaggagtacttcgcctgcgtgagcagcggcaacagcaacgccaacagccggggccccagcttctctagcggcctggtgccactgtccctgagagggagccacatgggccccatggagatctacaaaaccgtgagcgcctggaagcggcagcctgtgcgcgtgctgagcctgtttcggaatatcgataaagtcctgaaaagcctgggattcctggagagcggctctggctccggcggtggcaccctgaagtacgtggaggatgtgacaaacgtggtcagacgggatgtggagaagtggggccccttcgatctggtgtacggcagcacccaacccctgggcagctcttgtgaccggtgccctggctggtacatgtttcagttccaccggatcctgcagtacgccctgccgagacaggagtcccagcggccattcttttggattttcatggacaacttgctgctgaccgaggatgaccaggaaactaccactcggttcctgcagaccgaagccgtgaccctgcaggacgtgagaggccgggactaccagaacgccatgcgggtgtggtccaacatccctggactgaaaagcaagcacgcacctctgacccctaaagaagaggagtacctgcaggcccaggtgcggagcagaagcaagctggacgcccctaaggtggatctgctggtgaagaattgcctcctgcccctgagagagtacttcaagtatttcagccagaatagtctgcccctgggcggcccaagcagcggcgcccctcctcccagcggcggcagcccagccggctccccaacctctaccgaggagggcacctctgagtccgccacccccgagagcggccctggcacctccaccgagcccagcgagggcagcgcacccggcagccctgccggcagccccacctccacagaggagggaaccagcaccgagcccagcgaaggcagcgccccaggcaccagcaccgagcctagtgagggcggctctggcggcggcagcgcccaggagattaaacggatcaacaagatcagaagaagacttgtgaaagacagcaacaccaagaaggccggcaagacaggccccatgaaaaccctgctggttagagtgatgacacccgatctgagagagcggctggaaaacctgagaaagaagcctgaaaatatcccccagcccatcagcaatacatctagagccaacctgaataagctgctgaccgattacaccgaaatgaagaaggcgatcctgcatgtgtactgggaagagttccagaaggaccctgtgggcctgatgagccgggtggcccagcctgccagcaagaagatcgatcagaacaagctgaaacctgagatggacgagaagggcaacctgaccaccgccggctttgcctgctctcagtgtggccagcccctgttcgtgtacaagctggagcaggtgtctgagaagggcaaggcttacaccaactacttcggacggtgcaatgtggccgagcacgaaaagctgatcctgctggcccagctgaagcccgagaaggatagcgacgaagccgtgacatatagcctgggaaagtttgggcagagggccctggatttctacagcattcatgtgaccaaggagtccacccaccccgtgaagcccctggcccagatcgccggaaacagatacgcctccggacctgtgggaaaggccctgagcgacgcatgtatgggcacaatcgcctccttcctgtctaagtaccaggacatcatcatcgaacaccagaaggtggtgaagggcaaccagaagagactggagagcctgcgggagctggccggcaaggaaaacctggaataccctagcgtgaccctgccacctcagcctcacaccaaggagggcgttgatgcctacaacgaagtgatcgcccgggtgcgaatgtgggtgaacctgaacctgtggcagaagctgaagctaagcagagatgatgccaagcctctgctgagactgaagggattcccttcctttcctctggtcgagagacaggccaacgaagtggactggtgggacatggtgtgtaacgtgaagaagctgatcaacgagaaaaaggaggatggcaaggtgttttggcagaatctggctggctacaagagacaggaagccctgagaccatacctgagcagcgaggaagatcggaagaagggaaagaaattcgctcggtaccagctgggcgacctgctgctgcacctggaaaagaagcacggcgaggactggggaaaggtgtacgacgaggcctgggagcggattgacaagaaagtggaaggcctgagcaagcacatcaagctggaagaggaacggagaagcgaggacgcccagagcaaggccgccctgaccgactggctgcgggctaaggccagcttcgtgatcgagggcctgaaggaggccgacaaggacgagttctgcagatgcgagctgaagctgcagaagtggtacggggacctgcggggaaagcccttcgccatcgaagccgagaacagcatcctggacatcagcggcttcagcaagcagtacaactgtgccttcatctggcagaaggacggcgtgaagaagctgaacctgtacctgatcatcaactacttcaagggcggcaagctgcggttcaagaagatcaaacctgaagccttcgaagccaacagattctacaccgtgatcaacaaaaagagcggcgagatcgtgcccatggaggtgaacttcaacttcgacgaccccaacctgatcatcctgcctctggcctttggcaagagacagggcagagaattcatctggaacgacctgctgtccctggaaaccggcagcctgaagctggccaacggaagagtgatcgagaagacactgtacaacagaagaacccggcaggatgagcctgccctgttcgtggccctgaccttcgagcggcgggaggtcctggactcctccaatatcaaaccaatgaacctgatcggcgtggcaagaggcgaaaacatccccgccgtgatcgccctgaccgaccccgagggctgcccactgagccggtttaaggatagcctgggaaacccaacccacatcctgagaatcggcgagagctataaggagaagcagcggaccatccaggccaagaaggaggtggagcagcggagagccggcggctacagccggaagtacgccagcaaagccaagaatctggcagacgatatggtgagaaacaccgctagagatctgctgtactacgccgtgacccaggatgccatgctgatcttcgccaacctgagccggggcttcggccggcagggcaagcggaccttcatggccgagagacagtacacacggatggaggactggctgaccgccaagctggcctacgagggcctgagcaagacctacctgtccaagacactggcccagtacacctccaagacatgcagcaactgtgggtttaccatcaccagcgccgactacgacagggtgctggagaagctgaagaagacagcaacaggctggatgaccacaattaacggcaaggagctgaaggtggagggccagattacctactacaacagatacaagagacagaacgtagtcaaggacctgtccgtcgagctggatagactgagcgaagaatctgtgaacaacgacatctcctcctggacaaagggcagaagcggagaagctctgagcctcctgaagaaaagattctcccatagacccgtgcaggagaagttcgtgtgcctgaactgcggcttcgagacacacgcagccgagcaagccgccctgaacatcgccagatcctggctgttcctgcggagccaggagtacaagaaataccagacaaacaagacaaccggcaacaccgataagagagccttcgtcgagacctggcagtccttttaccggaagaagcttaaggaggtgtggaaacctgccgtgcggtctggcggatctggcggaggctccacaagcacctgcatggtgcacaggcagaccatgagctgcagcggcgccggcggcatcaccgccttcgtggccttcagggacgtggccgtggacttcacccaggaggagtggaggctgctgagccccgcccagaggaccctgcacagggaggtgatgctggagacctacaaccacctggtgagcctggagatccccagcagcaagcccaagctgatcgcccagctggagcagggcgaggagccctggaggaccagccccaagaaaaagagaaaagtctaagctgccttctgcggggcttgccttctggccatgcccttcttctctcccttgcacctgtacctcttggtctttgaataaagcctgagtaggaaggctagcaaaaaaaaaaaaaaaaaaaaaaaaaaaaaaaaaaaaaaaaaaaaaaaaaaaaaaaaaaaaaaaaaaaaaaaaaaaaaaaa

SEQ ID NO: 2764 - RNA, 5419 nt, synthetic construct
  source 1..5419: mol_type = other RNA
aggaaataagagagaaaagaagagtaagaagaaatataagagccaccatggcccctaagaagaagcgtaaagtgagccgggtgaacggcagcggcagcggcggcggcatgaaccacgaccaggagttcgacccccctaaggtgtaccctcccgtccccgccgagaagagaaagcccatccgggtcctgagcctgttcgatggcatcgccaccggtctgctggtgctgaaggacctgggcatccaggtggataggtacattgcctccgaggtgtgcgaggactccatcaccgtgggaatggtgcgtcatcagggcaagatcatgtacgtgggcgacgtgcggagcgtgacacagaagcatatccaggagtggggccctttcgacctggtgatcggcggcagcccttgcaatgacctgagcatcgtgaacccagcccggaagggcctgtacgagggaaccggcagactgttcttcgagttttacagactgctgcacgacgcccggcctaaggaaggcgacgaccggcccttcttttggctgttcgagaatgtggtggccatgggagtcagcgacaagcgggatattagccggttcctggagagcaaccccgtgatgatcgatgccaaggaagtgagcgccgcccaccgggccagatacttctggggcaatctgcctggcatgaacagacccctggccagcaccgtgaacgacaagctggagctgcaggagtgcctggagcacggccggatcgccaagttcagcaaggtgagaaccatcaccacccgaagcaacagcatcaaacaaggcaaggaccagcactttcctgtgttcatgaacgagaaggaggacatcctgtggtgtaccgagatggagagagtgttcgggttcccagtccactacacagatgtcagcaacatgtctagactggccagacagagactgctgggaagaagctggtccgtccctgtgatcagacacctgttcgcccctctgaaggagtacttcgcctgcgtgagcagcggcaacagcaacgccaacagccggggccccagcttctctagcggcctggtgccactgtccctgagagggagccacatgggccccatggagatctacaaaaccgtgagcgcctggaagcggcagcctgtgcgcgtgctgagcctgtttcggaatatcgataaagtcctgaaaagcctgggattcctggagagcggctctggctccggcggtggcaccctgaagtacgtggaggatgtgacaaacgtggtcagacgggatgtggagaagtggggccccttcgatctggtgtacggcagcacccaacccctgggcagctcttgtgaccggtgccctggctggtacatgtttcagttccaccggatcctgcagtacgccctgccgagacaggagtcccagcggccattcttttggattttcatggacaacttgctgctgaccgaggatgaccaggaaactaccactcggttcctgcagaccgaagccgtgaccctgcaggacgtgagaggccgggactaccagaacgccatgcgggtgtggtccaacatccctggactgaaaagcaagcacgcacctctgacccctaaagaagaggagtacctgcaggcccaggtgcggagcagaagcaagctggacgcccctaaggtggatctgctggtgaagaattgcctcctgcccctgagagagtacttcaagtatttcagccagaatagtctgcccctgggcggcccaagcagcggcgcccctcctcccagcggcggcagcccagccggctccccaacctctaccgaggagggcacctctgagtccgccacccccgagagcggccctggcacctccaccgagcccagcgagggcagcgcacccggcagccctgccggcagccccacctccacagaggagggaaccagcaccgagcccagcgaaggcagcgccccaggcaccagcaccgagcctagtgagggcggctctggcggcggcagcgcccaggagattaaacggatcaacaagatcagaagaagacttgtgaaagacagcaacaccaagaaggccggcaagacaggccccatgaaaaccctgctggttagagtgatgacacccgatctgagagagcggctggaaaacctgagaaagaagcctgaaaatatcccccagcccatcagcaatacatctagagccaacctgaataagctgctgaccgattacaccgaaatgaagaaggcgatcctgcatgtgtactgggaagagttccagaaggaccctgtgggcctgatgagccgggtggcccagcctgccagcaagaagatcgatcagaacaagctgaaacctgagatggacgagaagggcaacctgaccaccgccggctttgcctgctctcagtgtggccagcccctgttcgtgtacaagctggagcaggtgtctgagaagggcaaggcttacaccaactacttcggacggtgcaatgtggccgagcacgaaaagctgatcctgctggcccagctgaagcccgagaaggatagcgacgaagccgtgacatatagcctgggaaagtttgggcagagggccctggatttctacagcattcatgtgaccaaggagtccacccaccccgtgaagcccctggcccagatcgccggaaacagatacgcctccggacctgtgggaaaggccctgagcgacgcatgtatgggcacaatcgcctccttcctgtctaagtaccaggacatcatcatcgaacaccagaaggtggtgaagggcaaccagaagagactggagagcctgcgggagctggccggcaaggaaaacctggaataccctagcgtgaccctgccacctcagcctcacaccaaggagggcgttgatgcctacaacgaagtgatcgcccgggtgcgaatgtgggtgaacctgaacctgtggcagaagctgaagctaagcagagatgatgccaagcctctgctgagactgaagggattcccttcctttcctctggtcgagagacaggccaacgaagtggactggtgggacatggtgtgtaacgtgaagaagctgatcaacgagaaaaaggaggatggcaaggtgttttggcagaatctggctggctacaagagacaggaagccctgagaccatacctgagcagcgaggaagatcggaagaagggaaagaaattcgctcggtaccagctgggcgacctgctgctgcacctggaaaagaagcacggcgaggactggggaaaggtgtacgacgaggcctgggagcggattgacaagaaagtggaaggcctgagcaagcacatcaagctggaagaggaacggagaagcgaggacgcccagagcaaggccgccctgaccgactggctgcgggctaaggccagcttcgtgatcgagggcctgaaggaggccgacaaggacgagttctgcagatgcgagctgaagctgcagaagtggtacggggacctgcggggaaagcccttcgccatcgaagccgagaacagcatcctggacatcagcggcttcagcaagcagtacaactgtgccttcatctggcagaaggacggcgtgaagaagctgaacctgtacctgatcatcaactacttcaagggcggcaagctgcggttcaagaagatcaaacctgaagccttcgaagccaacagattctacaccgtgatcaacaaaaagagcggcgagatcgtgcccatggaggtgaacttcaacttcgacgaccccaacctgatcatcctgcctctggcctttggcaagagacagggcagagaattcatctggaacgacctgctgtccctggaaaccggcagcctgaagctggccaacggaagagtgatcgagaagacactgtacaacagaagaacccggcaggatgagcctgccctgttcgtggccctgaccttcgagcggcgggaggtcctggactcctccaatatcaaaccaatgaacctgatcggcgtggcaagaggcgaaaacatccccgccgtgatcgccctgaccgaccccgagggctgcccactgagccggtttaaggatagcctgggaaacccaacccacatcctgagaatcggcgagagctataaggagaagcagcggaccatccaggccaagaaggaggtggagcagcggagagccggcggctacagccggaagtacgccagcaaagccaagaatctggcagacgatatggtgagaaacaccgctagagatctgctgtactacgccgtgacccaggatgccatgctgatcttcgccaacctgagccggggcttcggccggcagggcaagcggaccttcatggccgagagacagtacacacggatggaggactggctgaccgccaagctggcctacgagggcctgagcaagacctacctgtccaagacactggcccagtacacctccaagacatgcagcaactgtgggtttaccatcaccagcgccgactacgacagggtgctggagaagctgaagaagacagcaacaggctggatgaccacaattaacggcaaggagctgaaggtggagggccagattacctactacaacagatacaagagacagaacgtagtcaaggacctgtccgtcgagctggatagactgagcgaagaatctgtgaacaacgacatctcctcctggacaaagggcagaagcggagaagctctgagcctcctgaagaaaagattctcccatagacccgtgcaggagaagttcgtgtgcctgaactgcggcttcgagacacacgcagccgagcaagccgccctgaacatcgccagatcctggctgttcctgcggagccaggagtacaagaaataccagacaaacaagacaaccggcaacaccgataagagagccttcgtcgagacctggcagtccttttaccggaagaagcttaaggaggtgtggaaacctgccgtgcggtctggcggatctggcggaggctccacaagcatggtgagcttcgaggacgtggccgtgctgctgagccaggaggagtgggactgcctgatccccgcccagaggggcctgtacagggacgtgatgctggagacctacggcaacctggtgagcctgggcctgcaggccagcaagcccgacgtgatcagcaggctggagcagggcgacaagccctggaccccccacatcctgaggacccagatcagctggagctggaggcacaagagggagtgctacaccagccccaagaaaaagagaaaagtctaagctgccttctgcggggcttgccttctggccatgcccttcttctctcccttgcacctgtacctcttggtctttgaataaagcctgagtaggaaggctagcaaaaaaaaaaaaaaaaaaaaaaaaaaaaaaaaaaaaaaaaaaaaaaaaaaaaaaaaaaaaaaaaaaaaaaaaaaaaaaaa

SEQ ID NO: 2765 - RNA, 5419 nt, synthetic construct
  source 1..5419: mol_type = other RNA
aggaaataagagagaaaagaagagtaagaagaaatataagagccaccatggcccctaagaagaagcgtaaagtgagccgggtgaacggcagcggcagcggcggcggcatgaaccacgaccaggagttcgacccccctaaggtgtaccctcccgtccccgccgagaagagaaagcccatccgggtcctgagcctgttcgatggcatcgccaccggtctgctggtgctgaaggacctgggcatccaggtggataggtacattgcctccgaggtgtgcgaggactccatcaccgtgggaatggtgcgtcatcagggcaagatcatgtacgtgggcgacgtgcggagcgtgacacagaagcatatccaggagtggggccctttcgacctggtgatcggcggcagcccttgcaatgacctgagcatcgtgaacccagcccggaagggcctgtacgagggaaccggcagactgttcttcgagttttacagactgctgcacgacgcccggcctaaggaaggcgacgaccggcccttcttttggctgttcgagaatgtggtggccatgggagtcagcgacaagcgggatattagccggttcctggagagcaaccccgtgatgatcgatgccaaggaagtgagcgccgcccaccgggccagatacttctggggcaatctgcctggcatgaacagacccctggccagcaccgtgaacgacaagctggagctgcaggagtgcctggagcacggccggatcgccaagttcagcaaggtgagaaccatcaccacccgaagcaacagcatcaaacaaggcaaggaccagcactttcctgtgttcatgaacgagaaggaggacatcctgtggtgtaccgagatggagagagtgttcgggttcccagtccactacacagatgtcagcaacatgtctagactggccagacagagactgctgggaagaagctggtccgtccctgtgatcagacacctgttcgcccctctgaaggagtacttcgcctgcgtgagcagcggcaacagcaacgccaacagccggggccccagcttctctagcggcctggtgccactgtccctgagagggagccacatgggccccatggagatctacaaaaccgtgagcgcctggaagcggcagcctgtgcgcgtgctgagcctgtttcggaatatcgataaagtcctgaaaagcctgggattcctggagagcggctctggctccggcggtggcaccctgaagtacgtggaggatgtgacaaacgtggtcagacgggatgtggagaagtggggccccttcgatctggtgtacggcagcacccaacccctgggcagctcttgtgaccggtgccctggctggtacatgtttcagttccaccggatcctgcagtacgccctgccgagacaggagtcccagcggccattcttttggattttcatggacaacttgctgctgaccgaggatgaccaggaaactaccactcggttcctgcagaccgaagccgtgaccctgcaggacgtgagaggccgggactaccagaacgccatgcgggtgtggtccaacatccctggactgaaaagcaagcacgcacctctgacccctaaagaagaggagtacctgcaggcccaggtgcggagcagaagcaagctggacgcccctaaggtggatctgctggtgaagaattgcctcctgcccctgagagagtacttcaagtatttcagccagaatagtctgcccctgggcggcccaagcagcggcgcccctcctcccagcggcggcagcccagccggctccccaacctctaccgaggagggcacctctgagtccgccacccccgagagcggccctggcacctccaccgagcccagcgagggcagcgcacccggcagccctgccggcagccccacctccacagaggagggaaccagcaccgagcccagcgaaggcagcgccccaggcaccagcaccgagcctagtgagggcggctctggcggcggcagcgcccaggagattaaacggatcaacaagatcagaagaagacttgtgaaagacagcaacaccaagaaggccggcaagacaggccccatgaaaaccctgctggttagagtgatgacacccgatctgagagagcggctggaaaacctgagaaagaagcctgaaaatatcccccagcccatcagcaatacatctagagccaacctgaataagctgctgaccgattacaccgaaatgaagaaggcgatcctgcatgtgtactgggaagagttccagaaggaccctgtgggcctgatgagccgggtggcccagcctgccagcaagaagatcgatcagaacaagctgaaacctgagatggacgagaagggcaacctgaccaccgccggctttgcctgctctcagtgtggccagcccctgttcgtgtacaagctggagcaggtgtctgagaagggcaaggcttacaccaactacttcggacggtgcaatgtggccgagcacgaaaagctgatcctgctggcccagctgaagcccgagaaggatagcgacgaagccgtgacatatagcctgggaaagtttgggcagagggccctggatttctacagcattcatgtgaccaaggagtccacccaccccgtgaagcccctggcccagatcgccggaaacagatacgcctccggacctgtgggaaaggccctgagcgacgcatgtatgggcacaatcgcctccttcctgtctaagtaccaggacatcatcatcgaacaccagaaggtggtgaagggcaaccagaagagactggagagcctgcgggagctggccggcaaggaaaacctggaataccctagcgtgaccctgccacctcagcctcacaccaaggagggcgttgatgcctacaacgaagtgatcgcccgggtgcgaatgtgggtgaacctgaacctgtggcagaagctgaagctaagcagagatgatgccaagcctctgctgagactgaagggattcccttcctttcctctggtcgagagacaggccaacgaagtggactggtgggacatggtgtgtaacgtgaagaagctgatcaacgagaaaaaggaggatggcaaggtgttttggcagaatctggctggctacaagagacaggaagccctgagaccatacctgagcagcgaggaagatcggaagaagggaaagaaattcgctcggtaccagctgggcgacctgctgctgcacctggaaaagaagcacggcgaggactggggaaaggtgtacgacgaggcctgggagcggattgacaagaaagtggaaggcctgagcaagcacatcaagctggaagaggaacggagaagcgaggacgcccagagcaaggccgccctgaccgactggctgcgggctaaggccagcttcgtgatcgagggcctgaaggaggccgacaaggacgagttctgcagatgcgagctgaagctgcagaagtggtacggggacctgcggggaaagcccttcgccatcgaagccgagaacagcatcctggacatcagcggcttcagcaagcagtacaactgtgccttcatctggcagaaggacggcgtgaagaagctgaacctgtacctgatcatcaactacttcaagggcggcaagctgcggttcaagaagatcaaacctgaagccttcgaagccaacagattctacaccgtgatcaacaaaaagagcggcgagatcgtgcccatggaggtgaacttcaacttcgacgaccccaacctgatcatcctgcctctggcctttggcaagagacagggcagagaattcatctggaacgacctgctgtccctggaaaccggcagcctgaagctggccaacggaagagtgatcgagaagacactgtacaacagaagaacccggcaggatgagcctgccctgttcgtggccctgaccttcgagcggcgggaggtcctggactcctccaatatcaaaccaatgaacctgatcggcgtggcaagaggcgaaaacatccccgccgtgatcgccctgaccgaccccgagggctgcccactgagccggtttaaggatagcctgggaaacccaacccacatcctgagaatcggcgagagctataaggagaagcagcggaccatccaggccaagaaggaggtggagcagcggagagccggcggctacagccggaagtacgccagcaaagccaagaatctggcagacgatatggtgagaaacaccgctagagatctgctgtactacgccgtgacccaggatgccatgctgatcttcgccaacctgagccggggcttcggccggcagggcaagcggaccttcatggccgagagacagtacacacggatggaggactggctgaccgccaagctggcctacgagggcctgagcaagacctacctgtccaagacactggcccagtacacctccaagacatgcagcaactgtgggtttaccatcaccagcgccgactacgacagggtgctggagaagctgaagaagacagcaacaggctggatgaccacaattaacggcaaggagctgaaggtggagggccagattacctactacaacagatacaagagacagaacgtagtcaaggacctgtccgtcgagctggatagactgagcgaagaatctgtgaacaacgacatctcctcctggacaaagggcagaagcggagaagctctgagcctcctgaagaaaagattctcccatagacccgtgcaggagaagttcgtgtgcctgaactgcggcttcgagacacacgcagccgagcaagccgccctgaacatcgccagatcctggctgttcctgcggagccaggagtacaagaaataccagacaaacaagacaaccggcaacaccgataagagagccttcgtcgagacctggcagtccttttaccggaagaagcttaaggaggtgtggaaacctgccgtgcggtctggcggatctggcggaggctccacaagcgcccagggcagcgtggtgttcagcgacgtgagcgtggacttcagccaggaggagtgggagtgcctggacagcggccagagggacctgtacagggacgtgatgctggagaactacagcaacctgctgagcatgggcttctacatccccaagccccccgtgatcagcctgctggagcagggcaaggagccctggatggtgggcagggagctgaccaagggcctgtgcagcgacctggagagcatgaccagccccaagaaaaagagaaaagtctaagctgccttctgcggggcttgccttctggccatgcccttcttctctcccttgcacctgtacctcttggtctttgaataaagcctgagtaggaaggctagcaaaaaaaaaaaaaaaaaaaaaaaaaaaaaaaaaaaaaaaaaaaaaaaaaaaaaaaaaaaaaaaaaaaaaaaaaaaaaaaa

SEQ ID NO: 2766 - RNA, 5419 nt, synthetic construct
  source 1..5419: mol_type = other RNA
aggaaataagagagaaaagaagagtaagaagaaatataagagccaccatggcccctaagaagaagcgtaaagtgagccgggtgaacggcagcggcagcggcggcggcatgaaccacgaccaggagttcgacccccctaaggtgtaccctcccgtccccgccgagaagagaaagcccatccgggtcctgagcctgttcgatggcatcgccaccggtctgctggtgctgaaggacctgggcatccaggtggataggtacattgcctccgaggtgtgcgaggactccatcaccgtgggaatggtgcgtcatcagggcaagatcatgtacgtgggcgacgtgcggagcgtgacacagaagcatatccaggagtggggccctttcgacctggtgatcggcggcagcccttgcaatgacctgagcatcgtgaacccagcccggaagggcctgtacgagggaaccggcagactgttcttcgagttttacagactgctgcacgacgcccggcctaaggaaggcgacgaccggcccttcttttggctgttcgagaatgtggtggccatgggagtcagcgacaagcgggatattagccggttcctggagagcaaccccgtgatgatcgatgccaaggaagtgagcgccgcccaccgggccagatacttctggggcaatctgcctggcatgaacagacccctggccagcaccgtgaacgacaagctggagctgcaggagtgcctggagcacggccggatcgccaagttcagcaaggtgagaaccatcaccacccgaagcaacagcatcaaacaaggcaaggaccagcactttcctgtgttcatgaacgagaaggaggacatcctgtggtgtaccgagatggagagagtgttcgggttcccagtccactacacagatgtcagcaacatgtctagactggccagacagagactgctgggaagaagctggtccgtccctgtgatcagacacctgttcgcccctctgaaggagtacttcgcctgcgtgagcagcggcaacagcaacgccaacagccggggccccagcttctctagcggcctggtgccactgtccctgagagggagccacatgggccccatggagatctacaaaaccgtgagcgcctggaagcggcagcctgtgcgcgtgctgagcctgtttcggaatatcgataaagtcctgaaaagcctgggattcctggagagcggctctggctccggcggtggcaccctgaagtacgtggaggatgtgacaaacgtggtcagacgggatgtggagaagtggggccccttcgatctggtgtacggcagcacccaacccctgggcagctcttgtgaccggtgccctggctggtacatgtttcagttccaccggatcctgcagtacgccctgccgagacaggagtcccagcggccattcttttggattttcatggacaacttgctgctgaccgaggatgaccaggaaactaccactcggttcctgcagaccgaagccgtgaccctgcaggacgtgagaggccgggactaccagaacgccatgcgggtgtggtccaacatccctggactgaaaagcaagcacgcacctctgacccctaaagaagaggagtacctgcaggcccaggtgcggagcagaagcaagctggacgcccctaaggtggatctgctggtgaagaattgcctcctgcccctgagagagtacttcaagtatttcagccagaatagtctgcccctgggcggcccaagcagcggcgcccctcctcccagcggcggcagcccagccggctccccaacctctaccgaggagggcacctctgagtccgccacccccgagagcggccctggcacctccaccgagcccagcgagggcagcgcacccggcagccctgccggcagccccacctccacagaggagggaaccagcaccgagcccagcgaaggcagcgccccaggcaccagcaccgagcctagtgagggcggctctggcggcggcagcgcccaggagattaaacggatcaacaagatcagaagaagacttgtgaaagacagcaacaccaagaaggccggcaagacaggccccatgaaaaccctgctggttagagtgatgacacccgatctgagagagcggctggaaaacctgagaaagaagcctgaaaatatcccccagcccatcagcaatacatctagagccaacctgaataagctgctgaccgattacaccgaaatgaagaaggcgatcctgcatgtgtactgggaagagttccagaaggaccctgtgggcctgatgagccgggtggcccagcctgccagcaagaagatcgatcagaacaagctgaaacctgagatggacgagaagggcaacctgaccaccgccggctttgcctgctctcagtgtggccagcccctgttcgtgtacaagctggagcaggtgtctgagaagggcaaggcttacaccaactacttcggacggtgcaatgtggccgagcacgaaaagctgatcctgctggcccagctgaagcccgagaaggatagcgacgaagccgtgacatatagcctgggaaagtttgggcagagggccctggatttctacagcattcatgtgaccaaggagtccacccaccccgtgaagcccctggcccagatcgccggaaacagatacgcctccggacctgtgggaaaggccctgagcgacgcatgtatgggcacaatcgcctccttcctgtctaagtaccaggacatcatcatcgaacaccagaaggtggtgaagggcaaccagaagagactggagagcctgcgggagctggccggcaaggaaaacctggaataccctagcgtgaccctgccacctcagcctcacaccaaggagggcgttgatgcctacaacgaagtgatcgcccgggtgcgaatgtgggtgaacctgaacctgtggcagaagctgaagctaagcagagatgatgccaagcctctgctgagactgaagggattcccttcctttcctctggtcgagagacaggccaacgaagtggactggtgggacatggtgtgtaacgtgaagaagctgatcaacgagaaaaaggaggatggcaaggtgttttggcagaatctggctggctacaagagacaggaagccctgagaccatacctgagcagcgaggaagatcggaagaagggaaagaaattcgctcggtaccagctgggcgacctgctgctgcacctggaaaagaagcacggcgaggactggggaaaggtgtacgacgaggcctgggagcggattgacaagaaagtggaaggcctgagcaagcacatcaagctggaagaggaacggagaagcgaggacgcccagagcaaggccgccctgaccgactggctgcgggctaaggccagcttcgtgatcgagggcctgaaggaggccgacaaggacgagttctgcagatgcgagctgaagctgcagaagtggtacggggacctgcggggaaagcccttcgccatcgaagccgagaacagcatcctggacatcagcggcttcagcaagcagtacaactgtgccttcatctggcagaaggacggcgtgaagaagctgaacctgtacctgatcatcaactacttcaagggcggcaagctgcggttcaagaagatcaaacctgaagccttcgaagccaacagattctacaccgtgatcaacaaaaagagcggcgagatcgtgcccatggaggtgaacttcaacttcgacgaccccaacctgatcatcctgcctctggcctttggcaagagacagggcagagaattcatctggaacgacctgctgtccctggaaaccggcagcctgaagctggccaacggaagagtgatcgagaagacactgtacaacagaagaacccggcaggatgagcctgccctgttcgtggccctgaccttcgagcggcgggaggtcctggactcctccaatatcaaaccaatgaacctgatcggcgtggcaagaggcgaaaacatccccgccgtgatcgccctgaccgaccccgagggctgcccactgagccggtttaaggatagcctgggaaacccaacccacatcctgagaatcggcgagagctataaggagaagcagcggaccatccaggccaagaaggaggtggagcagcggagagccggcggctacagccggaagtacgccagcaaagccaagaatctggcagacgatatggtgagaaacaccgctagagatctgctgtactacgccgtgacccaggatgccatgctgatcttcgccaacctgagccggggcttcggccggcagggcaagcggaccttcatggccgagagacagtacacacggatggaggactggctgaccgccaagctggcctacgagggcctgagcaagacctacctgtccaagacactggcccagtacacctccaagacatgcagcaactgtgggtttaccatcaccagcgccgactacgacagggtgctggagaagctgaagaagacagcaacaggctggatgaccacaattaacggcaaggagctgaaggtggagggccagattacctactacaacagatacaagagacagaacgtagtcaaggacctgtccgtcgagctggatagactgagcgaagaatctgtgaacaacgacatctcctcctggacaaagggcagaagcggagaagctctgagcctcctgaagaaaagattctcccatagacccgtgcaggagaagttcgtgtgcctgaactgcggcttcgagacacacgcagccgagcaagccgccctgaacatcgccagatcctggctgttcctgcggagccaggagtacaagaaataccagacaaacaagacaaccggcaacaccgataagagagccttcgtcgagacctggcagtccttttaccggaagaagcttaaggaggtgtggaaacctgccgtgcggtctggcggatctggcggaggctccacaagcagcaaggccagcgtgaccttcgccgacctggccgtgtacttcagccaggaggagtgggagggcctgagccccatccagaaggacctgtacgaggacgtgatgctggagacctaccagaacctggtgagcgtgggcctgagctgcaggaggcccagcgtgatcaccctgctggagaagggcaaggccccctggaccgtggagcccgccaggcagaggaggggccccgacagcggcgccaagtgcaccagccccaagaaaaagagaaaagtctaagctgccttctgcggggcttgccttctggccatgcccttcttctctcccttgcacctgtacctcttggtctttgaataaagcctgagtaggaaggctagcaaaaaaaaaaaaaaaaaaaaaaaaaaaaaaaaaaaaaaaaaaaaaaaaaaaaaaaaaaaaaaaaaaaaaaaaaaaaaaaa

SEQ ID NO: 2767 - RNA, 5419 nt, synthetic construct
  source 1..5419: mol_type = other RNA
aggaaataagagagaaaagaagagtaagaagaaatataagagccaccatggcccctaagaagaagcgtaaagtgagccgggtgaacggcagcggcagcggcggcggcatgaaccacgaccaggagttcgacccccctaaggtgtaccctcccgtccccgccgagaagagaaagcccatccgggtcctgagcctgttcgatggcatcgccaccggtctgctggtgctgaaggacctgggcatccaggtggataggtacattgcctccgaggtgtgcgaggactccatcaccgtgggaatggtgcgtcatcagggcaagatcatgtacgtgggcgacgtgcggagcgtgacacagaagcatatccaggagtggggccctttcgacctggtgatcggcggcagcccttgcaatgacctgagcatcgtgaacccagcccggaagggcctgtacgagggaaccggcagactgttcttcgagttttacagactgctgcacgacgcccggcctaaggaaggcgacgaccggcccttcttttggctgttcgagaatgtggtggccatgggagtcagcgacaagcgggatattagccggttcctggagagcaaccccgtgatgatcgatgccaaggaagtgagcgccgcccaccgggccagatacttctggggcaatctgcctggcatgaacagacccctggccagcaccgtgaacgacaagctggagctgcaggagtgcctggagcacggccggatcgccaagttcagcaaggtgagaaccatcaccacccgaagcaacagcatcaaacaaggcaaggaccagcactttcctgtgttcatgaacgagaaggaggacatcctgtggtgtaccgagatggagagagtgttcgggttcccagtccactacacagatgtcagcaacatgtctagactggccagacagagactgctgggaagaagctggtccgtccctgtgatcagacacctgttcgcccctctgaaggagtacttcgcctgcgtgagcagcggcaacagcaacgccaacagccggggccccagcttctctagcggcctggtgccactgtccctgagagggagccacatgggccccatggagatctacaaaaccgtgagcgcctggaagcggcagcctgtgcgcgtgctgagcctgtttcggaatatcgataaagtcctgaaaagcctgggattcctggagagcggctctggctccggcggtggcaccctgaagtacgtggaggatgtgacaaacgtggtcagacgggatgtggagaagtggggccccttcgatctggtgtacggcagcacccaacccctgggcagctcttgtgaccggtgccctggctggtacatgtttcagttccaccggatcctgcagtacgccctgccgagacaggagtcccagcggccattcttttggattttcatggacaacttgctgctgaccgaggatgaccaggaaactaccactcggttcctgcagaccgaagccgtgaccctgcaggacgtgagaggccgggactaccagaacgccatgcgggtgtggtccaacatccctggactgaaaagcaagcacgcacctctgacccctaaagaagaggagtacctgcaggcccaggtgcggagcagaagcaagctggacgcccctaaggtggatctgctggtgaagaattgcctcctgcccctgagagagtacttcaagtatttcagccagaatagtctgcccctgggcggcccaagcagcggcgcccctcctcccagcggcggcagcccagccggctccccaacctctaccgaggagggcacctctgagtccgccacccccgagagcggccctggcacctccaccgagcccagcgagggcagcgcacccggcagccctgccggcagccccacctccacagaggagggaaccagcaccgagcccagcgaaggcagcgccccaggcaccagcaccgagcctagtgagggcggctctggcggcggcagcgcccaggagattaaacggatcaacaagatcagaagaagacttgtgaaagacagcaacaccaagaaggccggcaagacaggccccatgaaaaccctgctggttagagtgatgacacccgatctgagagagcggctggaaaacctgagaaagaagcctgaaaatatcccccagcccatcagcaatacatctagagccaacctgaataagctgctgaccgattacaccgaaatgaagaaggcgatcctgcatgtgtactgggaagagttccagaaggaccctgtgggcctgatgagccgggtggcccagcctgccagcaagaagatcgatcagaacaagctgaaacctgagatggacgagaagggcaacctgaccaccgccggctttgcctgctctcagtgtggccagcccctgttcgtgtacaagctggagcaggtgtctgagaagggcaaggcttacaccaactacttcggacggtgcaatgtggccgagcacgaaaagctgatcctgctggcccagctgaagcccgagaaggatagcgacgaagccgtgacatatagcctgggaaagtttgggcagagggccctggatttctacagcattcatgtgaccaaggagtccacccaccccgtgaagcccctggcccagatcgccggaaacagatacgcctccggacctgtgggaaaggccctgagcgacgcatgtatgggcacaatcgcctccttcctgtctaagtaccaggacatcatcatcgaacaccagaaggtggtgaagggcaaccagaagagactggagagcctgcgggagctggccggcaaggaaaacctggaataccctagcgtgaccctgccacctcagcctcacaccaaggagggcgttgatgcctacaacgaagtgatcgcccgggtgcgaatgtgggtgaacctgaacctgtggcagaagctgaagctaagcagagatgatgccaagcctctgctgagactgaagggattcccttcctttcctctggtcgagagacaggccaacgaagtggactggtgggacatggtgtgtaacgtgaagaagctgatcaacgagaaaaaggaggatggcaaggtgttttggcagaatctggctggctacaagagacaggaagccctgagaccatacctgagcagcgaggaagatcggaagaagggaaagaaattcgctcggtaccagctgggcgacctgctgctgcacctggaaaagaagcacggcgaggactggggaaaggtgtacgacgaggcctgggagcggattgacaagaaagtggaaggcctgagcaagcacatcaagctggaagaggaacggagaagcgaggacgcccagagcaaggccgccctgaccgactggctgcgggctaaggccagcttcgtgatcgagggcctgaaggaggccgacaaggacgagttctgcagatgcgagctgaagctgcagaagtggtacggggacctgcggggaaagcccttcgccatcgaagccgagaacagcatcctggacatcagcggcttcagcaagcagtacaactgtgccttcatctggcagaaggacggcgtgaagaagctgaacctgtacctgatcatcaactacttcaagggcggcaagctgcggttcaagaagatcaaacctgaagccttcgaagccaacagattctacaccgtgatcaacaaaaagagcggcgagatcgtgcccatggaggtgaacttcaacttcgacgaccccaacctgatcatcctgcctctggcctttggcaagagacagggcagagaattcatctggaacgacctgctgtccctggaaaccggcagcctgaagctggccaacggaagagtgatcgagaagacactgtacaacagaagaacccggcaggatgagcctgccctgttcgtggccctgaccttcgagcggcgggaggtcctggactcctccaatatcaaaccaatgaacctgatcggcgtggcaagaggcgaaaacatccccgccgtgatcgccctgaccgaccccgagggctgcccactgagccggtttaaggatagcctgggaaacccaacccacatcctgagaatcggcgagagctataaggagaagcagcggaccatccaggccaagaaggaggtggagcagcggagagccggcggctacagccggaagtacgccagcaaagccaagaatctggcagacgatatggtgagaaacaccgctagagatctgctgtactacgccgtgacccaggatgccatgctgatcttcgccaacctgagccggggcttcggccggcagggcaagcggaccttcatggccgagagacagtacacacggatggaggactggctgaccgccaagctggcctacgagggcctgagcaagacctacctgtccaagacactggcccagtacacctccaagacatgcagcaactgtgggtttaccatcaccagcgccgactacgacagggtgctggagaagctgaagaagacagcaacaggctggatgaccacaattaacggcaaggagctgaaggtggagggccagattacctactacaacagatacaagagacagaacgtagtcaaggacctgtccgtcgagctggatagactgagcgaagaatctgtgaacaacgacatctcctcctggacaaagggcagaagcggagaagctctgagcctcctgaagaaaagattctcccatagacccgtgcaggagaagttcgtgtgcctgaactgcggcttcgagacacacgcagccgagcaagccgccctgaacatcgccagatcctggctgttcctgcggagccaggagtacaagaaataccagacaaacaagacaaccggcaacaccgataagagagccttcgtcgagacctggcagtccttttaccggaagaagcttaaggaggtgtggaaacctgccgtgcggtctggcggatctggcggaggctccacaagcgagagcgtggccttcgaggacgtggccgtgtacttcacccagaaccagtgggccagcctggaccccgcccagagggccctgtacagggaggtgatgctggagaactacgccaacgtggccagcctggtggccttccccttccccaagcccgccctgatcagccacctggagaagggcgaggccccctggggccccgacccctgggacgccgagatccccagcagcctgagccagggcgacgagaccagccccaagaaaaagagaaaagtctaagctgccttctgcggggcttgccttctggccatgcccttcttctctcccttgcacctgtacctcttggtctttgaataaagcctgagtaggaaggctagcaaaaaaaaaaaaaaaaaaaaaaaaaaaaaaaaaaaaaaaaaaaaaaaaaaaaaaaaaaaaaaaaaaaaaaaaaaaaaaaa

SEQ ID NO: 2768 - RNA, 5419 nt, synthetic construct
  source 1..5419: mol_type = other RNA
aggaaataagagagaaaagaagagtaagaagaaatataagagccaccatggcccctaagaagaagcgtaaagtgagccgggtgaacggcagcggcagcggcggcggcatgaaccacgaccaggagttcgacccccctaaggtgtaccctcccgtccccgccgagaagagaaagcccatccgggtcctgagcctgttcgatggcatcgccaccggtctgctggtgctgaaggacctgggcatccaggtggataggtacattgcctccgaggtgtgcgaggactccatcaccgtgggaatggtgcgtcatcagggcaagatcatgtacgtgggcgacgtgcggagcgtgacacagaagcatatccaggagtggggccctttcgacctggtgatcggcggcagcccttgcaatgacctgagcatcgtgaacccagcccggaagggcctgtacgagggaaccggcagactgttcttcgagttttacagactgctgcacgacgcccggcctaaggaaggcgacgaccggcccttcttttggctgttcgagaatgtggtggccatgggagtcagcgacaagcgggatattagccggttcctggagagcaaccccgtgatgatcgatgccaaggaagtgagcgccgcccaccgggccagatacttctggggcaatctgcctggcatgaacagacccctggccagcaccgtgaacgacaagctggagctgcaggagtgcctggagcacggccggatcgccaagttcagcaaggtgagaaccatcaccacccgaagcaacagcatcaaacaaggcaaggaccagcactttcctgtgttcatgaacgagaaggaggacatcctgtggtgtaccgagatggagagagtgttcgggttcccagtccactacacagatgtcagcaacatgtctagactggccagacagagactgctgggaagaagctggtccgtccctgtgatcagacacctgttcgcccctctgaaggagtacttcgcctgcgtgagcagcggcaacagcaacgccaacagccggggccccagcttctctagcggcctggtgccactgtccctgagagggagccacatgggccccatggagatctacaaaaccgtgagcgcctggaagcggcagcctgtgcgcgtgctgagcctgtttcggaatatcgataaagtcctgaaaagcctgggattcctggagagcggctctggctccggcggtggcaccctgaagtacgtggaggatgtgacaaacgtggtcagacgggatgtggagaagtggggccccttcgatctggtgtacggcagcacccaacccctgggcagctcttgtgaccggtgccctggctggtacatgtttcagttccaccggatcctgcagtacgccctgccgagacaggagtcccagcggccattcttttggattttcatggacaacttgctgctgaccgaggatgaccaggaaactaccactcggttcctgcagaccgaagccgtgaccctgcaggacgtgagaggccgggactaccagaacgccatgcgggtgtggtccaacatccctggactgaaaagcaagcacgcacctctgacccctaaagaagaggagtacctgcaggcccaggtgcggagcagaagcaagctggacgcccctaaggtggatctgctggtgaagaattgcctcctgcccctgagagagtacttcaagtatttcagccagaatagtctgcccctgggcggcccaagcagcggcgcccctcctcccagcggcggcagcccagccggctccccaacctctaccgaggagggcacctctgagtccgccacccccgagagcggccctggcacctccaccgagcccagcgagggcagcgcacccggcagccctgccggcagccccacctccacagaggagggaaccagcaccgagcccagcgaaggcagcgccccaggcaccagcaccgagcctagtgagggcggctctggcggcggcagcgcccaggagattaaacggatcaacaagatcagaagaagacttgtgaaagacagcaacaccaagaaggccggcaagacaggccccatgaaaaccctgctggttagagtgatgacacccgatctgagagagcggctggaaaacctgagaaagaagcctgaaaatatcccccagcccatcagcaatacatctagagccaacctgaataagctgctgaccgattacaccgaaatgaagaaggcgatcctgcatgtgtactgggaagagttccagaaggaccctgtgggcctgatgagccgggtggcccagcctgccagcaagaagatcgatcagaacaagctgaaacctgagatggacgagaagggcaacctgaccaccgccggctttgcctgctctcagtgtggccagcccctgttcgtgtacaagctggagcaggtgtctgagaagggcaaggcttacaccaactacttcggacggtgcaatgtggccgagcacgaaaagctgatcctgctggcccagctgaagcccgagaaggatagcgacgaagccgtgacatatagcctgggaaagtttgggcagagggccctggatttctacagcattcatgtgaccaaggagtccacccaccccgtgaagcccctggcccagatcgccggaaacagatacgcctccggacctgtgggaaaggccctgagcgacgcatgtatgggcacaatcgcctccttcctgtctaagtaccaggacatcatcatcgaacaccagaaggtggtgaagggcaaccagaagagactggagagcctgcgggagctggccggcaaggaaaacctggaataccctagcgtgaccctgccacctcagcctcacaccaaggagggcgttgatgcctacaacgaagtgatcgcccgggtgcgaatgtgggtgaacctgaacctgtggcagaagctgaagctaagcagagatgatgccaagcctctgctgagactgaagggattcccttcctttcctctggtcgagagacaggccaacgaagtggactggtgggacatggtgtgtaacgtgaagaagctgatcaacgagaaaaaggaggatggcaaggtgttttggcagaatctggctggctacaagagacaggaagccctgagaccatacctgagcagcgaggaagatcggaagaagggaaagaaattcgctcggtaccagctgggcgacctgctgctgcacctggaaaagaagcacggcgaggactggggaaaggtgtacgacgaggcctgggagcggattgacaagaaagtggaaggcctgagcaagcacatcaagctggaagaggaacggagaagcgaggacgcccagagcaaggccgccctgaccgactggctgcgggctaaggccagcttcgtgatcgagggcctgaaggaggccgacaaggacgagttctgcagatgcgagctgaagctgcagaagtggtacggggacctgcggggaaagcccttcgccatcgaagccgagaacagcatcctggacatcagcggcttcagcaagcagtacaactgtgccttcatctggcagaaggacggcgtgaagaagctgaacctgtacctgatcatcaactacttcaagggcggcaagctgcggttcaagaagatcaaacctgaagccttcgaagccaacagattctacaccgtgatcaacaaaaagagcggcgagatcgtgcccatggaggtgaacttcaacttcgacgaccccaacctgatcatcctgcctctggcctttggcaagagacagggcagagaattcatctggaacgacctgctgtccctggaaaccggcagcctgaagctggccaacggaagagtgatcgagaagacactgtacaacagaagaacccggcaggatgagcctgccctgttcgtggccctgaccttcgagcggcgggaggtcctggactcctccaatatcaaaccaatgaacctgatcggcgtggcaagaggcgaaaacatccccgccgtgatcgccctgaccgaccccgagggctgcccactgagccggtttaaggatagcctgggaaacccaacccacatcctgagaatcggcgagagctataaggagaagcagcggaccatccaggccaagaaggaggtggagcagcggagagccggcggctacagccggaagtacgccagcaaagccaagaatctggcagacgatatggtgagaaacaccgctagagatctgctgtactacgccgtgacccaggatgccatgctgatcttcgccaacctgagccggggcttcggccggcagggcaagcggaccttcatggccgagagacagtacacacggatggaggactggctgaccgccaagctggcctacgagggcctgagcaagacctacctgtccaagacactggcccagtacacctccaagacatgcagcaactgtgggtttaccatcaccagcgccgactacgacagggtgctggagaagctgaagaagacagcaacaggctggatgaccacaattaacggcaaggagctgaaggtggagggccagattacctactacaacagatacaagagacagaacgtagtcaaggacctgtccgtcgagctggatagactgagcgaagaatctgtgaacaacgacatctcctcctggacaaagggcagaagcggagaagctctgagcctcctgaagaaaagattctcccatagacccgtgcaggagaagttcgtgtgcctgaactgcggcttcgagacacacgcagccgagcaagccgccctgaacatcgccagatcctggctgttcctgcggagccaggagtacaagaaataccagacaaacaagacaaccggcaacaccgataagagagccttcgtcgagacctggcagtccttttaccggaagaagcttaaggaggtgtggaaacctgccgtgcggtctggcggatctggcggaggctccacaagccccgtgaggggccccggcgaggccaggcccagcaggaagaggggcaggaggcccagggccctgaagttcgtggacgtggccgtgtacttcagcagcgaggagtggggctgcctgaggcccgcccagagggccctgtacagggacgtgatgagggagacctacggccacctgggcgccctgggctgcgccggccccaagcccgccctgatcagctggctggagaggaacaccgacgactgggagaccagccccaagaaaaagagaaaagtctaagctgccttctgcggggcttgccttctggccatgcccttcttctctcccttgcacctgtacctcttggtctttgaataaagcctgagtaggaaggctagcaaaaaaaaaaaaaaaaaaaaaaaaaaaaaaaaaaaaaaaaaaaaaaaaaaaaaaaaaaaaaaaaaaaaaaaaaaaaaaaa

SEQ ID NO: 2769 - RNA, 5419 nt, synthetic construct
  source 1..5419: mol_type = other RNA
aggaaataagagagaaaagaagagtaagaagaaatataagagccaccatggcccctaagaagaagcgtaaagtgagccgggtgaacggcagcggcagcggcggcggcatgaaccacgaccaggagttcgacccccctaaggtgtaccctcccgtccccgccgagaagagaaagcccatccgggtcctgagcctgttcgatggcatcgccaccggtctgctggtgctgaaggacctgggcatccaggtggataggtacattgcctccgaggtgtgcgaggactccatcaccgtgggaatggtgcgtcatcagggcaagatcatgtacgtgggcgacgtgcggagcgtgacacagaagcatatccaggagtggggccctttcgacctggtgatcggcggcagcccttgcaatgacctgagcatcgtgaacccagcccggaagggcctgtacgagggaaccggcagactgttcttcgagttttacagactgctgcacgacgcccggcctaaggaaggcgacgaccggcccttcttttggctgttcgagaatgtggtggccatgggagtcagcgacaagcgggatattagccggttcctggagagcaaccccgtgatgatcgatgccaaggaagtgagcgccgcccaccgggccagatacttctggggcaatctgcctggcatgaacagacccctggccagcaccgtgaacgacaagctggagctgcaggagtgcctggagcacggccggatcgccaagttcagcaaggtgagaaccatcaccacccgaagcaacagcatcaaacaaggcaaggaccagcactttcctgtgttcatgaacgagaaggaggacatcctgtggtgtaccgagatggagagagtgttcgggttcccagtccactacacagatgtcagcaacatgtctagactggccagacagagactgctgggaagaagctggtccgtccctgtgatcagacacctgttcgcccctctgaaggagtacttcgcctgcgtgagcagcggcaacagcaacgccaacagccggggccccagcttctctagcggcctggtgccactgtccctgagagggagccacatgggccccatggagatctacaaaaccgtgagcgcctggaagcggcagcctgtgcgcgtgctgagcctgtttcggaatatcgataaagtcctgaaaagcctgggattcctggagagcggctctggctccggcggtggcaccctgaagtacgtggaggatgtgacaaacgtggtcagacgggatgtggagaagtggggccccttcgatctggtgtacggcagcacccaacccctgggcagctcttgtgaccggtgccctggctggtacatgtttcagttccaccggatcctgcagtacgccctgccgagacaggagtcccagcggccattcttttggattttcatggacaacttgctgctgaccgaggatgaccaggaaactaccactcggttcctgcagaccgaagccgtgaccctgcaggacgtgagaggccgggactaccagaacgccatgcgggtgtggtccaacatccctggactgaaaagcaagcacgcacctctgacccctaaagaagaggagtacctgcaggcccaggtgcggagcagaagcaagctggacgcccctaaggtggatctgctggtgaagaattgcctcctgcccctgagagagtacttcaagtatttcagccagaatagtctgcccctgggcggcccaagcagcggcgcccctcctcccagcggcggcagcccagccggctccccaacctctaccgaggagggcacctctgagtccgccacccccgagagcggccctggcacctccaccgagcccagcgagggcagcgcacccggcagccctgccggcagccccacctccacagaggagggaaccagcaccgagcccagcgaaggcagcgccccaggcaccagcaccgagcctagtgagggcggctctggcggcggcagcgcccaggagattaaacggatcaacaagatcagaagaagacttgtgaaagacagcaacaccaagaaggccggcaagacaggccccatgaaaaccctgctggttagagtgatgacacccgatctgagagagcggctggaaaacctgagaaagaagcctgaaaatatcccccagcccatcagcaatacatctagagccaacctgaataagctgctgaccgattacaccgaaatgaagaaggcgatcctgcatgtgtactgggaagagttccagaaggaccctgtgggcctgatgagccgggtggcccagcctgccagcaagaagatcgatcagaacaagctgaaacctgagatggacgagaagggcaacctgaccaccgccggctttgcctgctctcagtgtggccagcccctgttcgtgtacaagctggagcaggtgtctgagaagggcaaggcttacaccaactacttcggacggtgcaatgtggccgagcacgaaaagctgatcctgctggcccagctgaagcccgagaaggatagcgacgaagccgtgacatatagcctgggaaagtttgggcagagggccctggatttctacagcattcatgtgaccaaggagtccacccaccccgtgaagcccctggcccagatcgccggaaacagatacgcctccggacctgtgggaaaggccctgagcgacgcatgtatgggcacaatcgcctccttcctgtctaagtaccaggacatcatcatcgaacaccagaaggtggtgaagggcaaccagaagagactggagagcctgcgggagctggccggcaaggaaaacctggaataccctagcgtgaccctgccacctcagcctcacaccaaggagggcgttgatgcctacaacgaagtgatcgcccgggtgcgaatgtgggtgaacctgaacctgtggcagaagctgaagctaagcagagatgatgccaagcctctgctgagactgaagggattcccttcctttcctctggtcgagagacaggccaacgaagtggactggtgggacatggtgtgtaacgtgaagaagctgatcaacgagaaaaaggaggatggcaaggtgttttggcagaatctggctggctacaagagacaggaagccctgagaccatacctgagcagcgaggaagatcggaagaagggaaagaaattcgctcggtaccagctgggcgacctgctgctgcacctggaaaagaagcacggcgaggactggggaaaggtgtacgacgaggcctgggagcggattgacaagaaagtggaaggcctgagcaagcacatcaagctggaagaggaacggagaagcgaggacgcccagagcaaggccgccctgaccgactggctgcgggctaaggccagcttcgtgatcgagggcctgaaggaggccgacaaggacgagttctgcagatgcgagctgaagctgcagaagtggtacggggacctgcggggaaagcccttcgccatcgaagccgagaacagcatcctggacatcagcggcttcagcaagcagtacaactgtgccttcatctggcagaaggacggcgtgaagaagctgaacctgtacctgatcatcaactacttcaagggcggcaagctgcggttcaagaagatcaaacctgaagccttcgaagccaacagattctacaccgtgatcaacaaaaagagcggcgagatcgtgcccatggaggtgaacttcaacttcgacgaccccaacctgatcatcctgcctctggcctttggcaagagacagggcagagaattcatctggaacgacctgctgtccctggaaaccggcagcctgaagctggccaacggaagagtgatcgagaagacactgtacaacagaagaacccggcaggatgagcctgccctgttcgtggccctgaccttcgagcggcgggaggtcctggactcctccaatatcaaaccaatgaacctgatcggcgtggcaagaggcgaaaacatccccgccgtgatcgccctgaccgaccccgagggctgcccactgagccggtttaaggatagcctgggaaacccaacccacatcctgagaatcggcgagagctataaggagaagcagcggaccatccaggccaagaaggaggtggagcagcggagagccggcggctacagccggaagtacgccagcaaagccaagaatctggcagacgatatggtgagaaacaccgctagagatctgctgtactacgccgtgacccaggatgccatgctgatcttcgccaacctgagccggggcttcggccggcagggcaagcggaccttcatggccgagagacagtacacacggatggaggactggctgaccgccaagctggcctacgagggcctgagcaagacctacctgtccaagacactggcccagtacacctccaagacatgcagcaactgtgggtttaccatcaccagcgccgactacgacagggtgctggagaagctgaagaagacagcaacaggctggatgaccacaattaacggcaaggagctgaaggtggagggccagattacctactacaacagatacaagagacagaacgtagtcaaggacctgtccgtcgagctggatagactgagcgaagaatctgtgaacaacgacatctcctcctggacaaagggcagaagcggagaagctctgagcctcctgaagaaaagattctcccatagacccgtgcaggagaagttcgtgtgcctgaactgcggcttcgagacacacgcagccgagcaagccgccctgaacatcgccagatcctggctgttcctgcggagccaggagtacaagaaataccagacaaacaagacaaccggcaacaccgataagagagccttcgtcgagacctggcagtccttttaccggaagaagcttaaggaggtgtggaaacctgccgtgcggtctggcggatctggcggaggctccacaagcagcaaggcccccatcaccttcggcgacctggccatctacttcagccaggaggagtgggagtggctgagccccatccagaaggacctgtacgaggacgtgatgctggagaactacaggaacctggtgagcctgggcctgagcttcaggaggcccaacgtgatcaccctgctggagaagggcaaggccccctggatggtggagcccgccaggaggaggaggggccccgagctgaccgaggccagcaccagccccaagaaaaagagaaaagtctaagctgccttctgcggggcttgccttctggccatgcccttcttctctcccttgcacctgtacctcttggtctttgaataaagcctgagtaggaaggctagcaaaaaaaaaaaaaaaaaaaaaaaaaaaaaaaaaaaaaaaaaaaaaaaaaaaaaaaaaaaaaaaaaaaaaaaaaaaaaaaa

SEQ ID NO: 2770 - RNA, 5419 nt, synthetic construct
  source 1..5419: mol_type = other RNA
aggaaataagagagaaaagaagagtaagaagaaatataagagccaccatggcccctaagaagaagcgtaaagtgagccgggtgaacggcagcggcagcggcggcggcatgaaccacgaccaggagttcgacccccctaaggtgtaccctcccgtccccgccgagaagagaaagcccatccgggtcctgagcctgttcgatggcatcgccaccggtctgctggtgctgaaggacctgggcatccaggtggataggtacattgcctccgaggtgtgcgaggactccatcaccgtgggaatggtgcgtcatcagggcaagatcatgtacgtgggcgacgtgcggagcgtgacacagaagcatatccaggagtggggccctttcgacctggtgatcggcggcagcccttgcaatgacctgagcatcgtgaacccagcccggaagggcctgtacgagggaaccggcagactgttcttcgagttttacagactgctgcacgacgcccggcctaaggaaggcgacgaccggcccttcttttggctgttcgagaatgtggtggccatgggagtcagcgacaagcgggatattagccggttcctggagagcaaccccgtgatgatcgatgccaaggaagtgagcgccgcccaccgggccagatacttctggggcaatctgcctggcatgaacagacccctggccagcaccgtgaacgacaagctggagctgcaggagtgcctggagcacggccggatcgccaagttcagcaaggtgagaaccatcaccacccgaagcaacagcatcaaacaaggcaaggaccagcactttcctgtgttcatgaacgagaaggaggacatcctgtggtgtaccgagatggagagagtgttcgggttcccagtccactacacagatgtcagcaacatgtctagactggccagacagagactgctgggaagaagctggtccgtccctgtgatcagacacctgttcgcccctctgaaggagtacttcgcctgcgtgagcagcggcaacagcaacgccaacagccggggccccagcttctctagcggcctggtgccactgtccctgagagggagccacatgggccccatggagatctacaaaaccgtgagcgcctggaagcggcagcctgtgcgcgtgctgagcctgtttcggaatatcgataaagtcctgaaaagcctgggattcctggagagcggctctggctccggcggtggcaccctgaagtacgtggaggatgtgacaaacgtggtcagacgggatgtggagaagtggggccccttcgatctggtgtacggcagcacccaacccctgggcagctcttgtgaccggtgccctggctggtacatgtttcagttccaccggatcctgcagtacgccctgccgagacaggagtcccagcggccattcttttggattttcatggacaacttgctgctgaccgaggatgaccaggaaactaccactcggttcctgcagaccgaagccgtgaccctgcaggacgtgagaggccgggactaccagaacgccatgcgggtgtggtccaacatccctggactgaaaagcaagcacgcacctctgacccctaaagaagaggagtacctgcaggcccaggtgcggagcagaagcaagctggacgcccctaaggtggatctgctggtgaagaattgcctcctgcccctgagagagtacttcaagtatttcagccagaatagtctgcccctgggcggcccaagcagcggcgcccctcctcccagcggcggcagcccagccggctccccaacctctaccgaggagggcacctctgagtccgccacccccgagagcggccctggcacctccaccgagcccagcgagggcagcgcacccggcagccctgccggcagccccacctccacagaggagggaaccagcaccgagcccagcgaaggcagcgccccaggcaccagcaccgagcctagtgagggcggctctggcggcggcagcgcccaggagattaaacggatcaacaagatcagaagaagacttgtgaaagacagcaacaccaagaaggccggcaagacaggccccatgaaaaccctgctggttagagtgatgacacccgatctgagagagcggctggaaaacctgagaaagaagcctgaaaatatcccccagcccatcagcaatacatctagagccaacctgaataagctgctgaccgattacaccgaaatgaagaaggcgatcctgcatgtgtactgggaagagttccagaaggaccctgtgggcctgatgagccgggtggcccagcctgccagcaagaagatcgatcagaacaagctgaaacctgagatggacgagaagggcaacctgaccaccgccggctttgcctgctctcagtgtggccagcccctgttcgtgtacaagctggagcaggtgtctgagaagggcaaggcttacaccaactacttcggacggtgcaatgtggccgagcacgaaaagctgatcctgctggcccagctgaagcccgagaaggatagcgacgaagccgtgacatatagcctgggaaagtttgggcagagggccctggatttctacagcattcatgtgaccaaggagtccacccaccccgtgaagcccctggcccagatcgccggaaacagatacgcctccggacctgtgggaaaggccctgagcgacgcatgtatgggcacaatcgcctccttcctgtctaagtaccaggacatcatcatcgaacaccagaaggtggtgaagggcaaccagaagagactggagagcctgcgggagctggccggcaaggaaaacctggaataccctagcgtgaccctgccacctcagcctcacaccaaggagggcgttgatgcctacaacgaagtgatcgcccgggtgcgaatgtgggtgaacctgaacctgtggcagaagctgaagctaagcagagatgatgccaagcctctgctgagactgaagggattcccttcctttcctctggtcgagagacaggccaacgaagtggactggtgggacatggtgtgtaacgtgaagaagctgatcaacgagaaaaaggaggatggcaaggtgttttggcagaatctggctggctacaagagacaggaagccctgagaccatacctgagcagcgaggaagatcggaagaagggaaagaaattcgctcggtaccagctgggcgacctgctgctgcacctggaaaagaagcacggcgaggactggggaaaggtgtacgacgaggcctgggagcggattgacaagaaagtggaaggcctgagcaagcacatcaagctggaagaggaacggagaagcgaggacgcccagagcaaggccgccctgaccgactggctgcgggctaaggccagcttcgtgatcgagggcctgaaggaggccgacaaggacgagttctgcagatgcgagctgaagctgcagaagtggtacggggacctgcggggaaagcccttcgccatcgaagccgagaacagcatcctggacatcagcggcttcagcaagcagtacaactgtgccttcatctggcagaaggacggcgtgaagaagctgaacctgtacctgatcatcaactacttcaagggcggcaagctgcggttcaagaagatcaaacctgaagccttcgaagccaacagattctacaccgtgatcaacaaaaagagcggcgagatcgtgcccatggaggtgaacttcaacttcgacgaccccaacctgatcatcctgcctctggcctttggcaagagacagggcagagaattcatctggaacgacctgctgtccctggaaaccggcagcctgaagctggccaacggaagagtgatcgagaagacactgtacaacagaagaacccggcaggatgagcctgccctgttcgtggccctgaccttcgagcggcgggaggtcctggactcctccaatatcaaaccaatgaacctgatcggcgtggcaagaggcgaaaacatccccgccgtgatcgccctgaccgaccccgagggctgcccactgagccggtttaaggatagcctgggaaacccaacccacatcctgagaatcggcgagagctataaggagaagcagcggaccatccaggccaagaaggaggtggagcagcggagagccggcggctacagccggaagtacgccagcaaagccaagaatctggcagacgatatggtgagaaacaccgctagagatctgctgtactacgccgtgacccaggatgccatgctgatcttcgccaacctgagccggggcttcggccggcagggcaagcggaccttcatggccgagagacagtacacacggatggaggactggctgaccgccaagctggcctacgagggcctgagcaagacctacctgtccaagacactggcccagtacacctccaagacatgcagcaactgtgggtttaccatcaccagcgccgactacgacagggtgctggagaagctgaagaagacagcaacaggctggatgaccacaattaacggcaaggagctgaaggtggagggccagattacctactacaacagatacaagagacagaacgtagtcaaggacctgtccgtcgagctggatagactgagcgaagaatctgtgaacaacgacatctcctcctggacaaagggcagaagcggagaagctctgagcctcctgaagaaaagattctcccatagacccgtgcaggagaagttcgtgtgcctgaactgcggcttcgagacacacgcagccgagcaagccgccctgaacatcgccagatcctggctgttcctgcggagccaggagtacaagaaataccagacaaacaagacaaccggcaacaccgataagagagccttcgtcgagacctggcagtccttttaccggaagaagcttaaggaggtgtggaaacctgccgtgcggtctggcggatctggcggaggctccacaagcaggcccggcgccgtgagcttcgccgacgtggccgtgtacttcagccccgaggagtggggctgcctgaggcccgcccagagggccctgtacaggaacgtgatgagggagacctacggccacctgggcgccctgggcttcgccggccccaagcccgccctgatcagctggctggagaggaagaaggaggtgtggagccccgaggccgaggaccccgaggccggcgccaggcaccccggcagcggcaccagccccaagaaaaagagaaaagtctaagctgccttctgcggggcttgccttctggccatgcccttcttctctcccttgcacctgtacctcttggtctttgaataaagcctgagtaggaaggctagcaaaaaaaaaaaaaaaaaaaaaaaaaaaaaaaaaaaaaaaaaaaaaaaaaaaaaaaaaaaaaaaaaaaaaaaaaaaaaaaa

SEQ ID NO: 2771 - RNA, 5419 nt, synthetic construct
  source 1..5419: mol_type = other RNA
aggaaataagagagaaaagaagagtaagaagaaatataagagccaccatggcccctaagaagaagcgtaaagtgagccgggtgaacggcagcggcagcggcggcggcatgaaccacgaccaggagttcgacccccctaaggtgtaccctcccgtccccgccgagaagagaaagcccatccgggtcctgagcctgttcgatggcatcgccaccggtctgctggtgctgaaggacctgggcatccaggtggataggtacattgcctccgaggtgtgcgaggactccatcaccgtgggaatggtgcgtcatcagggcaagatcatgtacgtgggcgacgtgcggagcgtgacacagaagcatatccaggagtggggccctttcgacctggtgatcggcggcagcccttgcaatgacctgagcatcgtgaacccagcccggaagggcctgtacgagggaaccggcagactgttcttcgagttttacagactgctgcacgacgcccggcctaaggaaggcgacgaccggcccttcttttggctgttcgagaatgtggtggccatgggagtcagcgacaagcgggatattagccggttcctggagagcaaccccgtgatgatcgatgccaaggaagtgagcgccgcccaccgggccagatacttctggggcaatctgcctggcatgaacagacccctggccagcaccgtgaacgacaagctggagctgcaggagtgcctggagcacggccggatcgccaagttcagcaaggtgagaaccatcaccacccgaagcaacagcatcaaacaaggcaaggaccagcactttcctgtgttcatgaacgagaaggaggacatcctgtggtgtaccgagatggagagagtgttcgggttcccagtccactacacagatgtcagcaacatgtctagactggccagacagagactgctgggaagaagctggtccgtccctgtgatcagacacctgttcgcccctctgaaggagtacttcgcctgcgtgagcagcggcaacagcaacgccaacagccggggccccagcttctctagcggcctggtgccactgtccctgagagggagccacatgggccccatggagatctacaaaaccgtgagcgcctggaagcggcagcctgtgcgcgtgctgagcctgtttcggaatatcgataaagtcctgaaaagcctgggattcctggagagcggctctggctccggcggtggcaccctgaagtacgtggaggatgtgacaaacgtggtcagacgggatgtggagaagtggggccccttcgatctggtgtacggcagcacccaacccctgggcagctcttgtgaccggtgccctggctggtacatgtttcagttccaccggatcctgcagtacgccctgccgagacaggagtcccagcggccattcttttggattttcatggacaacttgctgctgaccgaggatgaccaggaaactaccactcggttcctgcagaccgaagccgtgaccctgcaggacgtgagaggccgggactaccagaacgccatgcgggtgtggtccaacatccctggactgaaaagcaagcacgcacctctgacccctaaagaagaggagtacctgcaggcccaggtgcggagcagaagcaagctggacgcccctaaggtggatctgctggtgaagaattgcctcctgcccctgagagagtacttcaagtatttcagccagaatagtctgcccctgggcggcccaagcagcggcgcccctcctcccagcggcggcagcccagccggctccccaacctctaccgaggagggcacctctgagtccgccacccccgagagcggccctggcacctccaccgagcccagcgagggcagcgcacccggcagccctgccggcagccccacctccacagaggagggaaccagcaccgagcccagcgaaggcagcgccccaggcaccagcaccgagcctagtgagggcggctctggcggcggcagcgcccaggagattaaacggatcaacaagatcagaagaagacttgtgaaagacagcaacaccaagaaggccggcaagacaggccccatgaaaaccctgctggttagagtgatgacacccgatctgagagagcggctggaaaacctgagaaagaagcctgaaaatatcccccagcccatcagcaatacatctagagccaacctgaataagctgctgaccgattacaccgaaatgaagaaggcgatcctgcatgtgtactgggaagagttccagaaggaccctgtgggcctgatgagccgggtggcccagcctgccagcaagaagatcgatcagaacaagctgaaacctgagatggacgagaagggcaacctgaccaccgccggctttgcctgctctcagtgtggccagcccctgttcgtgtacaagctggagcaggtgtctgagaagggcaaggcttacaccaactacttcggacggtgcaatgtggccgagcacgaaaagctgatcctgctggcccagctgaagcccgagaaggatagcgacgaagccgtgacatatagcctgggaaagtttgggcagagggccctggatttctacagcattcatgtgaccaaggagtccacccaccccgtgaagcccctggcccagatcgccggaaacagatacgcctccggacctgtgggaaaggccctgagcgacgcatgtatgggcacaatcgcctccttcctgtctaagtaccaggacatcatcatcgaacaccagaaggtggtgaagggcaaccagaagagactggagagcctgcgggagctggccggcaaggaaaacctggaataccctagcgtgaccctgccacctcagcctcacaccaaggagggcgttgatgcctacaacgaagtgatcgcccgggtgcgaatgtgggtgaacctgaacctgtggcagaagctgaagctaagcagagatgatgccaagcctctgctgagactgaagggattcccttcctttcctctggtcgagagacaggccaacgaagtggactggtgggacatggtgtgtaacgtgaagaagctgatcaacgagaaaaaggaggatggcaaggtgttttggcagaatctggctggctacaagagacaggaagccctgagaccatacctgagcagcgaggaagatcggaagaagggaaagaaattcgctcggtaccagctgggcgacctgctgctgcacctggaaaagaagcacggcgaggactggggaaaggtgtacgacgaggcctgggagcggattgacaagaaagtggaaggcctgagcaagcacatcaagctggaagaggaacggagaagcgaggacgcccagagcaaggccgccctgaccgactggctgcgggctaaggccagcttcgtgatcgagggcctgaaggaggccgacaaggacgagttctgcagatgcgagctgaagctgcagaagtggtacggggacctgcggggaaagcccttcgccatcgaagccgagaacagcatcctggacatcagcggcttcagcaagcagtacaactgtgccttcatctggcagaaggacggcgtgaagaagctgaacctgtacctgatcatcaactacttcaagggcggcaagctgcggttcaagaagatcaaacctgaagccttcgaagccaacagattctacaccgtgatcaacaaaaagagcggcgagatcgtgcccatggaggtgaacttcaacttcgacgaccccaacctgatcatcctgcctctggcctttggcaagagacagggcagagaattcatctggaacgacctgctgtccctggaaaccggcagcctgaagctggccaacggaagagtgatcgagaagacactgtacaacagaagaacccggcaggatgagcctgccctgttcgtggccctgaccttcgagcggcgggaggtcctggactcctccaatatcaaaccaatgaacctgatcggcgtggcaagaggcgaaaacatccccgccgtgatcgccctgaccgaccccgagggctgcccactgagccggtttaaggatagcctgggaaacccaacccacatcctgagaatcggcgagagctataaggagaagcagcggaccatccaggccaagaaggaggtggagcagcggagagccggcggctacagccggaagtacgccagcaaagccaagaatctggcagacgatatggtgagaaacaccgctagagatctgctgtactacgccgtgacccaggatgccatgctgatcttcgccaacctgagccggggcttcggccggcagggcaagcggaccttcatggccgagagacagtacacacggatggaggactggctgaccgccaagctggcctacgagggcctgagcaagacctacctgtccaagacactggcccagtacacctccaagacatgcagcaactgtgggtttaccatcaccagcgccgactacgacagggtgctggagaagctgaagaagacagcaacaggctggatgaccacaattaacggcaaggagctgaaggtggagggccagattacctactacaacagatacaagagacagaacgtagtcaaggacctgtccgtcgagctggatagactgagcgaagaatctgtgaacaacgacatctcctcctggacaaagggcagaagcggagaagctctgagcctcctgaagaaaagattctcccatagacccgtgcaggagaagttcgtgtgcctgaactgcggcttcgagacacacgcagccgagcaagccgccctgaacatcgccagatcctggctgttcctgcggagccaggagtacaagaaataccagacaaacaagacaaccggcaacaccgataagagagccttcgtcgagacctggcagtccttttaccggaagaagcttaaggaggtgtggaaacctgccgtgcggtctggcggatctggcggaggctccacaagcagcaaggcccccatcaccttcggcgacctggccatctacttcagccaggaggagtgggagtggctgagccccatccagaaggacctgtacgaggacgtgatgctggagaactacaggaacctggtgagcctgggcctgagcttcaggaggcccaacgtgatcaccctgctggagaagggcaaggccccctggatggtggagcccgtgaggaggaggcaggcccccgacagcggcagcaagtgcaccagccccaagaaaaagagaaaagtctaagctgccttctgcggggcttgccttctggccatgcccttcttctctcccttgcacctgtacctcttggtctttgaataaagcctgagtaggaaggctagcaaaaaaaaaaaaaaaaaaaaaaaaaaaaaaaaaaaaaaaaaaaaaaaaaaaaaaaaaaaaaaaaaaaaaaaaaaaaaaaa

SEQ ID NO: 2772 - RNA, 5419 nt, synthetic construct
  source 1..5419: mol_type = other RNA
aggaaataagagagaaaagaagagtaagaagaaatataagagccaccatggcccctaagaagaagcgtaaagtgagccgggtgaacggcagcggcagcggcggcggcatgaaccacgaccaggagttcgacccccctaaggtgtaccctcccgtccccgccgagaagagaaagcccatccgggtcctgagcctgttcgatggcatcgccaccggtctgctggtgctgaaggacctgggcatccaggtggataggtacattgcctccgaggtgtgcgaggactccatcaccgtgggaatggtgcgtcatcagggcaagatcatgtacgtgggcgacgtgcggagcgtgacacagaagcatatccaggagtggggccctttcgacctggtgatcggcggcagcccttgcaatgacctgagcatcgtgaacccagcccggaagggcctgtacgagggaaccggcagactgttcttcgagttttacagactgctgcacgacgcccggcctaaggaaggcgacgaccggcccttcttttggctgttcgagaatgtggtggccatgggagtcagcgacaagcgggatattagccggttcctggagagcaaccccgtgatgatcgatgccaaggaagtgagcgccgcccaccgggccagatacttctggggcaatctgcctggcatgaacagacccctggccagcaccgtgaacgacaagctggagctgcaggagtgcctggagcacggccggatcgccaagttcagcaaggtgagaaccatcaccacccgaagcaacagcatcaaacaaggcaaggaccagcactttcctgtgttcatgaacgagaaggaggacatcctgtggtgtaccgagatggagagagtgttcgggttcccagtccactacacagatgtcagcaacatgtctagactggccagacagagactgctgggaagaagctggtccgtccctgtgatcagacacctgttcgcccctctgaaggagtacttcgcctgcgtgagcagcggcaacagcaacgccaacagccggggccccagcttctctagcggcctggtgccactgtccctgagagggagccacatgggccccatggagatctacaaaaccgtgagcgcctggaagcggcagcctgtgcgcgtgctgagcctgtttcggaatatcgataaagtcctgaaaagcctgggattcctggagagcggctctggctccggcggtggcaccctgaagtacgtggaggatgtgacaaacgtggtcagacgggatgtggagaagtggggccccttcgatctggtgtacggcagcacccaacccctgggcagctcttgtgaccggtgccctggctggtacatgtttcagttccaccggatcctgcagtacgccctgccgagacaggagtcccagcggccattcttttggattttcatggacaacttgctgctgaccgaggatgaccaggaaactaccactcggttcctgcagaccgaagccgtgaccctgcaggacgtgagaggccgggactaccagaacgccatgcgggtgtggtccaacatccctggactgaaaagcaagcacgcacctctgacccctaaagaagaggagtacctgcaggcccaggtgcggagcagaagcaagctggacgcccctaaggtggatctgctggtgaagaattgcctcctgcccctgagagagtacttcaagtatttcagccagaatagtctgcccctgggcggcccaagcagcggcgcccctcctcccagcggcggcagcccagccggctccccaacctctaccgaggagggcacctctgagtccgccacccccgagagcggccctggcacctccaccgagcccagcgagggcagcgcacccggcagccctgccggcagccccacctccacagaggagggaaccagcaccgagcccagcgaaggcagcgccccaggcaccagcaccgagcctagtgagggcggctctggcggcggcagcgcccaggagattaaacggatcaacaagatcagaagaagacttgtgaaagacagcaacaccaagaaggccggcaagacaggccccatgaaaaccctgctggttagagtgatgacacccgatctgagagagcggctggaaaacctgagaaagaagcctgaaaatatcccccagcccatcagcaatacatctagagccaacctgaataagctgctgaccgattacaccgaaatgaagaaggcgatcctgcatgtgtactgggaagagttccagaaggaccctgtgggcctgatgagccgggtggcccagcctgccagcaagaagatcgatcagaacaagctgaaacctgagatggacgagaagggcaacctgaccaccgccggctttgcctgctctcagtgtggccagcccctgttcgtgtacaagctggagcaggtgtctgagaagggcaaggcttacaccaactacttcggacggtgcaatgtggccgagcacgaaaagctgatcctgctggcccagctgaagcccgagaaggatagcgacgaagccgtgacatatagcctgggaaagtttgggcagagggccctggatttctacagcattcatgtgaccaaggagtccacccaccccgtgaagcccctggcccagatcgccggaaacagatacgcctccggacctgtgggaaaggccctgagcgacgcatgtatgggcacaatcgcctccttcctgtctaagtaccaggacatcatcatcgaacaccagaaggtggtgaagggcaaccagaagagactggagagcctgcgggagctggccggcaaggaaaacctggaataccctagcgtgaccctgccacctcagcctcacaccaaggagggcgttgatgcctacaacgaagtgatcgcccgggtgcgaatgtgggtgaacctgaacctgtggcagaagctgaagctaagcagagatgatgccaagcctctgctgagactgaagggattcccttcctttcctctggtcgagagacaggccaacgaagtggactggtgggacatggtgtgtaacgtgaagaagctgatcaacgagaaaaaggaggatggcaaggtgttttggcagaatctggctggctacaagagacaggaagccctgagaccatacctgagcagcgaggaagatcggaagaagggaaagaaattcgctcggtaccagctgggcgacctgctgctgcacctggaaaagaagcacggcgaggactggggaaaggtgtacgacgaggcctgggagcggattgacaagaaagtggaaggcctgagcaagcacatcaagctggaagaggaacggagaagcgaggacgcccagagcaaggccgccctgaccgactggctgcgggctaaggccagcttcgtgatcgagggcctgaaggaggccgacaaggacgagttctgcagatgcgagctgaagctgcagaagtggtacggggacctgcggggaaagcccttcgccatcgaagccgagaacagcatcctggacatcagcggcttcagcaagcagtacaactgtgccttcatctggcagaaggacggcgtgaagaagctgaacctgtacctgatcatcaactacttcaagggcggcaagctgcggttcaagaagatcaaacctgaagccttcgaagccaacagattctacaccgtgatcaacaaaaagagcggcgagatcgtgcccatggaggtgaacttcaacttcgacgaccccaacctgatcatcctgcctctggcctttggcaagagacagggcagagaattcatctggaacgacctgctgtccctggaaaccggcagcctgaagctggccaacggaagagtgatcgagaagacactgtacaacagaagaacccggcaggatgagcctgccctgttcgtggccctgaccttcgagcggcgggaggtcctggactcctccaatatcaaaccaatgaacctgatcggcgtggcaagaggcgaaaacatccccgccgtgatcgccctgaccgaccccgagggctgcccactgagccggtttaaggatagcctgggaaacccaacccacatcctgagaatcggcgagagctataaggagaagcagcggaccatccaggccaagaaggaggtggagcagcggagagccggcggctacagccggaagtacgccagcaaagccaagaatctggcagacgatatggtgagaaacaccgctagagatctgctgtactacgccgtgacccaggatgccatgctgatcttcgccaacctgagccggggcttcggccggcagggcaagcggaccttcatggccgagagacagtacacacggatggaggactggctgaccgccaagctggcctacgagggcctgagcaagacctacctgtccaagacactggcccagtacacctccaagacatgcagcaactgtgggtttaccatcaccagcgccgactacgacagggtgctggagaagctgaagaagacagcaacaggctggatgaccacaattaacggcaaggagctgaaggtggagggccagattacctactacaacagatacaagagacagaacgtagtcaaggacctgtccgtcgagctggatagactgagcgaagaatctgtgaacaacgacatctcctcctggacaaagggcagaagcggagaagctctgagcctcctgaagaaaagattctcccatagacccgtgcaggagaagttcgtgtgcctgaactgcggcttcgagacacacgcagccgagcaagccgccctgaacatcgccagatcctggctgttcctgcggagccaggagtacaagaaataccagacaaacaagacaaccggcaacaccgataagagagccttcgtcgagacctggcagtccttttaccggaagaagcttaaggaggtgtggaaacctgccgtgcggtctggcggatctggcggaggctccacaagcatggtgaccttcgaggacgtggccgtgcacttcaccaagaccgagtggaccggcctgagccccgcccagagggccctgtacaggagcgtgatgctggagaacttcggcaacctgaccgccctgggctaccccgtgcccaagcccgccctgatcagcctgctggagggcggcgacatggcctggggcctggaggcccaggacgacccccccgccgagaggaccaagaacgtgtgcaaggtgatcaccagccccaagaaaaagagaaaagtctaagctgccttctgcggggcttgccttctggccatgcccttcttctctcccttgcacctgtacctcttggtctttgaataaagcctgagtaggaaggctagcaaaaaaaaaaaaaaaaaaaaaaaaaaaaaaaaaaaaaaaaaaaaaaaaaaaaaaaaaaaaaaaaaaaaaaaaaaaaaaaa

SEQ ID NO: 2773 - RNA, 5419 nt, synthetic construct
  source 1..5419: mol_type = other RNA
aggaaataagagagaaaagaagagtaagaagaaatataagagccaccatggcccctaagaagaagcgtaaagtgagccgggtgaacggcagcggcagcggcggcggcatgaaccacgaccaggagttcgacccccctaaggtgtaccctcccgtccccgccgagaagagaaagcccatccgggtcctgagcctgttcgatggcatcgccaccggtctgctggtgctgaaggacctgggcatccaggtggataggtacattgcctccgaggtgtgcgaggactccatcaccgtgggaatggtgcgtcatcagggcaagatcatgtacgtgggcgacgtgcggagcgtgacacagaagcatatccaggagtggggccctttcgacctggtgatcggcggcagcccttgcaatgacctgagcatcgtgaacccagcccggaagggcctgtacgagggaaccggcagactgttcttcgagttttacagactgctgcacgacgcccggcctaaggaaggcgacgaccggcccttcttttggctgttcgagaatgtggtggccatgggagtcagcgacaagcgggatattagccggttcctggagagcaaccccgtgatgatcgatgccaaggaagtgagcgccgcccaccgggccagatacttctggggcaatctgcctggcatgaacagacccctggccagcaccgtgaacgacaagctggagctgcaggagtgcctggagcacggccggatcgccaagttcagcaaggtgagaaccatcaccacccgaagcaacagcatcaaacaaggcaaggaccagcactttcctgtgttcatgaacgagaaggaggacatcctgtggtgtaccgagatggagagagtgttcgggttcccagtccactacacagatgtcagcaacatgtctagactggccagacagagactgctgggaagaagctggtccgtccctgtgatcagacacctgttcgcccctctgaaggagtacttcgcctgcgtgagcagcggcaacagcaacgccaacagccggggccccagcttctctagcggcctggtgccactgtccctgagagggagccacatgggccccatggagatctacaaaaccgtgagcgcctggaagcggcagcctgtgcgcgtgctgagcctgtttcggaatatcgataaagtcctgaaaagcctgggattcctggagagcggctctggctccggcggtggcaccctgaagtacgtggaggatgtgacaaacgtggtcagacgggatgtggagaagtggggccccttcgatctggtgtacggcagcacccaacccctgggcagctcttgtgaccggtgccctggctggtacatgtttcagttccaccggatcctgcagtacgccctgccgagacaggagtcccagcggccattcttttggattttcatggacaacttgctgctgaccgaggatgaccaggaaactaccactcggttcctgcagaccgaagccgtgaccctgcaggacgtgagaggccgggactaccagaacgccatgcgggtgtggtccaacatccctggactgaaaagcaagcacgcacctctgacccctaaagaagaggagtacctgcaggcccaggtgcggagcagaagcaagctggacgcccctaaggtggatctgctggtgaagaattgcctcctgcccctgagagagtacttcaagtatttcagccagaatagtctgcccctgggcggcccaagcagcggcgcccctcctcccagcggcggcagcccagccggctccccaacctctaccgaggagggcacctctgagtccgccacccccgagagcggccctggcacctccaccgagcccagcgagggcagcgcacccggcagccctgccggcagccccacctccacagaggagggaaccagcaccgagcccagcgaaggcagcgccccaggcaccagcaccgagcctagtgagggcggctctggcggcggcagcgcccaggagattaaacggatcaacaagatcagaagaagacttgtgaaagacagcaacaccaagaaggccggcaagacaggccccatgaaaaccctgctggttagagtgatgacacccgatctgagagagcggctggaaaacctgagaaagaagcctgaaaatatcccccagcccatcagcaatacatctagagccaacctgaataagctgctgaccgattacaccgaaatgaagaaggcgatcctgcatgtgtactgggaagagttccagaaggaccctgtgggcctgatgagccgggtggcccagcctgccagcaagaagatcgatcagaacaagctgaaacctgagatggacgagaagggcaacctgaccaccgccggctttgcctgctctcagtgtggccagcccctgttcgtgtacaagctggagcaggtgtctgagaagggcaaggcttacaccaactacttcggacggtgcaatgtggccgagcacgaaaagctgatcctgctggcccagctgaagcccgagaaggatagcgacgaagccgtgacatatagcctgggaaagtttgggcagagggccctggatttctacagcattcatgtgaccaaggagtccacccaccccgtgaagcccctggcccagatcgccggaaacagatacgcctccggacctgtgggaaaggccctgagcgacgcatgtatgggcacaatcgcctccttcctgtctaagtaccaggacatcatcatcgaacaccagaaggtggtgaagggcaaccagaagagactggagagcctgcgggagctggccggcaaggaaaacctggaataccctagcgtgaccctgccacctcagcctcacaccaaggagggcgttgatgcctacaacgaagtgatcgcccgggtgcgaatgtgggtgaacctgaacctgtggcagaagctgaagctaagcagagatgatgccaagcctctgctgagactgaagggattcccttcctttcctctggtcgagagacaggccaacgaagtggactggtgggacatggtgtgtaacgtgaagaagctgatcaacgagaaaaaggaggatggcaaggtgttttggcagaatctggctggctacaagagacaggaagccctgagaccatacctgagcagcgaggaagatcggaagaagggaaagaaattcgctcggtaccagctgggcgacctgctgctgcacctggaaaagaagcacggcgaggactggggaaaggtgtacgacgaggcctgggagcggattgacaagaaagtggaaggcctgagcaagcacatcaagctggaagaggaacggagaagcgaggacgcccagagcaaggccgccctgaccgactggctgcgggctaaggccagcttcgtgatcgagggcctgaaggaggccgacaaggacgagttctgcagatgcgagctgaagctgcagaagtggtacggggacctgcggggaaagcccttcgccatcgaagccgagaacagcatcctggacatcagcggcttcagcaagcagtacaactgtgccttcatctggcagaaggacggcgtgaagaagctgaacctgtacctgatcatcaactacttcaagggcggcaagctgcggttcaagaagatcaaacctgaagccttcgaagccaacagattctacaccgtgatcaacaaaaagagcggcgagatcgtgcccatggaggtgaacttcaacttcgacgaccccaacctgatcatcctgcctctggcctttggcaagagacagggcagagaattcatctggaacgacctgctgtccctggaaaccggcagcctgaagctggccaacggaagagtgatcgagaagacactgtacaacagaagaacccggcaggatgagcctgccctgttcgtggccctgaccttcgagcggcgggaggtcctggactcctccaatatcaaaccaatgaacctgatcggcgtggcaagaggcgaaaacatccccgccgtgatcgccctgaccgaccccgagggctgcccactgagccggtttaaggatagcctgggaaacccaacccacatcctgagaatcggcgagagctataaggagaagcagcggaccatccaggccaagaaggaggtggagcagcggagagccggcggctacagccggaagtacgccagcaaagccaagaatctggcagacgatatggtgagaaacaccgctagagatctgctgtactacgccgtgacccaggatgccatgctgatcttcgccaacctgagccggggcttcggccggcagggcaagcggaccttcatggccgagagacagtacacacggatggaggactggctgaccgccaagctggcctacgagggcctgagcaagacctacctgtccaagacactggcccagtacacctccaagacatgcagcaactgtgggtttaccatcaccagcgccgactacgacagggtgctggagaagctgaagaagacagcaacaggctggatgaccacaattaacggcaaggagctgaaggtggagggccagattacctactacaacagatacaagagacagaacgtagtcaaggacctgtccgtcgagctggatagactgagcgaagaatctgtgaacaacgacatctcctcctggacaaagggcagaagcggagaagctctgagcctcctgaagaaaagattctcccatagacccgtgcaggagaagttcgtgtgcctgaactgcggcttcgagacacacgcagccgagcaagccgccctgaacatcgccagatcctggctgttcctgcggagccaggagtacaagaaataccagacaaacaagacaaccggcaacaccgataagagagccttcgtcgagacctggcagtccttttaccggaagaagcttaaggaggtgtggaaacctgccgtgcggtctggcggatctggcggaggctccacaagcagcaaggcccccgtgaccttcggcgacctggccatctacttcagccaggaggagtgggagtggctgagccccatccagaaggacctgtacgaggacgtgatgctggagaactaccagaacctggtgagcctgggcctgagcttcaggaggcccaacgtgatcaccctgctggagaagggcaaggccccctggatggtggagcccgtgaagaggaggaggggcctggacctgggcagcaagtgcaccagccccaagaaaaagagaaaagtctaagctgccttctgcggggcttgccttctggccatgcccttcttctctcccttgcacctgtacctcttggtctttgaataaagcctgagtaggaaggctagcaaaaaaaaaaaaaaaaaaaaaaaaaaaaaaaaaaaaaaaaaaaaaaaaaaaaaaaaaaaaaaaaaaaaaaaaaaaaaaaa

SEQ ID NO: 2774 - RNA, 5419 nt, synthetic construct
  source 1..5419: mol_type = other RNA
aggaaataagagagaaaagaagagtaagaagaaatataagagccaccatggcccctaagaagaagcgtaaagtgagccgggtgaacggcagcggcagcggcggcggcatgaaccacgaccaggagttcgacccccctaaggtgtaccctcccgtccccgccgagaagagaaagcccatccgggtcctgagcctgttcgatggcatcgccaccggtctgctggtgctgaaggacctgggcatccaggtggataggtacattgcctccgaggtgtgcgaggactccatcaccgtgggaatggtgcgtcatcagggcaagatcatgtacgtgggcgacgtgcggagcgtgacacagaagcatatccaggagtggggccctttcgacctggtgatcggcggcagcccttgcaatgacctgagcatcgtgaacccagcccggaagggcctgtacgagggaaccggcagactgttcttcgagttttacagactgctgcacgacgcccggcctaaggaaggcgacgaccggcccttcttttggctgttcgagaatgtggtggccatgggagtcagcgacaagcgggatattagccggttcctggagagcaaccccgtgatgatcgatgccaaggaagtgagcgccgcccaccgggccagatacttctggggcaatctgcctggcatgaacagacccctggccagcaccgtgaacgacaagctggagctgcaggagtgcctggagcacggccggatcgccaagttcagcaaggtgagaaccatcaccacccgaagcaacagcatcaaacaaggcaaggaccagcactttcctgtgttcatgaacgagaaggaggacatcctgtggtgtaccgagatggagagagtgttcgggttcccagtccactacacagatgtcagcaacatgtctagactggccagacagagactgctgggaagaagctggtccgtccctgtgatcagacacctgttcgcccctctgaaggagtacttcgcctgcgtgagcagcggcaacagcaacgccaacagccggggccccagcttctctagcggcctggtgccactgtccctgagagggagccacatgggccccatggagatctacaaaaccgtgagcgcctggaagcggcagcctgtgcgcgtgctgagcctgtttcggaatatcgataaagtcctgaaaagcctgggattcctggagagcggctctggctccggcggtggcaccctgaagtacgtggaggatgtgacaaacgtggtcagacgggatgtggagaagtggggccccttcgatctggtgtacggcagcacccaacccctgggcagctcttgtgaccggtgccctggctggtacatgtttcagttccaccggatcctgcagtacgccctgccgagacaggagtcccagcggccattcttttggattttcatggacaacttgctgctgaccgaggatgaccaggaaactaccactcggttcctgcagaccgaagccgtgaccctgcaggacgtgagaggccgggactaccagaacgccatgcgggtgtggtccaacatccctggactgaaaagcaagcacgcacctctgacccctaaagaagaggagtacctgcaggcccaggtgcggagcagaagcaagctggacgcccctaaggtggatctgctggtgaagaattgcctcctgcccctgagagagtacttcaagtatttcagccagaatagtctgcccctgggcggcccaagcagcggcgcccctcctcccagcggcggcagcccagccggctccccaacctctaccgaggagggcacctctgagtccgccacccccgagagcggccctggcacctccaccgagcccagcgagggcagcgcacccggcagccctgccggcagccccacctccacagaggagggaaccagcaccgagcccagcgaaggcagcgccccaggcaccagcaccgagcctagtgagggcggctctggcggcggcagcgcccaggagattaaacggatcaacaagatcagaagaagacttgtgaaagacagcaacaccaagaaggccggcaagacaggccccatgaaaaccctgctggttagagtgatgacacccgatctgagagagcggctggaaaacctgagaaagaagcctgaaaatatcccccagcccatcagcaatacatctagagccaacctgaataagctgctgaccgattacaccgaaatgaagaaggcgatcctgcatgtgtactgggaagagttccagaaggaccctgtgggcctgatgagccgggtggcccagcctgccagcaagaagatcgatcagaacaagctgaaacctgagatggacgagaagggcaacctgaccaccgccggctttgcctgctctcagtgtggccagcccctgttcgtgtacaagctggagcaggtgtctgagaagggcaaggcttacaccaactacttcggacggtgcaatgtggccgagcacgaaaagctgatcctgctggcccagctgaagcccgagaaggatagcgacgaagccgtgacatatagcctgggaaagtttgggcagagggccctggatttctacagcattcatgtgaccaaggagtccacccaccccgtgaagcccctggcccagatcgccggaaacagatacgcctccggacctgtgggaaaggccctgagcgacgcatgtatgggcacaatcgcctccttcctgtctaagtaccaggacatcatcatcgaacaccagaaggtggtgaagggcaaccagaagagactggagagcctgcgggagctggccggcaaggaaaacctggaataccctagcgtgaccctgccacctcagcctcacaccaaggagggcgttgatgcctacaacgaagtgatcgcccgggtgcgaatgtgggtgaacctgaacctgtggcagaagctgaagctaagcagagatgatgccaagcctctgctgagactgaagggattcccttcctttcctctggtcgagagacaggccaacgaagtggactggtgggacatggtgtgtaacgtgaagaagctgatcaacgagaaaaaggaggatggcaaggtgttttggcagaatctggctggctacaagagacaggaagccctgagaccatacctgagcagcgaggaagatcggaagaagggaaagaaattcgctcggtaccagctgggcgacctgctgctgcacctggaaaagaagcacggcgaggactggggaaaggtgtacgacgaggcctgggagcggattgacaagaaagtggaaggcctgagcaagcacatcaagctggaagaggaacggagaagcgaggacgcccagagcaaggccgccctgaccgactggctgcgggctaaggccagcttcgtgatcgagggcctgaaggaggccgacaaggacgagttctgcagatgcgagctgaagctgcagaagtggtacggggacctgcggggaaagcccttcgccatcgaagccgagaacagcatcctggacatcagcggcttcagcaagcagtacaactgtgccttcatctggcagaaggacggcgtgaagaagctgaacctgtacctgatcatcaactacttcaagggcggcaagctgcggttcaagaagatcaaacctgaagccttcgaagccaacagattctacaccgtgatcaacaaaaagagcggcgagatcgtgcccatggaggtgaacttcaacttcgacgaccccaacctgatcatcctgcctctggcctttggcaagagacagggcagagaattcatctggaacgacctgctgtccctggaaaccggcagcctgaagctggccaacggaagagtgatcgagaagacactgtacaacagaagaacccggcaggatgagcctgccctgttcgtggccctgaccttcgagcggcgggaggtcctggactcctccaatatcaaaccaatgaacctgatcggcgtggcaagaggcgaaaacatccccgccgtgatcgccctgaccgaccccgagggctgcccactgagccggtttaaggatagcctgggaaacccaacccacatcctgagaatcggcgagagctataaggagaagcagcggaccatccaggccaagaaggaggtggagcagcggagagccggcggctacagccggaagtacgccagcaaagccaagaatctggcagacgatatggtgagaaacaccgctagagatctgctgtactacgccgtgacccaggatgccatgctgatcttcgccaacctgagccggggcttcggccggcagggcaagcggaccttcatggccgagagacagtacacacggatggaggactggctgaccgccaagctggcctacgagggcctgagcaagacctacctgtccaagacactggcccagtacacctccaagacatgcagcaactgtgggtttaccatcaccagcgccgactacgacagggtgctggagaagctgaagaagacagcaacaggctggatgaccacaattaacggcaaggagctgaaggtggagggccagattacctactacaacagatacaagagacagaacgtagtcaaggacctgtccgtcgagctggatagactgagcgaagaatctgtgaacaacgacatctcctcctggacaaagggcagaagcggagaagctctgagcctcctgaagaaaagattctcccatagacccgtgcaggagaagttcgtgtgcctgaactgcggcttcgagacacacgcagccgagcaagccgccctgaacatcgccagatcctggctgttcctgcggagccaggagtacaagaaataccagacaaacaagacaaccggcaacaccgataagagagccttcgtcgagacctggcagtccttttaccggaagaagcttaaggaggtgtggaaacctgccgtgcggtctggcggatctggcggaggctccacaagcagcaaggcccccgtgaccttcggcgacctggccatctacttcagccaggaggagtgggagtggctgagccccatccagaaggacctgtacgaggacgtgatgctggagaactaccagaacctggtgagcctgggcctgagcttcaggaggcccaacgtgatcgccctgctggagaagggcaaggccccctggatggtggagcccgtgaagaggaggaggggcctggacagcggcagcaagtgcaccagccccaagaaaaagagaaaagtctaagctgccttctgcggggcttgccttctggccatgcccttcttctctcccttgcacctgtacctcttggtctttgaataaagcctgagtaggaaggctagcaaaaaaaaaaaaaaaaaaaaaaaaaaaaaaaaaaaaaaaaaaaaaaaaaaaaaaaaaaaaaaaaaaaaaaaaaaaaaaaa

SEQ ID NO: 2775 - RNA, 5419 nt, synthetic construct
  source 1..5419: mol_type = other RNA
aggaaataagagagaaaagaagagtaagaagaaatataagagccaccatggcccctaagaagaagcgtaaagtgagccgggtgaacggcagcggcagcggcggcggcatgaaccacgaccaggagttcgacccccctaaggtgtaccctcccgtccccgccgagaagagaaagcccatccgggtcctgagcctgttcgatggcatcgccaccggtctgctggtgctgaaggacctgggcatccaggtggataggtacattgcctccgaggtgtgcgaggactccatcaccgtgggaatggtgcgtcatcagggcaagatcatgtacgtgggcgacgtgcggagcgtgacacagaagcatatccaggagtggggccctttcgacctggtgatcggcggcagcccttgcaatgacctgagcatcgtgaacccagcccggaagggcctgtacgagggaaccggcagactgttcttcgagttttacagactgctgcacgacgcccggcctaaggaaggcgacgaccggcccttcttttggctgttcgagaatgtggtggccatgggagtcagcgacaagcgggatattagccggttcctggagagcaaccccgtgatgatcgatgccaaggaagtgagcgccgcccaccgggccagatacttctggggcaatctgcctggcatgaacagacccctggccagcaccgtgaacgacaagctggagctgcaggagtgcctggagcacggccggatcgccaagttcagcaaggtgagaaccatcaccacccgaagcaacagcatcaaacaaggcaaggaccagcactttcctgtgttcatgaacgagaaggaggacatcctgtggtgtaccgagatggagagagtgttcgggttcccagtccactacacagatgtcagcaacatgtctagactggccagacagagactgctgggaagaagctggtccgtccctgtgatcagacacctgttcgcccctctgaaggagtacttcgcctgcgtgagcagcggcaacagcaacgccaacagccggggccccagcttctctagcggcctggtgccactgtccctgagagggagccacatgggccccatggagatctacaaaaccgtgagcgcctggaagcggcagcctgtgcgcgtgctgagcctgtttcggaatatcgataaagtcctgaaaagcctgggattcctggagagcggctctggctccggcggtggcaccctgaagtacgtggaggatgtgacaaacgtggtcagacgggatgtggagaagtggggccccttcgatctggtgtacggcagcacccaacccctgggcagctcttgtgaccggtgccctggctggtacatgtttcagttccaccggatcctgcagtacgccctgccgagacaggagtcccagcggccattcttttggattttcatggacaacttgctgctgaccgaggatgaccaggaaactaccactcggttcctgcagaccgaagccgtgaccctgcaggacgtgagaggccgggactaccagaacgccatgcgggtgtggtccaacatccctggactgaaaagcaagcacgcacctctgacccctaaagaagaggagtacctgcaggcccaggtgcggagcagaagcaagctggacgcccctaaggtggatctgctggtgaagaattgcctcctgcccctgagagagtacttcaagtatttcagccagaatagtctgcccctgggcggcccaagcagcggcgcccctcctcccagcggcggcagcccagccggctccccaacctctaccgaggagggcacctctgagtccgccacccccgagagcggccctggcacctccaccgagcccagcgagggcagcgcacccggcagccctgccggcagccccacctccacagaggagggaaccagcaccgagcccagcgaaggcagcgccccaggcaccagcaccgagcctagtgagggcggctctggcggcggcagcgcccaggagattaaacggatcaacaagatcagaagaagacttgtgaaagacagcaacaccaagaaggccggcaagacaggccccatgaaaaccctgctggttagagtgatgacacccgatctgagagagcggctggaaaacctgagaaagaagcctgaaaatatcccccagcccatcagcaatacatctagagccaacctgaataagctgctgaccgattacaccgaaatgaagaaggcgatcctgcatgtgtactgggaagagttccagaaggaccctgtgggcctgatgagccgggtggcccagcctgccagcaagaagatcgatcagaacaagctgaaacctgagatggacgagaagggcaacctgaccaccgccggctttgcctgctctcagtgtggccagcccctgttcgtgtacaagctggagcaggtgtctgagaagggcaaggcttacaccaactacttcggacggtgcaatgtggccgagcacgaaaagctgatcctgctggcccagctgaagcccgagaaggatagcgacgaagccgtgacatatagcctgggaaagtttgggcagagggccctggatttctacagcattcatgtgaccaaggagtccacccaccccgtgaagcccctggcccagatcgccggaaacagatacgcctccggacctgtgggaaaggccctgagcgacgcatgtatgggcacaatcgcctccttcctgtctaagtaccaggacatcatcatcgaacaccagaaggtggtgaagggcaaccagaagagactggagagcctgcgggagctggccggcaaggaaaacctggaataccctagcgtgaccctgccacctcagcctcacaccaaggagggcgttgatgcctacaacgaagtgatcgcccgggtgcgaatgtgggtgaacctgaacctgtggcagaagctgaagctaagcagagatgatgccaagcctctgctgagactgaagggattcccttcctttcctctggtcgagagacaggccaacgaagtggactggtgggacatggtgtgtaacgtgaagaagctgatcaacgagaaaaaggaggatggcaaggtgttttggcagaatctggctggctacaagagacaggaagccctgagaccatacctgagcagcgaggaagatcggaagaagggaaagaaattcgctcggtaccagctgggcgacctgctgctgcacctggaaaagaagcacggcgaggactggggaaaggtgtacgacgaggcctgggagcggattgacaagaaagtggaaggcctgagcaagcacatcaagctggaagaggaacggagaagcgaggacgcccagagcaaggccgccctgaccgactggctgcgggctaaggccagcttcgtgatcgagggcctgaaggaggccgacaaggacgagttctgcagatgcgagctgaagctgcagaagtggtacggggacctgcggggaaagcccttcgccatcgaagccgagaacagcatcctggacatcagcggcttcagcaagcagtacaactgtgccttcatctggcagaaggacggcgtgaagaagctgaacctgtacctgatcatcaactacttcaagggcggcaagctgcggttcaagaagatcaaacctgaagccttcgaagccaacagattctacaccgtgatcaacaaaaagagcggcgagatcgtgcccatggaggtgaacttcaacttcgacgaccccaacctgatcatcctgcctctggcctttggcaagagacagggcagagaattcatctggaacgacctgctgtccctggaaaccggcagcctgaagctggccaacggaagagtgatcgagaagacactgtacaacagaagaacccggcaggatgagcctgccctgttcgtggccctgaccttcgagcggcgggaggtcctggactcctccaatatcaaaccaatgaacctgatcggcgtggcaagaggcgaaaacatccccgccgtgatcgccctgaccgaccccgagggctgcccactgagccggtttaaggatagcctgggaaacccaacccacatcctgagaatcggcgagagctataaggagaagcagcggaccatccaggccaagaaggaggtggagcagcggagagccggcggctacagccggaagtacgccagcaaagccaagaatctggcagacgatatggtgagaaacaccgctagagatctgctgtactacgccgtgacccaggatgccatgctgatcttcgccaacctgagccggggcttcggccggcagggcaagcggaccttcatggccgagagacagtacacacggatggaggactggctgaccgccaagctggcctacgagggcctgagcaagacctacctgtccaagacactggcccagtacacctccaagacatgcagcaactgtgggtttaccatcaccagcgccgactacgacagggtgctggagaagctgaagaagacagcaacaggctggatgaccacaattaacggcaaggagctgaaggtggagggccagattacctactacaacagatacaagagacagaacgtagtcaaggacctgtccgtcgagctggatagactgagcgaagaatctgtgaacaacgacatctcctcctggacaaagggcagaagcggagaagctctgagcctcctgaagaaaagattctcccatagacccgtgcaggagaagttcgtgtgcctgaactgcggcttcgagacacacgcagccgagcaagccgccctgaacatcgccagatcctggctgttcctgcggagccaggagtacaagaaataccagacaaacaagacaaccggcaacaccgataagagagccttcgtcgagacctggcagtccttttaccggaagaagcttaaggaggtgtggaaacctgccgtgcggtctggcggatctggcggaggctccacaagcaggcccagggccctgaagttcgccgacgtggccgtgtacttcagcctggaggagtggggctgcctgaggcccgcccagaggaccctgtacaggaacgtgatgagggagacctacggccacctgggcgccctgggctgcgccggccccaagcccgccctgatcagctggctggagaggaacaccgacgactgggagcccgccgccctggacccccaggagtaccccaggggcgtgaccgtgcagaccagccccaagaaaaagagaaaagtctaagctgccttctgcggggcttgccttctggccatgcccttcttctctcccttgcacctgtacctcttggtctttgaataaagcctgagtaggaaggctagcaaaaaaaaaaaaaaaaaaaaaaaaaaaaaaaaaaaaaaaaaaaaaaaaaaaaaaaaaaaaaaaaaaaaaaaaaaaaaaaa

SEQ ID NO: 2776 - RNA, 5428 nt, synthetic construct
  source 1..5428: mol_type = other RNA
aggaaataagagagaaaagaagagtaagaagaaatataagagccaccatggcccctaagaagaagcgtaaagtgagccgggtgaacggcagcggcagcggcggcggcatgaaccacgaccaggagttcgacccccctaaggtgtaccctcccgtccccgccgagaagagaaagcccatccgggtcctgagcctgttcgatggcatcgccaccggtctgctggtgctgaaggacctgggcatccaggtggataggtacattgcctccgaggtgtgcgaggactccatcaccgtgggaatggtgcgtcatcagggcaagatcatgtacgtgggcgacgtgcggagcgtgacacagaagcatatccaggagtggggccctttcgacctggtgatcggcggcagcccttgcaatgacctgagcatcgtgaacccagcccggaagggcctgtacgagggaaccggcagactgttcttcgagttttacagactgctgcacgacgcccggcctaaggaaggcgacgaccggcccttcttttggctgttcgagaatgtggtggccatgggagtcagcgacaagcgggatattagccggttcctggagagcaaccccgtgatgatcgatgccaaggaagtgagcgccgcccaccgggccagatacttctggggcaatctgcctggcatgaacagacccctggccagcaccgtgaacgacaagctggagctgcaggagtgcctggagcacggccggatcgccaagttcagcaaggtgagaaccatcaccacccgaagcaacagcatcaaacaaggcaaggaccagcactttcctgtgttcatgaacgagaaggaggacatcctgtggtgtaccgagatggagagagtgttcgggttcccagtccactacacagatgtcagcaacatgtctagactggccagacagagactgctgggaagaagctggtccgtccctgtgatcagacacctgttcgcccctctgaaggagtacttcgcctgcgtgagcagcggcaacagcaacgccaacagccggggccccagcttctctagcggcctggtgccactgtccctgagagggagccacatgggccccatggagatctacaaaaccgtgagcgcctggaagcggcagcctgtgcgcgtgctgagcctgtttcggaatatcgataaagtcctgaaaagcctgggattcctggagagcggctctggctccggcggtggcaccctgaagtacgtggaggatgtgacaaacgtggtcagacgggatgtggagaagtggggccccttcgatctggtgtacggcagcacccaacccctgggcagctcttgtgaccggtgccctggctggtacatgtttcagttccaccggatcctgcagtacgccctgccgagacaggagtcccagcggccattcttttggattttcatggacaacttgctgctgaccgaggatgaccaggaaactaccactcggttcctgcagaccgaagccgtgaccctgcaggacgtgagaggccgggactaccagaacgccatgcgggtgtggtccaacatccctggactgaaaagcaagcacgcacctctgacccctaaagaagaggagtacctgcaggcccaggtgcggagcagaagcaagctggacgcccctaaggtggatctgctggtgaagaattgcctcctgcccctgagagagtacttcaagtatttcagccagaatagtctgcccctgggcggcccaagcagcggcgcccctcctcccagcggcggcagcccagccggctccccaacctctaccgaggagggcacctctgagtccgccacccccgagagcggccctggcacctccaccgagcccagcgagggcagcgcacccggcagccctgccggcagccccacctccacagaggagggaaccagcaccgagcccagcgaaggcagcgccccaggcaccagcaccgagcctagtgagggcggctctggcggcggcagcgcccaggagattaaacggatcaacaagatcagaagaagacttgtgaaagacagcaacaccaagaaggccggcaagacaggccccatgaaaaccctgctggttagagtgatgacacccgatctgagagagcggctggaaaacctgagaaagaagcctgaaaatatcccccagcccatcagcaatacatctagagccaacctgaataagctgctgaccgattacaccgaaatgaagaaggcgatcctgcatgtgtactgggaagagttccagaaggaccctgtgggcctgatgagccgggtggcccagcctgccagcaagaagatcgatcagaacaagctgaaacctgagatggacgagaagggcaacctgaccaccgccggctttgcctgctctcagtgtggccagcccctgttcgtgtacaagctggagcaggtgtctgagaagggcaaggcttacaccaactacttcggacggtgcaatgtggccgagcacgaaaagctgatcctgctggcccagctgaagcccgagaaggatagcgacgaagccgtgacatatagcctgggaaagtttgggcagagggccctggatttctacagcattcatgtgaccaaggagtccacccaccccgtgaagcccctggcccagatcgccggaaacagatacgcctccggacctgtgggaaaggccctgagcgacgcatgtatgggcacaatcgcctccttcctgtctaagtaccaggacatcatcatcgaacaccagaaggtggtgaagggcaaccagaagagactggagagcctgcgggagctggccggcaaggaaaacctggaataccctagcgtgaccctgccacctcagcctcacaccaaggagggcgttgatgcctacaacgaagtgatcgcccgggtgcgaatgtgggtgaacctgaacctgtggcagaagctgaagctaagcagagatgatgccaagcctctgctgagactgaagggattcccttcctttcctctggtcgagagacaggccaacgaagtggactggtgggacatggtgtgtaacgtgaagaagctgatcaacgagaaaaaggaggatggcaaggtgttttggcagaatctggctggctacaagagacaggaagccctgagaccatacctgagcagcgaggaagatcggaagaagggaaagaaattcgctcggtaccagctgggcgacctgctgctgcacctggaaaagaagcacggcgaggactggggaaaggtgtacgacgaggcctgggagcggattgacaagaaagtggaaggcctgagcaagcacatcaagctggaagaggaacggagaagcgaggacgcccagagcaaggccgccctgaccgactggctgcgggctaaggccagcttcgtgatcgagggcctgaaggaggccgacaaggacgagttctgcagatgcgagctgaagctgcagaagtggtacggggacctgcggggaaagcccttcgccatcgaagccgagaacagcatcctggacatcagcggcttcagcaagcagtacaactgtgccttcatctggcagaaggacggcgtgaagaagctgaacctgtacctgatcatcaactacttcaagggcggcaagctgcggttcaagaagatcaaacctgaagccttcgaagccaacagattctacaccgtgatcaacaaaaagagcggcgagatcgtgcccatggaggtgaacttcaacttcgacgaccccaacctgatcatcctgcctctggcctttggcaagagacagggcagagaattcatctggaacgacctgctgtccctggaaaccggcagcctgaagctggccaacggaagagtgatcgagaagacactgtacaacagaagaacccggcaggatgagcctgccctgttcgtggccctgaccttcgagcggcgggaggtcctggactcctccaatatcaaaccaatgaacctgatcggcgtggcaagaggcgaaaacatccccgccgtgatcgccctgaccgaccccgagggctgcccactgagccggtttaaggatagcctgggaaacccaacccacatcctgagaatcggcgagagctataaggagaagcagcggaccatccaggccaagaaggaggtggagcagcggagagccggcggctacagccggaagtacgccagcaaagccaagaatctggcagacgatatggtgagaaacaccgctagagatctgctgtactacgccgtgacccaggatgccatgctgatcttcgccaacctgagccggggcttcggccggcagggcaagcggaccttcatggccgagagacagtacacacggatggaggactggctgaccgccaagctggcctacgagggcctgagcaagacctacctgtccaagacactggcccagtacacctccaagacatgcagcaactgtgggtttaccatcaccagcgccgactacgacagggtgctggagaagctgaagaagacagcaacaggctggatgaccacaattaacggcaaggagctgaaggtggagggccagattacctactacaacagatacaagagacagaacgtagtcaaggacctgtccgtcgagctggatagactgagcgaagaatctgtgaacaacgacatctcctcctggacaaagggcagaagcggagaagctctgagcctcctgaagaaaagattctcccatagacccgtgcaggagaagttcgtgtgcctgaactgcggcttcgagacacacgcagccgagcaagccgccctgaacatcgccagatcctggctgttcctgcggagccaggagtacaagaaataccagacaaacaagacaaccggcaacaccgataagagagccttcgtcgagacctggcagtccttttaccggaagaagcttaaggaggtgtggaaacctgccgtgcggtctggcggatctggcggaggctccacaagcctgacctacgacgacgtgcagatcaacttcaccagcgaggagtggagcctgctggacaccagccagaagaacctgtacaaggacgtgatgctggagacctacaagaacctgaccgacatcggctacacctgggaggactgcagcatcgaggagcactgcgccagcagcaagaggaaggagaggcccaagaggagccagaccggcgagaagcccagcgcctacacccagtgcgccaaggacttcgcctacagcaccagccccaagaaaaagagaaaagtctaagctgccttctgcggggcttgccttctggccatgcccttcttctctcccttgcacctgtacctcttggtctttgaataaagcctgagtaggaaggctagcaaaaaaaaaaaaaaaaaaaaaaaaaaaaaaaaaaaaaaaaaaaaaaaaaaaaaaaaaaaaaaaaaaaaaaaaaaaaaaaa

SEQ ID NO: 2777 - RNA, 5419 nt, synthetic construct
  source 1..5419: mol_type = other RNA
aggaaataagagagaaaagaagagtaagaagaaatataagagccaccatggcccctaagaagaagcgtaaagtgagccgggtgaacggcagcggcagcggcggcggcatgaaccacgaccaggagttcgacccccctaaggtgtaccctcccgtccccgccgagaagagaaagcccatccgggtcctgagcctgttcgatggcatcgccaccggtctgctggtgctgaaggacctgggcatccaggtggataggtacattgcctccgaggtgtgcgaggactccatcaccgtgggaatggtgcgtcatcagggcaagatcatgtacgtgggcgacgtgcggagcgtgacacagaagcatatccaggagtggggccctttcgacctggtgatcggcggcagcccttgcaatgacctgagcatcgtgaacccagcccggaagggcctgtacgagggaaccggcagactgttcttcgagttttacagactgctgcacgacgcccggcctaaggaaggcgacgaccggcccttcttttggctgttcgagaatgtggtggccatgggagtcagcgacaagcgggatattagccggttcctggagagcaaccccgtgatgatcgatgccaaggaagtgagcgccgcccaccgggccagatacttctggggcaatctgcctggcatgaacagacccctggccagcaccgtgaacgacaagctggagctgcaggagtgcctggagcacggccggatcgccaagttcagcaaggtgagaaccatcaccacccgaagcaacagcatcaaacaaggcaaggaccagcactttcctgtgttcatgaacgagaaggaggacatcctgtggtgtaccgagatggagagagtgttcgggttcccagtccactacacagatgtcagcaacatgtctagactggccagacagagactgctgggaagaagctggtccgtccctgtgatcagacacctgttcgcccctctgaaggagtacttcgcctgcgtgagcagcggcaacagcaacgccaacagccggggccccagcttctctagcggcctggtgccactgtccctgagagggagccacatgggccccatggagatctacaaaaccgtgagcgcctggaagcggcagcctgtgcgcgtgctgagcctgtttcggaatatcgataaagtcctgaaaagcctgggattcctggagagcggctctggctccggcggtggcaccctgaagtacgtggaggatgtgacaaacgtggtcagacgggatgtggagaagtggggccccttcgatctggtgtacggcagcacccaacccctgggcagctcttgtgaccggtgccctggctggtacatgtttcagttccaccggatcctgcagtacgccctgccgagacaggagtcccagcggccattcttttggattttcatggacaacttgctgctgaccgaggatgaccaggaaactaccactcggttcctgcagaccgaagccgtgaccctgcaggacgtgagaggccgggactaccagaacgccatgcgggtgtggtccaacatccctggactgaaaagcaagcacgcacctctgacccctaaagaagaggagtacctgcaggcccaggtgcggagcagaagcaagctggacgcccctaaggtggatctgctggtgaagaattgcctcctgcccctgagagagtacttcaagtatttcagccagaatagtctgcccctgggcggcccaagcagcggcgcccctcctcccagcggcggcagcccagccggctccccaacctctaccgaggagggcacctctgagtccgccacccccgagagcggccctggcacctccaccgagcccagcgagggcagcgcacccggcagccctgccggcagccccacctccacagaggagggaaccagcaccgagcccagcgaaggcagcgccccaggcaccagcaccgagcctagtgagggcggctctggcggcggcagcgcccaggagattaaacggatcaacaagatcagaagaagacttgtgaaagacagcaacaccaagaaggccggcaagacaggccccatgaaaaccctgctggttagagtgatgacacccgatctgagagagcggctggaaaacctgagaaagaagcctgaaaatatcccccagcccatcagcaatacatctagagccaacctgaataagctgctgaccgattacaccgaaatgaagaaggcgatcctgcatgtgtactgggaagagttccagaaggaccctgtgggcctgatgagccgggtggcccagcctgccagcaagaagatcgatcagaacaagctgaaacctgagatggacgagaagggcaacctgaccaccgccggctttgcctgctctcagtgtggccagcccctgttcgtgtacaagctggagcaggtgtctgagaagggcaaggcttacaccaactacttcggacggtgcaatgtggccgagcacgaaaagctgatcctgctggcccagctgaagcccgagaaggatagcgacgaagccgtgacatatagcctgggaaagtttgggcagagggccctggatttctacagcattcatgtgaccaaggagtccacccaccccgtgaagcccctggcccagatcgccggaaacagatacgcctccggacctgtgggaaaggccctgagcgacgcatgtatgggcacaatcgcctccttcctgtctaagtaccaggacatcatcatcgaacaccagaaggtggtgaagggcaaccagaagagactggagagcctgcgggagctggccggcaaggaaaacctggaataccctagcgtgaccctgccacctcagcctcacaccaaggagggcgttgatgcctacaacgaagtgatcgcccgggtgcgaatgtgggtgaacctgaacctgtggcagaagctgaagctaagcagagatgatgccaagcctctgctgagactgaagggattcccttcctttcctctggtcgagagacaggccaacgaagtggactggtgggacatggtgtgtaacgtgaagaagctgatcaacgagaaaaaggaggatggcaaggtgttttggcagaatctggctggctacaagagacaggaagccctgagaccatacctgagcagcgaggaagatcggaagaagggaaagaaattcgctcggtaccagctgggcgacctgctgctgcacctggaaaagaagcacggcgaggactggggaaaggtgtacgacgaggcctgggagcggattgacaagaaagtggaaggcctgagcaagcacatcaagctggaagaggaacggagaagcgaggacgcccagagcaaggccgccctgaccgactggctgcgggctaaggccagcttcgtgatcgagggcctgaaggaggccgacaaggacgagttctgcagatgcgagctgaagctgcagaagtggtacggggacctgcggggaaagcccttcgccatcgaagccgagaacagcatcctggacatcagcggcttcagcaagcagtacaactgtgccttcatctggcagaaggacggcgtgaagaagctgaacctgtacctgatcatcaactacttcaagggcggcaagctgcggttcaagaagatcaaacctgaagccttcgaagccaacagattctacaccgtgatcaacaaaaagagcggcgagatcgtgcccatggaggtgaacttcaacttcgacgaccccaacctgatcatcctgcctctggcctttggcaagagacagggcagagaattcatctggaacgacctgctgtccctggaaaccggcagcctgaagctggccaacggaagagtgatcgagaagacactgtacaacagaagaacccggcaggatgagcctgccctgttcgtggccctgaccttcgagcggcgggaggtcctggactcctccaatatcaaaccaatgaacctgatcggcgtggcaagaggcgaaaacatccccgccgtgatcgccctgaccgaccccgagggctgcccactgagccggtttaaggatagcctgggaaacccaacccacatcctgagaatcggcgagagctataaggagaagcagcggaccatccaggccaagaaggaggtggagcagcggagagccggcggctacagccggaagtacgccagcaaagccaagaatctggcagacgatatggtgagaaacaccgctagagatctgctgtactacgccgtgacccaggatgccatgctgatcttcgccaacctgagccggggcttcggccggcagggcaagcggaccttcatggccgagagacagtacacacggatggaggactggctgaccgccaagctggcctacgagggcctgagcaagacctacctgtccaagacactggcccagtacacctccaagacatgcagcaactgtgggtttaccatcaccagcgccgactacgacagggtgctggagaagctgaagaagacagcaacaggctggatgaccacaattaacggcaaggagctgaaggtggagggccagattacctactacaacagatacaagagacagaacgtagtcaaggacctgtccgtcgagctggatagactgagcgaagaatctgtgaacaacgacatctcctcctggacaaagggcagaagcggagaagctctgagcctcctgaagaaaagattctcccatagacccgtgcaggagaagttcgtgtgcctgaactgcggcttcgagacacacgcagccgagcaagccgccctgaacatcgccagatcctggctgttcctgcggagccaggagtacaagaaataccagacaaacaagacaaccggcaacaccgataagagagccttcgtcgagacctggcagtccttttaccggaagaagcttaaggaggtgtggaaacctgccgtgcggtctggcggatctggcggaggctccacaagcaggcaggccttcctggccttcggcgacgtgaccgtggacttcacccagaaggagtggaggctgctgagccccgcccagagggccctgtacagggaggtgaccctggagaactacagccacctggtgagcctgggcatcctgcacagcaagcccgagctgatcaggaggctggagcagggcgaggccccctggggcgaggagaggaggaggaggcccggcccctgcgccggcatctacgccgagaccagccccaagaaaaagagaaaagtctaagctgccttctgcggggcttgccttctggccatgcccttcttctctcccttgcacctgtacctcttggtctttgaataaagcctgagtaggaaggctagcaaaaaaaaaaaaaaaaaaaaaaaaaaaaaaaaaaaaaaaaaaaaaaaaaaaaaaaaaaaaaaaaaaaaaaaaaaaaaaaa

SEQ ID NO: 2778 - RNA, 5419 nt, synthetic construct
  source 1..5419: mol_type = other RNA
aggaaataagagagaaaagaagagtaagaagaaatataagagccaccatggcccctaagaagaagcgtaaagtgagccgggtgaacggcagcggcagcggcggcggcatgaaccacgaccaggagttcgacccccctaaggtgtaccctcccgtccccgccgagaagagaaagcccatccgggtcctgagcctgttcgatggcatcgccaccggtctgctggtgctgaaggacctgggcatccaggtggataggtacattgcctccgaggtgtgcgaggactccatcaccgtgggaatggtgcgtcatcagggcaagatcatgtacgtgggcgacgtgcggagcgtgacacagaagcatatccaggagtggggccctttcgacctggtgatcggcggcagcccttgcaatgacctgagcatcgtgaacccagcccggaagggcctgtacgagggaaccggcagactgttcttcgagttttacagactgctgcacgacgcccggcctaaggaaggcgacgaccggcccttcttttggctgttcgagaatgtggtggccatgggagtcagcgacaagcgggatattagccggttcctggagagcaaccccgtgatgatcgatgccaaggaagtgagcgccgcccaccgggccagatacttctggggcaatctgcctggcatgaacagacccctggccagcaccgtgaacgacaagctggagctgcaggagtgcctggagcacggccggatcgccaagttcagcaaggtgagaaccatcaccacccgaagcaacagcatcaaacaaggcaaggaccagcactttcctgtgttcatgaacgagaaggaggacatcctgtggtgtaccgagatggagagagtgttcgggttcccagtccactacacagatgtcagcaacatgtctagactggccagacagagactgctgggaagaagctggtccgtccctgtgatcagacacctgttcgcccctctgaaggagtacttcgcctgcgtgagcagcggcaacagcaacgccaacagccggggccccagcttctctagcggcctggtgccactgtccctgagagggagccacatgggccccatggagatctacaaaaccgtgagcgcctggaagcggcagcctgtgcgcgtgctgagcctgtttcggaatatcgataaagtcctgaaaagcctgggattcctggagagcggctctggctccggcggtggcaccctgaagtacgtggaggatgtgacaaacgtggtcagacgggatgtggagaagtggggccccttcgatctggtgtacggcagcacccaacccctgggcagctcttgtgaccggtgccctggctggtacatgtttcagttccaccggatcctgcagtacgccctgccgagacaggagtcccagcggccattcttttggattttcatggacaacttgctgctgaccgaggatgaccaggaaactaccactcggttcctgcagaccgaagccgtgaccctgcaggacgtgagaggccgggactaccagaacgccatgcgggtgtggtccaacatccctggactgaaaagcaagcacgcacctctgacccctaaagaagaggagtacctgcaggcccaggtgcggagcagaagcaagctggacgcccctaaggtggatctgctggtgaagaattgcctcctgcccctgagagagtacttcaagtatttcagccagaatagtctgcccctgggcggcccaagcagcggcgcccctcctcccagcggcggcagcccagccggctccccaacctctaccgaggagggcacctctgagtccgccacccccgagagcggccctggcacctccaccgagcccagcgagggcagcgcacccggcagccctgccggcagccccacctccacagaggagggaaccagcaccgagcccagcgaaggcagcgccccaggcaccagcaccgagcctagtgagggcggctctggcggcggcagcgcccaggagattaaacggatcaacaagatcagaagaagacttgtgaaagacagcaacaccaagaaggccggcaagacaggccccatgaaaaccctgctggttagagtgatgacacccgatctgagagagcggctggaaaacctgagaaagaagcctgaaaatatcccccagcccatcagcaatacatctagagccaacctgaataagctgctgaccgattacaccgaaatgaagaaggcgatcctgcatgtgtactgggaagagttccagaaggaccctgtgggcctgatgagccgggtggcccagcctgccagcaagaagatcgatcagaacaagctgaaacctgagatggacgagaagggcaacctgaccaccgccggctttgcctgctctcagtgtggccagcccctgttcgtgtacaagctggagcaggtgtctgagaagggcaaggcttacaccaactacttcggacggtgcaatgtggccgagcacgaaaagctgatcctgctggcccagctgaagcccgagaaggatagcgacgaagccgtgacatatagcctgggaaagtttgggcagagggccctggatttctacagcattcatgtgaccaaggagtccacccaccccgtgaagcccctggcccagatcgccggaaacagatacgcctccggacctgtgggaaaggccctgagcgacgcatgtatgggcacaatcgcctccttcctgtctaagtaccaggacatcatcatcgaacaccagaaggtggtgaagggcaaccagaagagactggagagcctgcgggagctggccggcaaggaaaacctggaataccctagcgtgaccctgccacctcagcctcacaccaaggagggcgttgatgcctacaacgaagtgatcgcccgggtgcgaatgtgggtgaacctgaacctgtggcagaagctgaagctaagcagagatgatgccaagcctctgctgagactgaagggattcccttcctttcctctggtcgagagacaggccaacgaagtggactggtgggacatggtgtgtaacgtgaagaagctgatcaacgagaaaaaggaggatggcaaggtgttttggcagaatctggctggctacaagagacaggaagccctgagaccatacctgagcagcgaggaagatcggaagaagggaaagaaattcgctcggtaccagctgggcgacctgctgctgcacctggaaaagaagcacggcgaggactggggaaaggtgtacgacgaggcctgggagcggattgacaagaaagtggaaggcctgagcaagcacatcaagctggaagaggaacggagaagcgaggacgcccagagcaaggccgccctgaccgactggctgcgggctaaggccagcttcgtgatcgagggcctgaaggaggccgacaaggacgagttctgcagatgcgagctgaagctgcagaagtggtacggggacctgcggggaaagcccttcgccatcgaagccgagaacagcatcctggacatcagcggcttcagcaagcagtacaactgtgccttcatctggcagaaggacggcgtgaagaagctgaacctgtacctgatcatcaactacttcaagggcggcaagctgcggttcaagaagatcaaacctgaagccttcgaagccaacagattctacaccgtgatcaacaaaaagagcggcgagatcgtgcccatggaggtgaacttcaacttcgacgaccccaacctgatcatcctgcctctggcctttggcaagagacagggcagagaattcatctggaacgacctgctgtccctggaaaccggcagcctgaagctggccaacggaagagtgatcgagaagacactgtacaacagaagaacccggcaggatgagcctgccctgttcgtggccctgaccttcgagcggcgggaggtcctggactcctccaatatcaaaccaatgaacctgatcggcgtggcaagaggcgaaaacatccccgccgtgatcgccctgaccgaccccgagggctgcccactgagccggtttaaggatagcctgggaaacccaacccacatcctgagaatcggcgagagctataaggagaagcagcggaccatccaggccaagaaggaggtggagcagcggagagccggcggctacagccggaagtacgccagcaaagccaagaatctggcagacgatatggtgagaaacaccgctagagatctgctgtactacgccgtgacccaggatgccatgctgatcttcgccaacctgagccggggcttcggccggcagggcaagcggaccttcatggccgagagacagtacacacggatggaggactggctgaccgccaagctggcctacgagggcctgagcaagacctacctgtccaagacactggcccagtacacctccaagacatgcagcaactgtgggtttaccatcaccagcgccgactacgacagggtgctggagaagctgaagaagacagcaacaggctggatgaccacaattaacggcaaggagctgaaggtggagggccagattacctactacaacagatacaagagacagaacgtagtcaaggacctgtccgtcgagctggatagactgagcgaagaatctgtgaacaacgacatctcctcctggacaaagggcagaagcggagaagctctgagcctcctgaagaaaagattctcccatagacccgtgcaggagaagttcgtgtgcctgaactgcggcttcgagacacacgcagccgagcaagccgccctgaacatcgccagatcctggctgttcctgcggagccaggagtacaagaaataccagacaaacaagacaaccggcaacaccgataagagagccttcgtcgagacctggcagtccttttaccggaagaagcttaaggaggtgtggaaacctgccgtgcggtctggcggatctggcggaggctccacaagcaggcccagggccctgaagttcgtggacgtggccgtgtacttcagcagcgaggagtggggctgcctgaggcccgcccagagggccctgtacagggacgtgatgagggagacctacggccacctgggcgccctgggcttccccggccccaagcccgccctgatcagctggatggagcaggagagcgaggcctggagcagcgccgcccaggaccccgagaagggcgagaacctgggcggcgccaggaccagccccaagaaaaagagaaaagtctaagctgccttctgcggggcttgccttctggccatgcccttcttctctcccttgcacctgtacctcttggtctttgaataaagcctgagtaggaaggctagcaaaaaaaaaaaaaaaaaaaaaaaaaaaaaaaaaaaaaaaaaaaaaaaaaaaaaaaaaaaaaaaaaaaaaaaaaaaaaaaa

SEQ ID NO: 2779 - RNA, 5419 nt, synthetic construct
  source 1..5419: mol_type = other RNA
aggaaataagagagaaaagaagagtaagaagaaatataagagccaccatggcccctaagaagaagcgtaaagtgagccgggtgaacggcagcggcagcggcggcggcatgaaccacgaccaggagttcgacccccctaaggtgtaccctcccgtccccgccgagaagagaaagcccatccgggtcctgagcctgttcgatggcatcgccaccggtctgctggtgctgaaggacctgggcatccaggtggataggtacattgcctccgaggtgtgcgaggactccatcaccgtgggaatggtgcgtcatcagggcaagatcatgtacgtgggcgacgtgcggagcgtgacacagaagcatatccaggagtggggccctttcgacctggtgatcggcggcagcccttgcaatgacctgagcatcgtgaacccagcccggaagggcctgtacgagggaaccggcagactgttcttcgagttttacagactgctgcacgacgcccggcctaaggaaggcgacgaccggcccttcttttggctgttcgagaatgtggtggccatgggagtcagcgacaagcgggatattagccggttcctggagagcaaccccgtgatgatcgatgccaaggaagtgagcgccgcccaccgggccagatacttctggggcaatctgcctggcatgaacagacccctggccagcaccgtgaacgacaagctggagctgcaggagtgcctggagcacggccggatcgccaagttcagcaaggtgagaaccatcaccacccgaagcaacagcatcaaacaaggcaaggaccagcactttcctgtgttcatgaacgagaaggaggacatcctgtggtgtaccgagatggagagagtgttcgggttcccagtccactacacagatgtcagcaacatgtctagactggccagacagagactgctgggaagaagctggtccgtccctgtgatcagacacctgttcgcccctctgaaggagtacttcgcctgcgtgagcagcggcaacagcaacgccaacagccggggccccagcttctctagcggcctggtgccactgtccctgagagggagccacatgggccccatggagatctacaaaaccgtgagcgcctggaagcggcagcctgtgcgcgtgctgagcctgtttcggaatatcgataaagtcctgaaaagcctgggattcctggagagcggctctggctccggcggtggcaccctgaagtacgtggaggatgtgacaaacgtggtcagacgggatgtggagaagtggggccccttcgatctggtgtacggcagcacccaacccctgggcagctcttgtgaccggtgccctggctggtacatgtttcagttccaccggatcctgcagtacgccctgccgagacaggagtcccagcggccattcttttggattttcatggacaacttgctgctgaccgaggatgaccaggaaactaccactcggttcctgcagaccgaagccgtgaccctgcaggacgtgagaggccgggactaccagaacgccatgcgggtgtggtccaacatccctggactgaaaagcaagcacgcacctctgacccctaaagaagaggagtacctgcaggcccaggtgcggagcagaagcaagctggacgcccctaaggtggatctgctggtgaagaattgcctcctgcccctgagagagtacttcaagtatttcagccagaatagtctgcccctgggcggcccaagcagcggcgcccctcctcccagcggcggcagcccagccggctccccaacctctaccgaggagggcacctctgagtccgccacccccgagagcggccctggcacctccaccgagcccagcgagggcagcgcacccggcagccctgccggcagccccacctccacagaggagggaaccagcaccgagcccagcgaaggcagcgccccaggcaccagcaccgagcctagtgagggcggctctggcggcggcagcgcccaggagattaaacggatcaacaagatcagaagaagacttgtgaaagacagcaacaccaagaaggccggcaagacaggccccatgaaaaccctgctggttagagtgatgacacccgatctgagagagcggctggaaaacctgagaaagaagcctgaaaatatcccccagcccatcagcaatacatctagagccaacctgaataagctgctgaccgattacaccgaaatgaagaaggcgatcctgcatgtgtactgggaagagttccagaaggaccctgtgggcctgatgagccgggtggcccagcctgccagcaagaagatcgatcagaacaagctgaaacctgagatggacgagaagggcaacctgaccaccgccggctttgcctgctctcagtgtggccagcccctgttcgtgtacaagctggagcaggtgtctgagaagggcaaggcttacaccaactacttcggacggtgcaatgtggccgagcacgaaaagctgatcctgctggcccagctgaagcccgagaaggatagcgacgaagccgtgacatatagcctgggaaagtttgggcagagggccctggatttctacagcattcatgtgaccaaggagtccacccaccccgtgaagcccctggcccagatcgccggaaacagatacgcctccggacctgtgggaaaggccctgagcgacgcatgtatgggcacaatcgcctccttcctgtctaagtaccaggacatcatcatcgaacaccagaaggtggtgaagggcaaccagaagagactggagagcctgcgggagctggccggcaaggaaaacctggaataccctagcgtgaccctgccacctcagcctcacaccaaggagggcgttgatgcctacaacgaagtgatcgcccgggtgcgaatgtgggtgaacctgaacctgtggcagaagctgaagctaagcagagatgatgccaagcctctgctgagactgaagggattcccttcctttcctctggtcgagagacaggccaacgaagtggactggtgggacatggtgtgtaacgtgaagaagctgatcaacgagaaaaaggaggatggcaaggtgttttggcagaatctggctggctacaagagacaggaagccctgagaccatacctgagcagcgaggaagatcggaagaagggaaagaaattcgctcggtaccagctgggcgacctgctgctgcacctggaaaagaagcacggcgaggactggggaaaggtgtacgacgaggcctgggagcggattgacaagaaagtggaaggcctgagcaagcacatcaagctggaagaggaacggagaagcgaggacgcccagagcaaggccgccctgaccgactggctgcgggctaaggccagcttcgtgatcgagggcctgaaggaggccgacaaggacgagttctgcagatgcgagctgaagctgcagaagtggtacggggacctgcggggaaagcccttcgccatcgaagccgagaacagcatcctggacatcagcggcttcagcaagcagtacaactgtgccttcatctggcagaaggacggcgtgaagaagctgaacctgtacctgatcatcaactacttcaagggcggcaagctgcggttcaagaagatcaaacctgaagccttcgaagccaacagattctacaccgtgatcaacaaaaagagcggcgagatcgtgcccatggaggtgaacttcaacttcgacgaccccaacctgatcatcctgcctctggcctttggcaagagacagggcagagaattcatctggaacgacctgctgtccctggaaaccggcagcctgaagctggccaacggaagagtgatcgagaagacactgtacaacagaagaacccggcaggatgagcctgccctgttcgtggccctgaccttcgagcggcgggaggtcctggactcctccaatatcaaaccaatgaacctgatcggcgtggcaagaggcgaaaacatccccgccgtgatcgccctgaccgaccccgagggctgcccactgagccggtttaaggatagcctgggaaacccaacccacatcctgagaatcggcgagagctataaggagaagcagcggaccatccaggccaagaaggaggtggagcagcggagagccggcggctacagccggaagtacgccagcaaagccaagaatctggcagacgatatggtgagaaacaccgctagagatctgctgtactacgccgtgacccaggatgccatgctgatcttcgccaacctgagccggggcttcggccggcagggcaagcggaccttcatggccgagagacagtacacacggatggaggactggctgaccgccaagctggcctacgagggcctgagcaagacctacctgtccaagacactggcccagtacacctccaagacatgcagcaactgtgggtttaccatcaccagcgccgactacgacagggtgctggagaagctgaagaagacagcaacaggctggatgaccacaattaacggcaaggagctgaaggtggagggccagattacctactacaacagatacaagagacagaacgtagtcaaggacctgtccgtcgagctggatagactgagcgaagaatctgtgaacaacgacatctcctcctggacaaagggcagaagcggagaagctctgagcctcctgaagaaaagattctcccatagacccgtgcaggagaagttcgtgtgcctgaactgcggcttcgagacacacgcagccgagcaagccgccctgaacatcgccagatcctggctgttcctgcggagccaggagtacaagaaataccagacaaacaagacaaccggcaacaccgataagagagccttcgtcgagacctggcagtccttttaccggaagaagcttaaggaggtgtggaaacctgccgtgcggtctggcggatctggcggaggctccacaagcgagcccgtgaccttcgaggacgtggccgtgtacttcagccagaaccagtgggccagcctggacagcgcccagagggccctgtacagggaggtgatgctggagaactacgccaacgtggccagcctggtgagccccttccccaggcccgacctgatcagccagctggagaggggcgaggccccctgggaccccaacccctgggaggccgaggacctgaggggcatctgccccggcggcgagaggaccagccccaagaaaaagagaaaagtctaagctgccttctgcggggcttgccttctggccatgcccttcttctctcccttgcacctgtacctcttggtctttgaataaagcctgagtaggaaggctagcaaaaaaaaaaaaaaaaaaaaaaaaaaaaaaaaaaaaaaaaaaaaaaaaaaaaaaaaaaaaaaaaaaaaaaaaaaaaaaaa

SEQ ID NO: 2780 - RNA, 5419 nt, synthetic construct
  source 1..5419: mol_type = other RNA
aggaaataagagagaaaagaagagtaagaagaaatataagagccaccatggcccctaagaagaagcgtaaagtgagccgggtgaacggcagcggcagcggcggcggcatgaaccacgaccaggagttcgacccccctaaggtgtaccctcccgtccccgccgagaagagaaagcccatccgggtcctgagcctgttcgatggcatcgccaccggtctgctggtgctgaaggacctgggcatccaggtggataggtacattgcctccgaggtgtgcgaggactccatcaccgtgggaatggtgcgtcatcagggcaagatcatgtacgtgggcgacgtgcggagcgtgacacagaagcatatccaggagtggggccctttcgacctggtgatcggcggcagcccttgcaatgacctgagcatcgtgaacccagcccggaagggcctgtacgagggaaccggcagactgttcttcgagttttacagactgctgcacgacgcccggcctaaggaaggcgacgaccggcccttcttttggctgttcgagaatgtggtggccatgggagtcagcgacaagcgggatattagccggttcctggagagcaaccccgtgatgatcgatgccaaggaagtgagcgccgcccaccgggccagatacttctggggcaatctgcctggcatgaacagacccctggccagcaccgtgaacgacaagctggagctgcaggagtgcctggagcacggccggatcgccaagttcagcaaggtgagaaccatcaccacccgaagcaacagcatcaaacaaggcaaggaccagcactttcctgtgttcatgaacgagaaggaggacatcctgtggtgtaccgagatggagagagtgttcgggttcccagtccactacacagatgtcagcaacatgtctagactggccagacagagactgctgggaagaagctggtccgtccctgtgatcagacacctgttcgcccctctgaaggagtacttcgcctgcgtgagcagcggcaacagcaacgccaacagccggggccccagcttctctagcggcctggtgccactgtccctgagagggagccacatgggccccatggagatctacaaaaccgtgagcgcctggaagcggcagcctgtgcgcgtgctgagcctgtttcggaatatcgataaagtcctgaaaagcctgggattcctggagagcggctctggctccggcggtggcaccctgaagtacgtggaggatgtgacaaacgtggtcagacgggatgtggagaagtggggccccttcgatctggtgtacggcagcacccaacccctgggcagctcttgtgaccggtgccctggctggtacatgtttcagttccaccggatcctgcagtacgccctgccgagacaggagtcccagcggccattcttttggattttcatggacaacttgctgctgaccgaggatgaccaggaaactaccactcggttcctgcagaccgaagccgtgaccctgcaggacgtgagaggccgggactaccagaacgccatgcgggtgtggtccaacatccctggactgaaaagcaagcacgcacctctgacccctaaagaagaggagtacctgcaggcccaggtgcggagcagaagcaagctggacgcccctaaggtggatctgctggtgaagaattgcctcctgcccctgagagagtacttcaagtatttcagccagaatagtctgcccctgggcggcccaagcagcggcgcccctcctcccagcggcggcagcccagccggctccccaacctctaccgaggagggcacctctgagtccgccacccccgagagcggccctggcacctccaccgagcccagcgagggcagcgcacccggcagccctgccggcagccccacctccacagaggagggaaccagcaccgagcccagcgaaggcagcgccccaggcaccagcaccgagcctagtgagggcggctctggcggcggcagcgcccaggagattaaacggatcaacaagatcagaagaagacttgtgaaagacagcaacaccaagaaggccggcaagacaggccccatgaaaaccctgctggttagagtgatgacacccgatctgagagagcggctggaaaacctgagaaagaagcctgaaaatatcccccagcccatcagcaatacatctagagccaacctgaataagctgctgaccgattacaccgaaatgaagaaggcgatcctgcatgtgtactgggaagagttccagaaggaccctgtgggcctgatgagccgggtggcccagcctgccagcaagaagatcgatcagaacaagctgaaacctgagatggacgagaagggcaacctgaccaccgccggctttgcctgctctcagtgtggccagcccctgttcgtgtacaagctggagcaggtgtctgagaagggcaaggcttacaccaactacttcggacggtgcaatgtggccgagcacgaaaagctgatcctgctggcccagctgaagcccgagaaggatagcgacgaagccgtgacatatagcctgggaaagtttgggcagagggccctggatttctacagcattcatgtgaccaaggagtccacccaccccgtgaagcccctggcccagatcgccggaaacagatacgcctccggacctgtgggaaaggccctgagcgacgcatgtatgggcacaatcgcctccttcctgtctaagtaccaggacatcatcatcgaacaccagaaggtggtgaagggcaaccagaagagactggagagcctgcgggagctggccggcaaggaaaacctggaataccctagcgtgaccctgccacctcagcctcacaccaaggagggcgttgatgcctacaacgaagtgatcgcccgggtgcgaatgtgggtgaacctgaacctgtggcagaagctgaagctaagcagagatgatgccaagcctctgctgagactgaagggattcccttcctttcctctggtcgagagacaggccaacgaagtggactggtgggacatggtgtgtaacgtgaagaagctgatcaacgagaaaaaggaggatggcaaggtgttttggcagaatctggctggctacaagagacaggaagccctgagaccatacctgagcagcgaggaagatcggaagaagggaaagaaattcgctcggtaccagctgggcgacctgctgctgcacctggaaaagaagcacggcgaggactggggaaaggtgtacgacgaggcctgggagcggattgacaagaaagtggaaggcctgagcaagcacatcaagctggaagaggaacggagaagcgaggacgcccagagcaaggccgccctgaccgactggctgcgggctaaggccagcttcgtgatcgagggcctgaaggaggccgacaaggacgagttctgcagatgcgagctgaagctgcagaagtggtacggggacctgcggggaaagcccttcgccatcgaagccgagaacagcatcctggacatcagcggcttcagcaagcagtacaactgtgccttcatctggcagaaggacggcgtgaagaagctgaacctgtacctgatcatcaactacttcaagggcggcaagctgcggttcaagaagatcaaacctgaagccttcgaagccaacagattctacaccgtgatcaacaaaaagagcggcgagatcgtgcccatggaggtgaacttcaacttcgacgaccccaacctgatcatcctgcctctggcctttggcaagagacagggcagagaattcatctggaacgacctgctgtccctggaaaccggcagcctgaagctggccaacggaagagtgatcgagaagacactgtacaacagaagaacccggcaggatgagcctgccctgttcgtggccctgaccttcgagcggcgggaggtcctggactcctccaatatcaaaccaatgaacctgatcggcgtggcaagaggcgaaaacatccccgccgtgatcgccctgaccgaccccgagggctgcccactgagccggtttaaggatagcctgggaaacccaacccacatcctgagaatcggcgagagctataaggagaagcagcggaccatccaggccaagaaggaggtggagcagcggagagccggcggctacagccggaagtacgccagcaaagccaagaatctggcagacgatatggtgagaaacaccgctagagatctgctgtactacgccgtgacccaggatgccatgctgatcttcgccaacctgagccggggcttcggccggcagggcaagcggaccttcatggccgagagacagtacacacggatggaggactggctgaccgccaagctggcctacgagggcctgagcaagacctacctgtccaagacactggcccagtacacctccaagacatgcagcaactgtgggtttaccatcaccagcgccgactacgacagggtgctggagaagctgaagaagacagcaacaggctggatgaccacaattaacggcaaggagctgaaggtggagggccagattacctactacaacagatacaagagacagaacgtagtcaaggacctgtccgtcgagctggatagactgagcgaagaatctgtgaacaacgacatctcctcctggacaaagggcagaagcggagaagctctgagcctcctgaagaaaagattctcccatagacccgtgcaggagaagttcgtgtgcctgaactgcggcttcgagacacacgcagccgagcaagccgccctgaacatcgccagatcctggctgttcctgcggagccaggagtacaagaaataccagacaaacaagacaaccggcaacaccgataagagagccttcgtcgagacctggcagtccttttaccggaagaagcttaaggaggtgtggaaacctgccgtgcggtctggcggatctggcggaggctccacaagcatccacgagagcgtgaccttcgaggacgtggccgtgaacttcaccgacagggagtggcagtgcctgacccacgcccagaggcacctgtacaaggacgtgatgctggagaactacggcaacatggtgagcctgggcttccccttccccaagccccccctgatcagccacctggagagggagaccgagccctgggtgcaggacctgcaggacagggagagcctgagcagcttctaccccgtgagcaccagccccaagaaaaagagaaaagtctaagctgccttctgcggggcttgccttctggccatgcccttcttctctcccttgcacctgtacctcttggtctttgaataaagcctgagtaggaaggctagcaaaaaaaaaaaaaaaaaaaaaaaaaaaaaaaaaaaaaaaaaaaaaaaaaaaaaaaaaaaaaaaaaaaaaaaaaaaaaaaa

SEQ ID NO: 2781 - RNA, 5419 nt, synthetic construct
  source 1..5419: mol_type = other RNA
aggaaataagagagaaaagaagagtaagaagaaatataagagccaccatggcccctaagaagaagcgtaaagtgagccgggtgaacggcagcggcagcggcggcggcatgaaccacgaccaggagttcgacccccctaaggtgtaccctcccgtccccgccgagaagagaaagcccatccgggtcctgagcctgttcgatggcatcgccaccggtctgctggtgctgaaggacctgggcatccaggtggataggtacattgcctccgaggtgtgcgaggactccatcaccgtgggaatggtgcgtcatcagggcaagatcatgtacgtgggcgacgtgcggagcgtgacacagaagcatatccaggagtggggccctttcgacctggtgatcggcggcagcccttgcaatgacctgagcatcgtgaacccagcccggaagggcctgtacgagggaaccggcagactgttcttcgagttttacagactgctgcacgacgcccggcctaaggaaggcgacgaccggcccttcttttggctgttcgagaatgtggtggccatgggagtcagcgacaagcgggatattagccggttcctggagagcaaccccgtgatgatcgatgccaaggaagtgagcgccgcccaccgggccagatacttctggggcaatctgcctggcatgaacagacccctggccagcaccgtgaacgacaagctggagctgcaggagtgcctggagcacggccggatcgccaagttcagcaaggtgagaaccatcaccacccgaagcaacagcatcaaacaaggcaaggaccagcactttcctgtgttcatgaacgagaaggaggacatcctgtggtgtaccgagatggagagagtgttcgggttcccagtccactacacagatgtcagcaacatgtctagactggccagacagagactgctgggaagaagctggtccgtccctgtgatcagacacctgttcgcccctctgaaggagtacttcgcctgcgtgagcagcggcaacagcaacgccaacagccggggccccagcttctctagcggcctggtgccactgtccctgagagggagccacatgggccccatggagatctacaaaaccgtgagcgcctggaagcggcagcctgtgcgcgtgctgagcctgtttcggaatatcgataaagtcctgaaaagcctgggattcctggagagcggctctggctccggcggtggcaccctgaagtacgtggaggatgtgacaaacgtggtcagacgggatgtggagaagtggggccccttcgatctggtgtacggcagcacccaacccctgggcagctcttgtgaccggtgccctggctggtacatgtttcagttccaccggatcctgcagtacgccctgccgagacaggagtcccagcggccattcttttggattttcatggacaacttgctgctgaccgaggatgaccaggaaactaccactcggttcctgcagaccgaagccgtgaccctgcaggacgtgagaggccgggactaccagaacgccatgcgggtgtggtccaacatccctggactgaaaagcaagcacgcacctctgacccctaaagaagaggagtacctgcaggcccaggtgcggagcagaagcaagctggacgcccctaaggtggatctgctggtgaagaattgcctcctgcccctgagagagtacttcaagtatttcagccagaatagtctgcccctgggcggcccaagcagcggcgcccctcctcccagcggcggcagcccagccggctccccaacctctaccgaggagggcacctctgagtccgccacccccgagagcggccctggcacctccaccgagcccagcgagggcagcgcacccggcagccctgccggcagccccacctccacagaggagggaaccagcaccgagcccagcgaaggcagcgccccaggcaccagcaccgagcctagtgagggcggctctggcggcggcagcgcccaggagattaaacggatcaacaagatcagaagaagacttgtgaaagacagcaacaccaagaaggccggcaagacaggccccatgaaaaccctgctggttagagtgatgacacccgatctgagagagcggctggaaaacctgagaaagaagcctgaaaatatcccccagcccatcagcaatacatctagagccaacctgaataagctgctgaccgattacaccgaaatgaagaaggcgatcctgcatgtgtactgggaagagttccagaaggaccctgtgggcctgatgagccgggtggcccagcctgccagcaagaagatcgatcagaacaagctgaaacctgagatggacgagaagggcaacctgaccaccgccggctttgcctgctctcagtgtggccagcccctgttcgtgtacaagctggagcaggtgtctgagaagggcaaggcttacaccaactacttcggacggtgcaatgtggccgagcacgaaaagctgatcctgctggcccagctgaagcccgagaaggatagcgacgaagccgtgacatatagcctgggaaagtttgggcagagggccctggatttctacagcattcatgtgaccaaggagtccacccaccccgtgaagcccctggcccagatcgccggaaacagatacgcctccggacctgtgggaaaggccctgagcgacgcatgtatgggcacaatcgcctccttcctgtctaagtaccaggacatcatcatcgaacaccagaaggtggtgaagggcaaccagaagagactggagagcctgcgggagctggccggcaaggaaaacctggaataccctagcgtgaccctgccacctcagcctcacaccaaggagggcgttgatgcctacaacgaagtgatcgcccgggtgcgaatgtgggtgaacctgaacctgtggcagaagctgaagctaagcagagatgatgccaagcctctgctgagactgaagggattcccttcctttcctctggtcgagagacaggccaacgaagtggactggtgggacatggtgtgtaacgtgaagaagctgatcaacgagaaaaaggaggatggcaaggtgttttggcagaatctggctggctacaagagacaggaagccctgagaccatacctgagcagcgaggaagatcggaagaagggaaagaaattcgctcggtaccagctgggcgacctgctgctgcacctggaaaagaagcacggcgaggactggggaaaggtgtacgacgaggcctgggagcggattgacaagaaagtggaaggcctgagcaagcacatcaagctggaagaggaacggagaagcgaggacgcccagagcaaggccgccctgaccgactggctgcgggctaaggccagcttcgtgatcgagggcctgaaggaggccgacaaggacgagttctgcagatgcgagctgaagctgcagaagtggtacggggacctgcggggaaagcccttcgccatcgaagccgagaacagcatcctggacatcagcggcttcagcaagcagtacaactgtgccttcatctggcagaaggacggcgtgaagaagctgaacctgtacctgatcatcaactacttcaagggcggcaagctgcggttcaagaagatcaaacctgaagccttcgaagccaacagattctacaccgtgatcaacaaaaagagcggcgagatcgtgcccatggaggtgaacttcaacttcgacgaccccaacctgatcatcctgcctctggcctttggcaagagacagggcagagaattcatctggaacgacctgctgtccctggaaaccggcagcctgaagctggccaacggaagagtgatcgagaagacactgtacaacagaagaacccggcaggatgagcctgccctgttcgtggccctgaccttcgagcggcgggaggtcctggactcctccaatatcaaaccaatgaacctgatcggcgtggcaagaggcgaaaacatccccgccgtgatcgccctgaccgaccccgagggctgcccactgagccggtttaaggatagcctgggaaacccaacccacatcctgagaatcggcgagagctataaggagaagcagcggaccatccaggccaagaaggaggtggagcagcggagagccggcggctacagccggaagtacgccagcaaagccaagaatctggcagacgatatggtgagaaacaccgctagagatctgctgtactacgccgtgacccaggatgccatgctgatcttcgccaacctgagccggggcttcggccggcagggcaagcggaccttcatggccgagagacagtacacacggatggaggactggctgaccgccaagctggcctacgagggcctgagcaagacctacctgtccaagacactggcccagtacacctccaagacatgcagcaactgtgggtttaccatcaccagcgccgactacgacagggtgctggagaagctgaagaagacagcaacaggctggatgaccacaattaacggcaaggagctgaaggtggagggccagattacctactacaacagatacaagagacagaacgtagtcaaggacctgtccgtcgagctggatagactgagcgaagaatctgtgaacaacgacatctcctcctggacaaagggcagaagcggagaagctctgagcctcctgaagaaaagattctcccatagacccgtgcaggagaagttcgtgtgcctgaactgcggcttcgagacacacgcagccgagcaagccgccctgaacatcgccagatcctggctgttcctgcggagccaggagtacaagaaataccagacaaacaagacaaccggcaacaccgataagagagccttcgtcgagacctggcagtccttttaccggaagaagcttaaggaggtgtggaaacctgccgtgcggtctggcggatctggcggaggctccacaagcagccaggagcaggtgagcttcaaggacgtgtgcgtggacttcaccagggaggagtggtacctgctggaccccgcccagaagatcctgtacagggacgtgatcctggagaactacagccacctggtgagcgtgggcaactgcatcaccaagcccgaggtgatcttcaagatcgagcagggcgaggagccctggatcctggaggagaggttccccaagcagtgctgcagcgagaggaactggaagaccagccccaagaaaaagagaaaagtctaagctgccttctgcggggcttgccttctggccatgcccttcttctctcccttgcacctgtacctcttggtctttgaataaagcctgagtaggaaggctagcaaaaaaaaaaaaaaaaaaaaaaaaaaaaaaaaaaaaaaaaaaaaaaaaaaaaaaaaaaaaaaaaaaaaaaaaaaaaaaaa

SEQ ID NO: 2782 - RNA, 5416 nt, synthetic construct
  source 1..5416: mol_type = other RNA
aggaaataagagagaaaagaagagtaagaagaaatataagagccaccatggcccctaagaagaagcgtaaagtgagccgggtgaacggcagcggcagcggcggcggcatgaaccacgaccaggagttcgacccccctaaggtgtaccctcccgtccccgccgagaagagaaagcccatccgggtcctgagcctgttcgatggcatcgccaccggtctgctggtgctgaaggacctgggcatccaggtggataggtacattgcctccgaggtgtgcgaggactccatcaccgtgggaatggtgcgtcatcagggcaagatcatgtacgtgggcgacgtgcggagcgtgacacagaagcatatccaggagtggggccctttcgacctggtgatcggcggcagcccttgcaatgacctgagcatcgtgaacccagcccggaagggcctgtacgagggaaccggcagactgttcttcgagttttacagactgctgcacgacgcccggcctaaggaaggcgacgaccggcccttcttttggctgttcgagaatgtggtggccatgggagtcagcgacaagcgggatattagccggttcctggagagcaaccccgtgatgatcgatgccaaggaagtgagcgccgcccaccgggccagatacttctggggcaatctgcctggcatgaacagacccctggccagcaccgtgaacgacaagctggagctgcaggagtgcctggagcacggccggatcgccaagttcagcaaggtgagaaccatcaccacccgaagcaacagcatcaaacaaggcaaggaccagcactttcctgtgttcatgaacgagaaggaggacatcctgtggtgtaccgagatggagagagtgttcgggttcccagtccactacacagatgtcagcaacatgtctagactggccagacagagactgctgggaagaagctggtccgtccctgtgatcagacacctgttcgcccctctgaaggagtacttcgcctgcgtgagcagcggcaacagcaacgccaacagccggggccccagcttctctagcggcctggtgccactgtccctgagagggagccacatgggccccatggagatctacaaaaccgtgagcgcctggaagcggcagcctgtgcgcgtgctgagcctgtttcggaatatcgataaagtcctgaaaagcctgggattcctggagagcggctctggctccggcggtggcaccctgaagtacgtggaggatgtgacaaacgtggtcagacgggatgtggagaagtggggccccttcgatctggtgtacggcagcacccaacccctgggcagctcttgtgaccggtgccctggctggtacatgtttcagttccaccggatcctgcagtacgccctgccgagacaggagtcccagcggccattcttttggattttcatggacaacttgctgctgaccgaggatgaccaggaaactaccactcggttcctgcagaccgaagccgtgaccctgcaggacgtgagaggccgggactaccagaacgccatgcgggtgtggtccaacatccctggactgaaaagcaagcacgcacctctgacccctaaagaagaggagtacctgcaggcccaggtgcggagcagaagcaagctggacgcccctaaggtggatctgctggtgaagaattgcctcctgcccctgagagagtacttcaagtatttcagccagaatagtctgcccctgggcggcccaagcagcggcgcccctcctcccagcggcggcagcccagccggctccccaacctctaccgaggagggcacctctgagtccgccacccccgagagcggccctggcacctccaccgagcccagcgagggcagcgcacccggcagccctgccggcagccccacctccacagaggagggaaccagcaccgagcccagcgaaggcagcgccccaggcaccagcaccgagcctagtgagggcggctctggcggcggcagcgcccaggagattaaacggatcaacaagatcagaagaagacttgtgaaagacagcaacaccaagaaggccggcaagacaggccccatgaaaaccctgctggttagagtgatgacacccgatctgagagagcggctggaaaacctgagaaagaagcctgaaaatatcccccagcccatcagcaatacatctagagccaacctgaataagctgctgaccgattacaccgaaatgaagaaggcgatcctgcatgtgtactgggaagagttccagaaggaccctgtgggcctgatgagccgggtggcccagcctgccagcaagaagatcgatcagaacaagctgaaacctgagatggacgagaagggcaacctgaccaccgccggctttgcctgctctcagtgtggccagcccctgttcgtgtacaagctggagcaggtgtctgagaagggcaaggcttacaccaactacttcggacggtgcaatgtggccgagcacgaaaagctgatcctgctggcccagctgaagcccgagaaggatagcgacgaagccgtgacatatagcctgggaaagtttgggcagagggccctggatttctacagcattcatgtgaccaaggagtccacccaccccgtgaagcccctggcccagatcgccggaaacagatacgcctccggacctgtgggaaaggccctgagcgacgcatgtatgggcacaatcgcctccttcctgtctaagtaccaggacatcatcatcgaacaccagaaggtggtgaagggcaaccagaagagactggagagcctgcgggagctggccggcaaggaaaacctggaataccctagcgtgaccctgccacctcagcctcacaccaaggagggcgttgatgcctacaacgaagtgatcgcccgggtgcgaatgtgggtgaacctgaacctgtggcagaagctgaagctaagcagagatgatgccaagcctctgctgagactgaagggattcccttcctttcctctggtcgagagacaggccaacgaagtggactggtgggacatggtgtgtaacgtgaagaagctgatcaacgagaaaaaggaggatggcaaggtgttttggcagaatctggctggctacaagagacaggaagccctgagaccatacctgagcagcgaggaagatcggaagaagggaaagaaattcgctcggtaccagctgggcgacctgctgctgcacctggaaaagaagcacggcgaggactggggaaaggtgtacgacgaggcctgggagcggattgacaagaaagtggaaggcctgagcaagcacatcaagctggaagaggaacggagaagcgaggacgcccagagcaaggccgccctgaccgactggctgcgggctaaggccagcttcgtgatcgagggcctgaaggaggccgacaaggacgagttctgcagatgcgagctgaagctgcagaagtggtacggggacctgcggggaaagcccttcgccatcgaagccgagaacagcatcctggacatcagcggcttcagcaagcagtacaactgtgccttcatctggcagaaggacggcgtgaagaagctgaacctgtacctgatcatcaactacttcaagggcggcaagctgcggttcaagaagatcaaacctgaagccttcgaagccaacagattctacaccgtgatcaacaaaaagagcggcgagatcgtgcccatggaggtgaacttcaacttcgacgaccccaacctgatcatcctgcctctggcctttggcaagagacagggcagagaattcatctggaacgacctgctgtccctggaaaccggcagcctgaagctggccaacggaagagtgatcgagaagacactgtacaacagaagaacccggcaggatgagcctgccctgttcgtggccctgaccttcgagcggcgggaggtcctggactcctccaatatcaaaccaatgaacctgatcggcgtggcaagaggcgaaaacatccccgccgtgatcgccctgaccgaccccgagggctgcccactgagccggtttaaggatagcctgggaaacccaacccacatcctgagaatcggcgagagctataaggagaagcagcggaccatccaggccaagaaggaggtggagcagcggagagccggcggctacagccggaagtacgccagcaaagccaagaatctggcagacgatatggtgagaaacaccgctagagatctgctgtactacgccgtgacccaggatgccatgctgatcttcgccaacctgagccggggcttcggccggcagggcaagcggaccttcatggccgagagacagtacacacggatggaggactggctgaccgccaagctggcctacgagggcctgagcaagacctacctgtccaagacactggcccagtacacctccaagacatgcagcaactgtgggtttaccatcaccagcgccgactacgacagggtgctggagaagctgaagaagacagcaacaggctggatgaccacaattaacggcaaggagctgaaggtggagggccagattacctactacaacagatacaagagacagaacgtagtcaaggacctgtccgtcgagctggatagactgagcgaagaatctgtgaacaacgacatctcctcctggacaaagggcagaagcggagaagctctgagcctcctgaagaaaagattctcccatagacccgtgcaggagaagttcgtgtgcctgaactgcggcttcgagacacacgcagccgagcaagccgccctgaacatcgccagatcctggctgttcctgcggagccaggagtacaagaaataccagacaaacaagacaaccggcaacaccgataagagagccttcgtcgagacctggcagtccttttaccggaagaagcttaaggaggtgtggaaacctgccgtgcggtctggcggatctggcggaggctccacaagccaggaccccagcgccgagggcctgagcgaggaggtgcccgtggtgttcgaggagctgcccgtggtgttcgaggacgtggccgtgtacttcaccagagaggagtggggcatgctggacaagagacagaaggagctgtacagagacgtgatgagaatgaactacgagctgctggccagcctgggccccgccgccgccaagcccgacctgatcagcaagctggagagaagagccgccccctggaccagccccaagaaaaagagaaaagtctaagctgccttctgcggggcttgccttctggccatgcccttcttctctcccttgcacctgtacctcttggtctttgaataaagcctgagtaggaaggctagcaaaaaaaaaaaaaaaaaaaaaaaaaaaaaaaaaaaaaaaaaaaaaaaaaaaaaaaaaaaaaaaaaaaaaaaaaaaaaaaa

SEQ ID NO: 2783 - RNA, 5419 nt, synthetic construct
  source 1..5419: mol_type = other RNA
aggaaataagagagaaaagaagagtaagaagaaatataagagccaccatggcccctaagaagaagcgtaaagtgagccgggtgaacggcagcggcagcggcggcggcatgaaccacgaccaggagttcgacccccctaaggtgtaccctcccgtccccgccgagaagagaaagcccatccgggtcctgagcctgttcgatggcatcgccaccggtctgctggtgctgaaggacctgggcatccaggtggataggtacattgcctccgaggtgtgcgaggactccatcaccgtgggaatggtgcgtcatcagggcaagatcatgtacgtgggcgacgtgcggagcgtgacacagaagcatatccaggagtggggccctttcgacctggtgatcggcggcagcccttgcaatgacctgagcatcgtgaacccagcccggaagggcctgtacgagggaaccggcagactgttcttcgagttttacagactgctgcacgacgcccggcctaaggaaggcgacgaccggcccttcttttggctgttcgagaatgtggtggccatgggagtcagcgacaagcgggatattagccggttcctggagagcaaccccgtgatgatcgatgccaaggaagtgagcgccgcccaccgggccagatacttctggggcaatctgcctggcatgaacagacccctggccagcaccgtgaacgacaagctggagctgcaggagtgcctggagcacggccggatcgccaagttcagcaaggtgagaaccatcaccacccgaagcaacagcatcaaacaaggcaaggaccagcactttcctgtgttcatgaacgagaaggaggacatcctgtggtgtaccgagatggagagagtgttcgggttcccagtccactacacagatgtcagcaacatgtctagactggccagacagagactgctgggaagaagctggtccgtccctgtgatcagacacctgttcgcccctctgaaggagtacttcgcctgcgtgagcagcggcaacagcaacgccaacagccggggccccagcttctctagcggcctggtgccactgtccctgagagggagccacatgggccccatggagatctacaaaaccgtgagcgcctggaagcggcagcctgtgcgcgtgctgagcctgtttcggaatatcgataaagtcctgaaaagcctgggattcctggagagcggctctggctccggcggtggcaccctgaagtacgtggaggatgtgacaaacgtggtcagacgggatgtggagaagtggggccccttcgatctggtgtacggcagcacccaacccctgggcagctcttgtgaccggtgccctggctggtacatgtttcagttccaccggatcctgcagtacgccctgccgagacaggagtcccagcggccattcttttggattttcatggacaacttgctgctgaccgaggatgaccaggaaactaccactcggttcctgcagaccgaagccgtgaccctgcaggacgtgagaggccgggactaccagaacgccatgcgggtgtggtccaacatccctggactgaaaagcaagcacgcacctctgacccctaaagaagaggagtacctgcaggcccaggtgcggagcagaagcaagctggacgcccctaaggtggatctgctggtgaagaattgcctcctgcccctgagagagtacttcaagtatttcagccagaatagtctgcccctgggcggcccaagcagcggcgcccctcctcccagcggcggcagcccagccggctccccaacctctaccgaggagggcacctctgagtccgccacccccgagagcggccctggcacctccaccgagcccagcgagggcagcgcacccggcagccctgccggcagccccacctccacagaggagggaaccagcaccgagcccagcgaaggcagcgccccaggcaccagcaccgagcctagtgagggcggctctggcggcggcagcgcccaggagattaaacggatcaacaagatcagaagaagacttgtgaaagacagcaacaccaagaaggccggcaagacaggccccatgaaaaccctgctggttagagtgatgacacccgatctgagagagcggctggaaaacctgagaaagaagcctgaaaatatcccccagcccatcagcaatacatctagagccaacctgaataagctgctgaccgattacaccgaaatgaagaaggcgatcctgcatgtgtactgggaagagttccagaaggaccctgtgggcctgatgagccgggtggcccagcctgccagcaagaagatcgatcagaacaagctgaaacctgagatggacgagaagggcaacctgaccaccgccggctttgcctgctctcagtgtggccagcccctgttcgtgtacaagctggagcaggtgtctgagaagggcaaggcttacaccaactacttcggacggtgcaatgtggccgagcacgaaaagctgatcctgctggcccagctgaagcccgagaaggatagcgacgaagccgtgacatatagcctgggaaagtttgggcagagggccctggatttctacagcattcatgtgaccaaggagtccacccaccccgtgaagcccctggcccagatcgccggaaacagatacgcctccggacctgtgggaaaggccctgagcgacgcatgtatgggcacaatcgcctccttcctgtctaagtaccaggacatcatcatcgaacaccagaaggtggtgaagggcaaccagaagagactggagagcctgcgggagctggccggcaaggaaaacctggaataccctagcgtgaccctgccacctcagcctcacaccaaggagggcgttgatgcctacaacgaagtgatcgcccgggtgcgaatgtgggtgaacctgaacctgtggcagaagctgaagctaagcagagatgatgccaagcctctgctgagactgaagggattcccttcctttcctctggtcgagagacaggccaacgaagtggactggtgggacatggtgtgtaacgtgaagaagctgatcaacgagaaaaaggaggatggcaaggtgttttggcagaatctggctggctacaagagacaggaagccctgagaccatacctgagcagcgaggaagatcggaagaagggaaagaaattcgctcggtaccagctgggcgacctgctgctgcacctggaaaagaagcacggcgaggactggggaaaggtgtacgacgaggcctgggagcggattgacaagaaagtggaaggcctgagcaagcacatcaagctggaagaggaacggagaagcgaggacgcccagagcaaggccgccctgaccgactggctgcgggctaaggccagcttcgtgatcgagggcctgaaggaggccgacaaggacgagttctgcagatgcgagctgaagctgcagaagtggtacggggacctgcggggaaagcccttcgccatcgaagccgagaacagcatcctggacatcagcggcttcagcaagcagtacaactgtgccttcatctggcagaaggacggcgtgaagaagctgaacctgtacctgatcatcaactacttcaagggcggcaagctgcggttcaagaagatcaaacctgaagccttcgaagccaacagattctacaccgtgatcaacaaaaagagcggcgagatcgtgcccatggaggtgaacttcaacttcgacgaccccaacctgatcatcctgcctctggcctttggcaagagacagggcagagaattcatctggaacgacctgctgtccctggaaaccggcagcctgaagctggccaacggaagagtgatcgagaagacactgtacaacagaagaacccggcaggatgagcctgccctgttcgtggccctgaccttcgagcggcgggaggtcctggactcctccaatatcaaaccaatgaacctgatcggcgtggcaagaggcgaaaacatccccgccgtgatcgccctgaccgaccccgagggctgcccactgagccggtttaaggatagcctgggaaacccaacccacatcctgagaatcggcgagagctataaggagaagcagcggaccatccaggccaagaaggaggtggagcagcggagagccggcggctacagccggaagtacgccagcaaagccaagaatctggcagacgatatggtgagaaacaccgctagagatctgctgtactacgccgtgacccaggatgccatgctgatcttcgccaacctgagccggggcttcggccggcagggcaagcggaccttcatggccgagagacagtacacacggatggaggactggctgaccgccaagctggcctacgagggcctgagcaagacctacctgtccaagacactggcccagtacacctccaagacatgcagcaactgtgggtttaccatcaccagcgccgactacgacagggtgctggagaagctgaagaagacagcaacaggctggatgaccacaattaacggcaaggagctgaaggtggagggccagattacctactacaacagatacaagagacagaacgtagtcaaggacctgtccgtcgagctggatagactgagcgaagaatctgtgaacaacgacatctcctcctggacaaagggcagaagcggagaagctctgagcctcctgaagaaaagattctcccatagacccgtgcaggagaagttcgtgtgcctgaactgcggcttcgagacacacgcagccgagcaagccgccctgaacatcgccagatcctggctgttcctgcggagccaggagtacaagaaataccagacaaacaagacaaccggcaacaccgataagagagccttcgtcgagacctggcagtccttttaccggaagaagcttaaggaggtgtggaaacctgccgtgcggtctggcggatctggcggaggctccacaagcgtggtggagcccgtgagcttcgaggaggtggccgtgtacttcagcgaggaggagtgggccctgctggaccccggccagagggccctgtactgggccgtgatgcaggagaactacgaggccgtgagctggctgggcttcagcatccccaagcccgacctgatcacccagctggacaggggcgaggagccctgggtgcccgacctgcagcccagcaagaagctggagatcctgaggggcaccaggaccagccccaagaaaaagagaaaagtctaagctgccttctgcggggcttgccttctggccatgcccttcttctctcccttgcacctgtacctcttggtctttgaataaagcctgagtaggaaggctagcaaaaaaaaaaaaaaaaaaaaaaaaaaaaaaaaaaaaaaaaaaaaaaaaaaaaaaaaaaaaaaaaaaaaaaaaaaaaaaaa

SEQ ID NO: 2784 - RNA, 5419 nt, synthetic construct
  source 1..5419: mol_type = other RNA
aggaaataagagagaaaagaagagtaagaagaaatataagagccaccatggcccctaagaagaagcgtaaagtgagccgggtgaacggcagcggcagcggcggcggcatgaaccacgaccaggagttcgacccccctaaggtgtaccctcccgtccccgccgagaagagaaagcccatccgggtcctgagcctgttcgatggcatcgccaccggtctgctggtgctgaaggacctgggcatccaggtggataggtacattgcctccgaggtgtgcgaggactccatcaccgtgggaatggtgcgtcatcagggcaagatcatgtacgtgggcgacgtgcggagcgtgacacagaagcatatccaggagtggggccctttcgacctggtgatcggcggcagcccttgcaatgacctgagcatcgtgaacccagcccggaagggcctgtacgagggaaccggcagactgttcttcgagttttacagactgctgcacgacgcccggcctaaggaaggcgacgaccggcccttcttttggctgttcgagaatgtggtggccatgggagtcagcgacaagcgggatattagccggttcctggagagcaaccccgtgatgatcgatgccaaggaagtgagcgccgcccaccgggccagatacttctggggcaatctgcctggcatgaacagacccctggccagcaccgtgaacgacaagctggagctgcaggagtgcctggagcacggccggatcgccaagttcagcaaggtgagaaccatcaccacccgaagcaacagcatcaaacaaggcaaggaccagcactttcctgtgttcatgaacgagaaggaggacatcctgtggtgtaccgagatggagagagtgttcgggttcccagtccactacacagatgtcagcaacatgtctagactggccagacagagactgctgggaagaagctggtccgtccctgtgatcagacacctgttcgcccctctgaaggagtacttcgcctgcgtgagcagcggcaacagcaacgccaacagccggggccccagcttctctagcggcctggtgccactgtccctgagagggagccacatgggccccatggagatctacaaaaccgtgagcgcctggaagcggcagcctgtgcgcgtgctgagcctgtttcggaatatcgataaagtcctgaaaagcctgggattcctggagagcggctctggctccggcggtggcaccctgaagtacgtggaggatgtgacaaacgtggtcagacgggatgtggagaagtggggccccttcgatctggtgtacggcagcacccaacccctgggcagctcttgtgaccggtgccctggctggtacatgtttcagttccaccggatcctgcagtacgccctgccgagacaggagtcccagcggccattcttttggattttcatggacaacttgctgctgaccgaggatgaccaggaaactaccactcggttcctgcagaccgaagccgtgaccctgcaggacgtgagaggccgggactaccagaacgccatgcgggtgtggtccaacatccctggactgaaaagcaagcacgcacctctgacccctaaagaagaggagtacctgcaggcccaggtgcggagcagaagcaagctggacgcccctaaggtggatctgctggtgaagaattgcctcctgcccctgagagagtacttcaagtatttcagccagaatagtctgcccctgggcggcccaagcagcggcgcccctcctcccagcggcggcagcccagccggctccccaacctctaccgaggagggcacctctgagtccgccacccccgagagcggccctggcacctccaccgagcccagcgagggcagcgcacccggcagccctgccggcagccccacctccacagaggagggaaccagcaccgagcccagcgaaggcagcgccccaggcaccagcaccgagcctagtgagggcggctctggcggcggcagcgcccaggagattaaacggatcaacaagatcagaagaagacttgtgaaagacagcaacaccaagaaggccggcaagacaggccccatgaaaaccctgctggttagagtgatgacacccgatctgagagagcggctggaaaacctgagaaagaagcctgaaaatatcccccagcccatcagcaatacatctagagccaacctgaataagctgctgaccgattacaccgaaatgaagaaggcgatcctgcatgtgtactgggaagagttccagaaggaccctgtgggcctgatgagccgggtggcccagcctgccagcaagaagatcgatcagaacaagctgaaacctgagatggacgagaagggcaacctgaccaccgccggctttgcctgctctcagtgtggccagcccctgttcgtgtacaagctggagcaggtgtctgagaagggcaaggcttacaccaactacttcggacggtgcaatgtggccgagcacgaaaagctgatcctgctggcccagctgaagcccgagaaggatagcgacgaagccgtgacatatagcctgggaaagtttgggcagagggccctggatttctacagcattcatgtgaccaaggagtccacccaccccgtgaagcccctggcccagatcgccggaaacagatacgcctccggacctgtgggaaaggccctgagcgacgcatgtatgggcacaatcgcctccttcctgtctaagtaccaggacatcatcatcgaacaccagaaggtggtgaagggcaaccagaagagactggagagcctgcgggagctggccggcaaggaaaacctggaataccctagcgtgaccctgccacctcagcctcacaccaaggagggcgttgatgcctacaacgaagtgatcgcccgggtgcgaatgtgggtgaacctgaacctgtggcagaagctgaagctaagcagagatgatgccaagcctctgctgagactgaagggattcccttcctttcctctggtcgagagacaggccaacgaagtggactggtgggacatggtgtgtaacgtgaagaagctgatcaacgagaaaaaggaggatggcaaggtgttttggcagaatctggctggctacaagagacaggaagccctgagaccatacctgagcagcgaggaagatcggaagaagggaaagaaattcgctcggtaccagctgggcgacctgctgctgcacctggaaaagaagcacggcgaggactggggaaaggtgtacgacgaggcctgggagcggattgacaagaaagtggaaggcctgagcaagcacatcaagctggaagaggaacggagaagcgaggacgcccagagcaaggccgccctgaccgactggctgcgggctaaggccagcttcgtgatcgagggcctgaaggaggccgacaaggacgagttctgcagatgcgagctgaagctgcagaagtggtacggggacctgcggggaaagcccttcgccatcgaagccgagaacagcatcctggacatcagcggcttcagcaagcagtacaactgtgccttcatctggcagaaggacggcgtgaagaagctgaacctgtacctgatcatcaactacttcaagggcggcaagctgcggttcaagaagatcaaacctgaagccttcgaagccaacagattctacaccgtgatcaacaaaaagagcggcgagatcgtgcccatggaggtgaacttcaacttcgacgaccccaacctgatcatcctgcctctggcctttggcaagagacagggcagagaattcatctggaacgacctgctgtccctggaaaccggcagcctgaagctggccaacggaagagtgatcgagaagacactgtacaacagaagaacccggcaggatgagcctgccctgttcgtggccctgaccttcgagcggcgggaggtcctggactcctccaatatcaaaccaatgaacctgatcggcgtggcaagaggcgaaaacatccccgccgtgatcgccctgaccgaccccgagggctgcccactgagccggtttaaggatagcctgggaaacccaacccacatcctgagaatcggcgagagctataaggagaagcagcggaccatccaggccaagaaggaggtggagcagcggagagccggcggctacagccggaagtacgccagcaaagccaagaatctggcagacgatatggtgagaaacaccgctagagatctgctgtactacgccgtgacccaggatgccatgctgatcttcgccaacctgagccggggcttcggccggcagggcaagcggaccttcatggccgagagacagtacacacggatggaggactggctgaccgccaagctggcctacgagggcctgagcaagacctacctgtccaagacactggcccagtacacctccaagacatgcagcaactgtgggtttaccatcaccagcgccgactacgacagggtgctggagaagctgaagaagacagcaacaggctggatgaccacaattaacggcaaggagctgaaggtggagggccagattacctactacaacagatacaagagacagaacgtagtcaaggacctgtccgtcgagctggatagactgagcgaagaatctgtgaacaacgacatctcctcctggacaaagggcagaagcggagaagctctgagcctcctgaagaaaagattctcccatagacccgtgcaggagaagttcgtgtgcctgaactgcggcttcgagacacacgcagccgagcaagccgccctgaacatcgccagatcctggctgttcctgcggagccaggagtacaagaaataccagacaaacaagacaaccggcaacaccgataagagagccttcgtcgagacctggcagtccttttaccggaagaagcttaaggaggtgtggaaacctgccgtgcggtctggcggatctggcggaggctccacaagcgcccaggtgcccgtgaccttcgaggaggtggccgtgtacttcacccagggccagggcgccctgctgggccccgcccagagggccctgtacagggacgtgatgagggagaactacgagatggtgaccagcctgggcttccccgtgcccaagcccgacctggtggccaggctggagaggggcgaggagccctgggtgagcgactgcctggccagcgaggagggcggcaccaggaggggcaggggcaccagccccaagaaaaagagaaaagtctaagctgccttctgcggggcttgccttctggccatgcccttcttctctcccttgcacctgtacctcttggtctttgaataaagcctgagtaggaaggctagcaaaaaaaaaaaaaaaaaaaaaaaaaaaaaaaaaaaaaaaaaaaaaaaaaaaaaaaaaaaaaaaaaaaaaaaaaaaaaaaa

SEQ ID NO: 2785 - RNA, 5419 nt, synthetic construct
  source 1..5419: mol_type = other RNA
aggaaataagagagaaaagaagagtaagaagaaatataagagccaccatggcccctaagaagaagcgtaaagtgagccgggtgaacggcagcggcagcggcggcggcatgaaccacgaccaggagttcgacccccctaaggtgtaccctcccgtccccgccgagaagagaaagcccatccgggtcctgagcctgttcgatggcatcgccaccggtctgctggtgctgaaggacctgggcatccaggtggataggtacattgcctccgaggtgtgcgaggactccatcaccgtgggaatggtgcgtcatcagggcaagatcatgtacgtgggcgacgtgcggagcgtgacacagaagcatatccaggagtggggccctttcgacctggtgatcggcggcagcccttgcaatgacctgagcatcgtgaacccagcccggaagggcctgtacgagggaaccggcagactgttcttcgagttttacagactgctgcacgacgcccggcctaaggaaggcgacgaccggcccttcttttggctgttcgagaatgtggtggccatgggagtcagcgacaagcgggatattagccggttcctggagagcaaccccgtgatgatcgatgccaaggaagtgagcgccgcccaccgggccagatacttctggggcaatctgcctggcatgaacagacccctggccagcaccgtgaacgacaagctggagctgcaggagtgcctggagcacggccggatcgccaagttcagcaaggtgagaaccatcaccacccgaagcaacagcatcaaacaaggcaaggaccagcactttcctgtgttcatgaacgagaaggaggacatcctgtggtgtaccgagatggagagagtgttcgggttcccagtccactacacagatgtcagcaacatgtctagactggccagacagagactgctgggaagaagctggtccgtccctgtgatcagacacctgttcgcccctctgaaggagtacttcgcctgcgtgagcagcggcaacagcaacgccaacagccggggccccagcttctctagcggcctggtgccactgtccctgagagggagccacatgggccccatggagatctacaaaaccgtgagcgcctggaagcggcagcctgtgcgcgtgctgagcctgtttcggaatatcgataaagtcctgaaaagcctgggattcctggagagcggctctggctccggcggtggcaccctgaagtacgtggaggatgtgacaaacgtggtcagacgggatgtggagaagtggggccccttcgatctggtgtacggcagcacccaacccctgggcagctcttgtgaccggtgccctggctggtacatgtttcagttccaccggatcctgcagtacgccctgccgagacaggagtcccagcggccattcttttggattttcatggacaacttgctgctgaccgaggatgaccaggaaactaccactcggttcctgcagaccgaagccgtgaccctgcaggacgtgagaggccgggactaccagaacgccatgcgggtgtggtccaacatccctggactgaaaagcaagcacgcacctctgacccctaaagaagaggagtacctgcaggcccaggtgcggagcagaagcaagctggacgcccctaaggtggatctgctggtgaagaattgcctcctgcccctgagagagtacttcaagtatttcagccagaatagtctgcccctgggcggcccaagcagcggcgcccctcctcccagcggcggcagcccagccggctccccaacctctaccgaggagggcacctctgagtccgccacccccgagagcggccctggcacctccaccgagcccagcgagggcagcgcacccggcagccctgccggcagccccacctccacagaggagggaaccagcaccgagcccagcgaaggcagcgccccaggcaccagcaccgagcctagtgagggcggctctggcggcggcagcgcccaggagattaaacggatcaacaagatcagaagaagacttgtgaaagacagcaacaccaagaaggccggcaagacaggccccatgaaaaccctgctggttagagtgatgacacccgatctgagagagcggctggaaaacctgagaaagaagcctgaaaatatcccccagcccatcagcaatacatctagagccaacctgaataagctgctgaccgattacaccgaaatgaagaaggcgatcctgcatgtgtactgggaagagttccagaaggaccctgtgggcctgatgagccgggtggcccagcctgccagcaagaagatcgatcagaacaagctgaaacctgagatggacgagaagggcaacctgaccaccgccggctttgcctgctctcagtgtggccagcccctgttcgtgtacaagctggagcaggtgtctgagaagggcaaggcttacaccaactacttcggacggtgcaatgtggccgagcacgaaaagctgatcctgctggcccagctgaagcccgagaaggatagcgacgaagccgtgacatatagcctgggaaagtttgggcagagggccctggatttctacagcattcatgtgaccaaggagtccacccaccccgtgaagcccctggcccagatcgccggaaacagatacgcctccggacctgtgggaaaggccctgagcgacgcatgtatgggcacaatcgcctccttcctgtctaagtaccaggacatcatcatcgaacaccagaaggtggtgaagggcaaccagaagagactggagagcctgcgggagctggccggcaaggaaaacctggaataccctagcgtgaccctgccacctcagcctcacaccaaggagggcgttgatgcctacaacgaagtgatcgcccgggtgcgaatgtgggtgaacctgaacctgtggcagaagctgaagctaagcagagatgatgccaagcctctgctgagactgaagggattcccttcctttcctctggtcgagagacaggccaacgaagtggactggtgggacatggtgtgtaacgtgaagaagctgatcaacgagaaaaaggaggatggcaaggtgttttggcagaatctggctggctacaagagacaggaagccctgagaccatacctgagcagcgaggaagatcggaagaagggaaagaaattcgctcggtaccagctgggcgacctgctgctgcacctggaaaagaagcacggcgaggactggggaaaggtgtacgacgaggcctgggagcggattgacaagaaagtggaaggcctgagcaagcacatcaagctggaagaggaacggagaagcgaggacgcccagagcaaggccgccctgaccgactggctgcgggctaaggccagcttcgtgatcgagggcctgaaggaggccgacaaggacgagttctgcagatgcgagctgaagctgcagaagtggtacggggacctgcggggaaagcccttcgccatcgaagccgagaacagcatcctggacatcagcggcttcagcaagcagtacaactgtgccttcatctggcagaaggacggcgtgaagaagctgaacctgtacctgatcatcaactacttcaagggcggcaagctgcggttcaagaagatcaaacctgaagccttcgaagccaacagattctacaccgtgatcaacaaaaagagcggcgagatcgtgcccatggaggtgaacttcaacttcgacgaccccaacctgatcatcctgcctctggcctttggcaagagacagggcagagaattcatctggaacgacctgctgtccctggaaaccggcagcctgaagctggccaacggaagagtgatcgagaagacactgtacaacagaagaacccggcaggatgagcctgccctgttcgtggccctgaccttcgagcggcgggaggtcctggactcctccaatatcaaaccaatgaacctgatcggcgtggcaagaggcgaaaacatccccgccgtgatcgccctgaccgaccccgagggctgcccactgagccggtttaaggatagcctgggaaacccaacccacatcctgagaatcggcgagagctataaggagaagcagcggaccatccaggccaagaaggaggtggagcagcggagagccggcggctacagccggaagtacgccagcaaagccaagaatctggcagacgatatggtgagaaacaccgctagagatctgctgtactacgccgtgacccaggatgccatgctgatcttcgccaacctgagccggggcttcggccggcagggcaagcggaccttcatggccgagagacagtacacacggatggaggactggctgaccgccaagctggcctacgagggcctgagcaagacctacctgtccaagacactggcccagtacacctccaagacatgcagcaactgtgggtttaccatcaccagcgccgactacgacagggtgctggagaagctgaagaagacagcaacaggctggatgaccacaattaacggcaaggagctgaaggtggagggccagattacctactacaacagatacaagagacagaacgtagtcaaggacctgtccgtcgagctggatagactgagcgaagaatctgtgaacaacgacatctcctcctggacaaagggcagaagcggagaagctctgagcctcctgaagaaaagattctcccatagacccgtgcaggagaagttcgtgtgcctgaactgcggcttcgagacacacgcagccgagcaagccgccctgaacatcgccagatcctggctgttcctgcggagccaggagtacaagaaataccagacaaacaagacaaccggcaacaccgataagagagccttcgtcgagacctggcagtccttttaccggaagaagcttaaggaggtgtggaaacctgccgtgcggtctggcggatctggcggaggctccacaagcttccagatgcccgtgaccttcgaggaggtggccgtgtacttcacccagggccagggcgccctgctggaccccgcccagagggccctgtacagggacgtgatgcaggacaactacgagatggtgaccagcctgggcttccccatccccaagcccgagctgatcgccaggctggagaggggcgaggagccctgggtgcccgacctgcaggcctgcgaggagaggaggctgcccaggtgcaccaggaccagccccaagaaaaagagaaaagtctaagctgccttctgcggggcttgccttctggccatgcccttcttctctcccttgcacctgtacctcttggtctttgaataaagcctgagtaggaaggctagcaaaaaaaaaaaaaaaaaaaaaaaaaaaaaaaaaaaaaaaaaaaaaaaaaaaaaaaaaaaaaaaaaaaaaaaaaaaaaaaa

SEQ ID NO: 2786 - RNA, 5419 nt, synthetic construct
  source 1..5419: mol_type = other RNA
aggaaataagagagaaaagaagagtaagaagaaatataagagccaccatggcccctaagaagaagcgtaaagtgagccgggtgaacggcagcggcagcggcggcggcatgaaccacgaccaggagttcgacccccctaaggtgtaccctcccgtccccgccgagaagagaaagcccatccgggtcctgagcctgttcgatggcatcgccaccggtctgctggtgctgaaggacctgggcatccaggtggataggtacattgcctccgaggtgtgcgaggactccatcaccgtgggaatggtgcgtcatcagggcaagatcatgtacgtgggcgacgtgcggagcgtgacacagaagcatatccaggagtggggccctttcgacctggtgatcggcggcagcccttgcaatgacctgagcatcgtgaacccagcccggaagggcctgtacgagggaaccggcagactgttcttcgagttttacagactgctgcacgacgcccggcctaaggaaggcgacgaccggcccttcttttggctgttcgagaatgtggtggccatgggagtcagcgacaagcgggatattagccggttcctggagagcaaccccgtgatgatcgatgccaaggaagtgagcgccgcccaccgggccagatacttctggggcaatctgcctggcatgaacagacccctggccagcaccgtgaacgacaagctggagctgcaggagtgcctggagcacggccggatcgccaagttcagcaaggtgagaaccatcaccacccgaagcaacagcatcaaacaaggcaaggaccagcactttcctgtgttcatgaacgagaaggaggacatcctgtggtgtaccgagatggagagagtgttcgggttcccagtccactacacagatgtcagcaacatgtctagactggccagacagagactgctgggaagaagctggtccgtccctgtgatcagacacctgttcgcccctctgaaggagtacttcgcctgcgtgagcagcggcaacagcaacgccaacagccggggccccagcttctctagcggcctggtgccactgtccctgagagggagccacatgggccccatggagatctacaaaaccgtgagcgcctggaagcggcagcctgtgcgcgtgctgagcctgtttcggaatatcgataaagtcctgaaaagcctgggattcctggagagcggctctggctccggcggtggcaccctgaagtacgtggaggatgtgacaaacgtggtcagacgggatgtggagaagtggggccccttcgatctggtgtacggcagcacccaacccctgggcagctcttgtgaccggtgccctggctggtacatgtttcagttccaccggatcctgcagtacgccctgccgagacaggagtcccagcggccattcttttggattttcatggacaacttgctgctgaccgaggatgaccaggaaactaccactcggttcctgcagaccgaagccgtgaccctgcaggacgtgagaggccgggactaccagaacgccatgcgggtgtggtccaacatccctggactgaaaagcaagcacgcacctctgacccctaaagaagaggagtacctgcaggcccaggtgcggagcagaagcaagctggacgcccctaaggtggatctgctggtgaagaattgcctcctgcccctgagagagtacttcaagtatttcagccagaatagtctgcccctgggcggcccaagcagcggcgcccctcctcccagcggcggcagcccagccggctccccaacctctaccgaggagggcacctctgagtccgccacccccgagagcggccctggcacctccaccgagcccagcgagggcagcgcacccggcagccctgccggcagccccacctccacagaggagggaaccagcaccgagcccagcgaaggcagcgccccaggcaccagcaccgagcctagtgagggcggctctggcggcggcagcgcccaggagattaaacggatcaacaagatcagaagaagacttgtgaaagacagcaacaccaagaaggccggcaagacaggccccatgaaaaccctgctggttagagtgatgacacccgatctgagagagcggctggaaaacctgagaaagaagcctgaaaatatcccccagcccatcagcaatacatctagagccaacctgaataagctgctgaccgattacaccgaaatgaagaaggcgatcctgcatgtgtactgggaagagttccagaaggaccctgtgggcctgatgagccgggtggcccagcctgccagcaagaagatcgatcagaacaagctgaaacctgagatggacgagaagggcaacctgaccaccgccggctttgcctgctctcagtgtggccagcccctgttcgtgtacaagctggagcaggtgtctgagaagggcaaggcttacaccaactacttcggacggtgcaatgtggccgagcacgaaaagctgatcctgctggcccagctgaagcccgagaaggatagcgacgaagccgtgacatatagcctgggaaagtttgggcagagggccctggatttctacagcattcatgtgaccaaggagtccacccaccccgtgaagcccctggcccagatcgccggaaacagatacgcctccggacctgtgggaaaggccctgagcgacgcatgtatgggcacaatcgcctccttcctgtctaagtaccaggacatcatcatcgaacaccagaaggtggtgaagggcaaccagaagagactggagagcctgcgggagctggccggcaaggaaaacctggaataccctagcgtgaccctgccacctcagcctcacaccaaggagggcgttgatgcctacaacgaagtgatcgcccgggtgcgaatgtgggtgaacctgaacctgtggcagaagctgaagctaagcagagatgatgccaagcctctgctgagactgaagggattcccttcctttcctctggtcgagagacaggccaacgaagtggactggtgggacatggtgtgtaacgtgaagaagctgatcaacgagaaaaaggaggatggcaaggtgttttggcagaatctggctggctacaagagacaggaagccctgagaccatacctgagcagcgaggaagatcggaagaagggaaagaaattcgctcggtaccagctgggcgacctgctgctgcacctggaaaagaagcacggcgaggactggggaaaggtgtacgacgaggcctgggagcggattgacaagaaagtggaaggcctgagcaagcacatcaagctggaagaggaacggagaagcgaggacgcccagagcaaggccgccctgaccgactggctgcgggctaaggccagcttcgtgatcgagggcctgaaggaggccgacaaggacgagttctgcagatgcgagctgaagctgcagaagtggtacggggacctgcggggaaagcccttcgccatcgaagccgagaacagcatcctggacatcagcggcttcagcaagcagtacaactgtgccttcatctggcagaaggacggcgtgaagaagctgaacctgtacctgatcatcaactacttcaagggcggcaagctgcggttcaagaagatcaaacctgaagccttcgaagccaacagattctacaccgtgatcaacaaaaagagcggcgagatcgtgcccatggaggtgaacttcaacttcgacgaccccaacctgatcatcctgcctctggcctttggcaagagacagggcagagaattcatctggaacgacctgctgtccctggaaaccggcagcctgaagctggccaacggaagagtgatcgagaagacactgtacaacagaagaacccggcaggatgagcctgccctgttcgtggccctgaccttcgagcggcgggaggtcctggactcctccaatatcaaaccaatgaacctgatcggcgtggcaagaggcgaaaacatccccgccgtgatcgccctgaccgaccccgagggctgcccactgagccggtttaaggatagcctgggaaacccaacccacatcctgagaatcggcgagagctataaggagaagcagcggaccatccaggccaagaaggaggtggagcagcggagagccggcggctacagccggaagtacgccagcaaagccaagaatctggcagacgatatggtgagaaacaccgctagagatctgctgtactacgccgtgacccaggatgccatgctgatcttcgccaacctgagccggggcttcggccggcagggcaagcggaccttcatggccgagagacagtacacacggatggaggactggctgaccgccaagctggcctacgagggcctgagcaagacctacctgtccaagacactggcccagtacacctccaagacatgcagcaactgtgggtttaccatcaccagcgccgactacgacagggtgctggagaagctgaagaagacagcaacaggctggatgaccacaattaacggcaaggagctgaaggtggagggccagattacctactacaacagatacaagagacagaacgtagtcaaggacctgtccgtcgagctggatagactgagcgaagaatctgtgaacaacgacatctcctcctggacaaagggcagaagcggagaagctctgagcctcctgaagaaaagattctcccatagacccgtgcaggagaagttcgtgtgcctgaactgcggcttcgagacacacgcagccgagcaagccgccctgaacatcgccagatcctggctgttcctgcggagccaggagtacaagaaataccagacaaacaagacaaccggcaacaccgataagagagccttcgtcgagacctggcagtccttttaccggaagaagcttaaggaggtgtggaaacctgccgtgcggtctggcggatctggcggaggctccacaagctgcggcatgttccaggtgagcgtggccttcgaggacgtggccgtgaccttcacccaggaggagtgggccctgctggaccccagccagaagaccctgtacagggacgtgatgcaggagaacttcaggaacctggccagcgtgggcaagaagtggaaggcccagaacatctacgtggagtacaagaacctgaggaggaacctgaggaacctgaggggcaagaggctgttcgagagcaaggaggacaccagccccaagaaaaagagaaaagtctaagctgccttctgcggggcttgccttctggccatgcccttcttctctcccttgcacctgtacctcttggtctttgaataaagcctgagtaggaaggctagcaaaaaaaaaaaaaaaaaaaaaaaaaaaaaaaaaaaaaaaaaaaaaaaaaaaaaaaaaaaaaaaaaaaaaaaaaaaaaaaa

SEQ ID NO: 2787 - RNA, 5419 nt, synthetic construct
  source 1..5419: mol_type = other RNA
aggaaataagagagaaaagaagagtaagaagaaatataagagccaccatggcccctaagaagaagcgtaaagtgagccgggtgaacggcagcggcagcggcggcggcatgaaccacgaccaggagttcgacccccctaaggtgtaccctcccgtccccgccgagaagagaaagcccatccgggtcctgagcctgttcgatggcatcgccaccggtctgctggtgctgaaggacctgggcatccaggtggataggtacattgcctccgaggtgtgcgaggactccatcaccgtgggaatggtgcgtcatcagggcaagatcatgtacgtgggcgacgtgcggagcgtgacacagaagcatatccaggagtggggccctttcgacctggtgatcggcggcagcccttgcaatgacctgagcatcgtgaacccagcccggaagggcctgtacgagggaaccggcagactgttcttcgagttttacagactgctgcacgacgcccggcctaaggaaggcgacgaccggcccttcttttggctgttcgagaatgtggtggccatgggagtcagcgacaagcgggatattagccggttcctggagagcaaccccgtgatgatcgatgccaaggaagtgagcgccgcccaccgggccagatacttctggggcaatctgcctggcatgaacagacccctggccagcaccgtgaacgacaagctggagctgcaggagtgcctggagcacggccggatcgccaagttcagcaaggtgagaaccatcaccacccgaagcaacagcatcaaacaaggcaaggaccagcactttcctgtgttcatgaacgagaaggaggacatcctgtggtgtaccgagatggagagagtgttcgggttcccagtccactacacagatgtcagcaacatgtctagactggccagacagagactgctgggaagaagctggtccgtccctgtgatcagacacctgttcgcccctctgaaggagtacttcgcctgcgtgagcagcggcaacagcaacgccaacagccggggccccagcttctctagcggcctggtgccactgtccctgagagggagccacatgggccccatggagatctacaaaaccgtgagcgcctggaagcggcagcctgtgcgcgtgctgagcctgtttcggaatatcgataaagtcctgaaaagcctgggattcctggagagcggctctggctccggcggtggcaccctgaagtacgtggaggatgtgacaaacgtggtcagacgggatgtggagaagtggggccccttcgatctggtgtacggcagcacccaacccctgggcagctcttgtgaccggtgccctggctggtacatgtttcagttccaccggatcctgcagtacgccctgccgagacaggagtcccagcggccattcttttggattttcatggacaacttgctgctgaccgaggatgaccaggaaactaccactcggttcctgcagaccgaagccgtgaccctgcaggacgtgagaggccgggactaccagaacgccatgcgggtgtggtccaacatccctggactgaaaagcaagcacgcacctctgacccctaaagaagaggagtacctgcaggcccaggtgcggagcagaagcaagctggacgcccctaaggtggatctgctggtgaagaattgcctcctgcccctgagagagtacttcaagtatttcagccagaatagtctgcccctgggcggcccaagcagcggcgcccctcctcccagcggcggcagcccagccggctccccaacctctaccgaggagggcacctctgagtccgccacccccgagagcggccctggcacctccaccgagcccagcgagggcagcgcacccggcagccctgccggcagccccacctccacagaggagggaaccagcaccgagcccagcgaaggcagcgccccaggcaccagcaccgagcctagtgagggcggctctggcggcggcagcgcccaggagattaaacggatcaacaagatcagaagaagacttgtgaaagacagcaacaccaagaaggccggcaagacaggccccatgaaaaccctgctggttagagtgatgacacccgatctgagagagcggctggaaaacctgagaaagaagcctgaaaatatcccccagcccatcagcaatacatctagagccaacctgaataagctgctgaccgattacaccgaaatgaagaaggcgatcctgcatgtgtactgggaagagttccagaaggaccctgtgggcctgatgagccgggtggcccagcctgccagcaagaagatcgatcagaacaagctgaaacctgagatggacgagaagggcaacctgaccaccgccggctttgcctgctctcagtgtggccagcccctgttcgtgtacaagctggagcaggtgtctgagaagggcaaggcttacaccaactacttcggacggtgcaatgtggccgagcacgaaaagctgatcctgctggcccagctgaagcccgagaaggatagcgacgaagccgtgacatatagcctgggaaagtttgggcagagggccctggatttctacagcattcatgtgaccaaggagtccacccaccccgtgaagcccctggcccagatcgccggaaacagatacgcctccggacctgtgggaaaggccctgagcgacgcatgtatgggcacaatcgcctccttcctgtctaagtaccaggacatcatcatcgaacaccagaaggtggtgaagggcaaccagaagagactggagagcctgcgggagctggccggcaaggaaaacctggaataccctagcgtgaccctgccacctcagcctcacaccaaggagggcgttgatgcctacaacgaagtgatcgcccgggtgcgaatgtgggtgaacctgaacctgtggcagaagctgaagctaagcagagatgatgccaagcctctgctgagactgaagggattcccttcctttcctctggtcgagagacaggccaacgaagtggactggtgggacatggtgtgtaacgtgaagaagctgatcaacgagaaaaaggaggatggcaaggtgttttggcagaatctggctggctacaagagacaggaagccctgagaccatacctgagcagcgaggaagatcggaagaagggaaagaaattcgctcggtaccagctgggcgacctgctgctgcacctggaaaagaagcacggcgaggactggggaaaggtgtacgacgaggcctgggagcggattgacaagaaagtggaaggcctgagcaagcacatcaagctggaagaggaacggagaagcgaggacgcccagagcaaggccgccctgaccgactggctgcgggctaaggccagcttcgtgatcgagggcctgaaggaggccgacaaggacgagttctgcagatgcgagctgaagctgcagaagtggtacggggacctgcggggaaagcccttcgccatcgaagccgagaacagcatcctggacatcagcggcttcagcaagcagtacaactgtgccttcatctggcagaaggacggcgtgaagaagctgaacctgtacctgatcatcaactacttcaagggcggcaagctgcggttcaagaagatcaaacctgaagccttcgaagccaacagattctacaccgtgatcaacaaaaagagcggcgagatcgtgcccatggaggtgaacttcaacttcgacgaccccaacctgatcatcctgcctctggcctttggcaagagacagggcagagaattcatctggaacgacctgctgtccctggaaaccggcagcctgaagctggccaacggaagagtgatcgagaagacactgtacaacagaagaacccggcaggatgagcctgccctgttcgtggccctgaccttcgagcggcgggaggtcctggactcctccaatatcaaaccaatgaacctgatcggcgtggcaagaggcgaaaacatccccgccgtgatcgccctgaccgaccccgagggctgcccactgagccggtttaaggatagcctgggaaacccaacccacatcctgagaatcggcgagagctataaggagaagcagcggaccatccaggccaagaaggaggtggagcagcggagagccggcggctacagccggaagtacgccagcaaagccaagaatctggcagacgatatggtgagaaacaccgctagagatctgctgtactacgccgtgacccaggatgccatgctgatcttcgccaacctgagccggggcttcggccggcagggcaagcggaccttcatggccgagagacagtacacacggatggaggactggctgaccgccaagctggcctacgagggcctgagcaagacctacctgtccaagacactggcccagtacacctccaagacatgcagcaactgtgggtttaccatcaccagcgccgactacgacagggtgctggagaagctgaagaagacagcaacaggctggatgaccacaattaacggcaaggagctgaaggtggagggccagattacctactacaacagatacaagagacagaacgtagtcaaggacctgtccgtcgagctggatagactgagcgaagaatctgtgaacaacgacatctcctcctggacaaagggcagaagcggagaagctctgagcctcctgaagaaaagattctcccatagacccgtgcaggagaagttcgtgtgcctgaactgcggcttcgagacacacgcagccgagcaagccgccctgaacatcgccagatcctggctgttcctgcggagccaggagtacaagaaataccagacaaacaagacaaccggcaacaccgataagagagccttcgtcgagacctggcagtccttttaccggaagaagcttaaggaggtgtggaaacctgccgtgcggtctggcggatctggcggaggctccacaagcatggccttcgaggacgtggccgtgtacttcagccaggaggagtggggcctgctggacaccgcccagagggccctgtacaggcacgtgatgctggagaacttcaccctggtgaccagcctgggcctgagcaccagcaggccccacgtggtgatccagctggagaggggcgaggagccctgggtgcccagcggcaaggacatgaccctggccaggaacacctacaggaggctgaacgccggcagcaccagccccaagaaaaagagaaaagtctaagctgccttctgcggggcttgccttctggccatgcccttcttctctcccttgcacctgtacctcttggtctttgaataaagcctgagtaggaaggctagcaaaaaaaaaaaaaaaaaaaaaaaaaaaaaaaaaaaaaaaaaaaaaaaaaaaaaaaaaaaaaaaaaaaaaaaaaaaaaaaa

SEQ ID NO: 2788 - RNA, 5419 nt, synthetic construct
  source 1..5419: mol_type = other RNA
aggaaataagagagaaaagaagagtaagaagaaatataagagccaccatggcccctaagaagaagcgtaaagtgagccgggtgaacggcagcggcagcggcggcggcatgaaccacgaccaggagttcgacccccctaaggtgtaccctcccgtccccgccgagaagagaaagcccatccgggtcctgagcctgttcgatggcatcgccaccggtctgctggtgctgaaggacctgggcatccaggtggataggtacattgcctccgaggtgtgcgaggactccatcaccgtgggaatggtgcgtcatcagggcaagatcatgtacgtgggcgacgtgcggagcgtgacacagaagcatatccaggagtggggccctttcgacctggtgatcggcggcagcccttgcaatgacctgagcatcgtgaacccagcccggaagggcctgtacgagggaaccggcagactgttcttcgagttttacagactgctgcacgacgcccggcctaaggaaggcgacgaccggcccttcttttggctgttcgagaatgtggtggccatgggagtcagcgacaagcgggatattagccggttcctggagagcaaccccgtgatgatcgatgccaaggaagtgagcgccgcccaccgggccagatacttctggggcaatctgcctggcatgaacagacccctggccagcaccgtgaacgacaagctggagctgcaggagtgcctggagcacggccggatcgccaagttcagcaaggtgagaaccatcaccacccgaagcaacagcatcaaacaaggcaaggaccagcactttcctgtgttcatgaacgagaaggaggacatcctgtggtgtaccgagatggagagagtgttcgggttcccagtccactacacagatgtcagcaacatgtctagactggccagacagagactgctgggaagaagctggtccgtccctgtgatcagacacctgttcgcccctctgaaggagtacttcgcctgcgtgagcagcggcaacagcaacgccaacagccggggccccagcttctctagcggcctggtgccactgtccctgagagggagccacatgggccccatggagatctacaaaaccgtgagcgcctggaagcggcagcctgtgcgcgtgctgagcctgtttcggaatatcgataaagtcctgaaaagcctgggattcctggagagcggctctggctccggcggtggcaccctgaagtacgtggaggatgtgacaaacgtggtcagacgggatgtggagaagtggggccccttcgatctggtgtacggcagcacccaacccctgggcagctcttgtgaccggtgccctggctggtacatgtttcagttccaccggatcctgcagtacgccctgccgagacaggagtcccagcggccattcttttggattttcatggacaacttgctgctgaccgaggatgaccaggaaactaccactcggttcctgcagaccgaagccgtgaccctgcaggacgtgagaggccgggactaccagaacgccatgcgggtgtggtccaacatccctggactgaaaagcaagcacgcacctctgacccctaaagaagaggagtacctgcaggcccaggtgcggagcagaagcaagctggacgcccctaaggtggatctgctggtgaagaattgcctcctgcccctgagagagtacttcaagtatttcagccagaatagtctgcccctgggcggcccaagcagcggcgcccctcctcccagcggcggcagcccagccggctccccaacctctaccgaggagggcacctctgagtccgccacccccgagagcggccctggcacctccaccgagcccagcgagggcagcgcacccggcagccctgccggcagccccacctccacagaggagggaaccagcaccgagcccagcgaaggcagcgccccaggcaccagcaccgagcctagtgagggcggctctggcggcggcagcgcccaggagattaaacggatcaacaagatcagaagaagacttgtgaaagacagcaacaccaagaaggccggcaagacaggccccatgaaaaccctgctggttagagtgatgacacccgatctgagagagcggctggaaaacctgagaaagaagcctgaaaatatcccccagcccatcagcaatacatctagagccaacctgaataagctgctgaccgattacaccgaaatgaagaaggcgatcctgcatgtgtactgggaagagttccagaaggaccctgtgggcctgatgagccgggtggcccagcctgccagcaagaagatcgatcagaacaagctgaaacctgagatggacgagaagggcaacctgaccaccgccggctttgcctgctctcagtgtggccagcccctgttcgtgtacaagctggagcaggtgtctgagaagggcaaggcttacaccaactacttcggacggtgcaatgtggccgagcacgaaaagctgatcctgctggcccagctgaagcccgagaaggatagcgacgaagccgtgacatatagcctgggaaagtttgggcagagggccctggatttctacagcattcatgtgaccaaggagtccacccaccccgtgaagcccctggcccagatcgccggaaacagatacgcctccggacctgtgggaaaggccctgagcgacgcatgtatgggcacaatcgcctccttcctgtctaagtaccaggacatcatcatcgaacaccagaaggtggtgaagggcaaccagaagagactggagagcctgcgggagctggccggcaaggaaaacctggaataccctagcgtgaccctgccacctcagcctcacaccaaggagggcgttgatgcctacaacgaagtgatcgcccgggtgcgaatgtgggtgaacctgaacctgtggcagaagctgaagctaagcagagatgatgccaagcctctgctgagactgaagggattcccttcctttcctctggtcgagagacaggccaacgaagtggactggtgggacatggtgtgtaacgtgaagaagctgatcaacgagaaaaaggaggatggcaaggtgttttggcagaatctggctggctacaagagacaggaagccctgagaccatacctgagcagcgaggaagatcggaagaagggaaagaaattcgctcggtaccagctgggcgacctgctgctgcacctggaaaagaagcacggcgaggactggggaaaggtgtacgacgaggcctgggagcggattgacaagaaagtggaaggcctgagcaagcacatcaagctggaagaggaacggagaagcgaggacgcccagagcaaggccgccctgaccgactggctgcgggctaaggccagcttcgtgatcgagggcctgaaggaggccgacaaggacgagttctgcagatgcgagctgaagctgcagaagtggtacggggacctgcggggaaagcccttcgccatcgaagccgagaacagcatcctggacatcagcggcttcagcaagcagtacaactgtgccttcatctggcagaaggacggcgtgaagaagctgaacctgtacctgatcatcaactacttcaagggcggcaagctgcggttcaagaagatcaaacctgaagccttcgaagccaacagattctacaccgtgatcaacaaaaagagcggcgagatcgtgcccatggaggtgaacttcaacttcgacgaccccaacctgatcatcctgcctctggcctttggcaagagacagggcagagaattcatctggaacgacctgctgtccctggaaaccggcagcctgaagctggccaacggaagagtgatcgagaagacactgtacaacagaagaacccggcaggatgagcctgccctgttcgtggccctgaccttcgagcggcgggaggtcctggactcctccaatatcaaaccaatgaacctgatcggcgtggcaagaggcgaaaacatccccgccgtgatcgccctgaccgaccccgagggctgcccactgagccggtttaaggatagcctgggaaacccaacccacatcctgagaatcggcgagagctataaggagaagcagcggaccatccaggccaagaaggaggtggagcagcggagagccggcggctacagccggaagtacgccagcaaagccaagaatctggcagacgatatggtgagaaacaccgctagagatctgctgtactacgccgtgacccaggatgccatgctgatcttcgccaacctgagccggggcttcggccggcagggcaagcggaccttcatggccgagagacagtacacacggatggaggactggctgaccgccaagctggcctacgagggcctgagcaagacctacctgtccaagacactggcccagtacacctccaagacatgcagcaactgtgggtttaccatcaccagcgccgactacgacagggtgctggagaagctgaagaagacagcaacaggctggatgaccacaattaacggcaaggagctgaaggtggagggccagattacctactacaacagatacaagagacagaacgtagtcaaggacctgtccgtcgagctggatagactgagcgaagaatctgtgaacaacgacatctcctcctggacaaagggcagaagcggagaagctctgagcctcctgaagaaaagattctcccatagacccgtgcaggagaagttcgtgtgcctgaactgcggcttcgagacacacgcagccgagcaagccgccctgaacatcgccagatcctggctgttcctgcggagccaggagtacaagaaataccagacaaacaagacaaccggcaacaccgataagagagccttcgtcgagacctggcagtccttttaccggaagaagcttaaggaggtgtggaaacctgccgtgcggtctggcggatctggcggaggctccacaagcaggagcgaggccctgagcttcgccgacgtgagcgtgagcttcagcagggaggagtggggctgcctgaggcccgcccagaaggccctgtacagggacgtgatgagggagacctgcggcctgctgggcgccctgggcctgagcggccccaagcccgccttcatcagctggctggagggcgagatggaggcctggagccccgaggcccacgagcccgagagggagagcagggccgccgacgccaggaccagccccaagaaaaagagaaaagtctaagctgccttctgcggggcttgccttctggccatgcccttcttctctcccttgcacctgtacctcttggtctttgaataaagcctgagtaggaaggctagcaaaaaaaaaaaaaaaaaaaaaaaaaaaaaaaaaaaaaaaaaaaaaaaaaaaaaaaaaaaaaaaaaaaaaaaaaaaaaaaa

SEQ ID NO: 2789 - RNA, 5437 nt, synthetic construct
  source 1..5437: mol_type = other RNA
aggaaataagagagaaaagaagagtaagaagaaatataagagccaccatggcccctaagaagaagcgtaaagtgagccgggtgaacggcagcggcagcggcggcggcatgaaccacgaccaggagttcgacccccctaaggtgtaccctcccgtccccgccgagaagagaaagcccatccgggtcctgagcctgttcgatggcatcgccaccggtctgctggtgctgaaggacctgggcatccaggtggataggtacattgcctccgaggtgtgcgaggactccatcaccgtgggaatggtgcgtcatcagggcaagatcatgtacgtgggcgacgtgcggagcgtgacacagaagcatatccaggagtggggccctttcgacctggtgatcggcggcagcccttgcaatgacctgagcatcgtgaacccagcccggaagggcctgtacgagggaaccggcagactgttcttcgagttttacagactgctgcacgacgcccggcctaaggaaggcgacgaccggcccttcttttggctgttcgagaatgtggtggccatgggagtcagcgacaagcgggatattagccggttcctggagagcaaccccgtgatgatcgatgccaaggaagtgagcgccgcccaccgggccagatacttctggggcaatctgcctggcatgaacagacccctggccagcaccgtgaacgacaagctggagctgcaggagtgcctggagcacggccggatcgccaagttcagcaaggtgagaaccatcaccacccgaagcaacagcatcaaacaaggcaaggaccagcactttcctgtgttcatgaacgagaaggaggacatcctgtggtgtaccgagatggagagagtgttcgggttcccagtccactacacagatgtcagcaacatgtctagactggccagacagagactgctgggaagaagctggtccgtccctgtgatcagacacctgttcgcccctctgaaggagtacttcgcctgcgtgagcagcggcaacagcaacgccaacagccggggccccagcttctctagcggcctggtgccactgtccctgagagggagccacatgggccccatggagatctacaaaaccgtgagcgcctggaagcggcagcctgtgcgcgtgctgagcctgtttcggaatatcgataaagtcctgaaaagcctgggattcctggagagcggctctggctccggcggtggcaccctgaagtacgtggaggatgtgacaaacgtggtcagacgggatgtggagaagtggggccccttcgatctggtgtacggcagcacccaacccctgggcagctcttgtgaccggtgccctggctggtacatgtttcagttccaccggatcctgcagtacgccctgccgagacaggagtcccagcggccattcttttggattttcatggacaacttgctgctgaccgaggatgaccaggaaactaccactcggttcctgcagaccgaagccgtgaccctgcaggacgtgagaggccgggactaccagaacgccatgcgggtgtggtccaacatccctggactgaaaagcaagcacgcacctctgacccctaaagaagaggagtacctgcaggcccaggtgcggagcagaagcaagctggacgcccctaaggtggatctgctggtgaagaattgcctcctgcccctgagagagtacttcaagtatttcagccagaatagtctgcccctgggcggcccaagcagcggcgcccctcctcccagcggcggcagcccagccggctccccaacctctaccgaggagggcacctctgagtccgccacccccgagagcggccctggcacctccaccgagcccagcgagggcagcgcacccggcagccctgccggcagccccacctccacagaggagggaaccagcaccgagcccagcgaaggcagcgccccaggcaccagcaccgagcctagtgagggcggctctggcggcggcagcgcccaggagattaaacggatcaacaagatcagaagaagacttgtgaaagacagcaacaccaagaaggccggcaagacaggccccatgaaaaccctgctggttagagtgatgacacccgatctgagagagcggctggaaaacctgagaaagaagcctgaaaatatcccccagcccatcagcaatacatctagagccaacctgaataagctgctgaccgattacaccgaaatgaagaaggcgatcctgcatgtgtactgggaagagttccagaaggaccctgtgggcctgatgagccgggtggcccagcctgccagcaagaagatcgatcagaacaagctgaaacctgagatggacgagaagggcaacctgaccaccgccggctttgcctgctctcagtgtggccagcccctgttcgtgtacaagctggagcaggtgtctgagaagggcaaggcttacaccaactacttcggacggtgcaatgtggccgagcacgaaaagctgatcctgctggcccagctgaagcccgagaaggatagcgacgaagccgtgacatatagcctgggaaagtttgggcagagggccctggatttctacagcattcatgtgaccaaggagtccacccaccccgtgaagcccctggcccagatcgccggaaacagatacgcctccggacctgtgggaaaggccctgagcgacgcatgtatgggcacaatcgcctccttcctgtctaagtaccaggacatcatcatcgaacaccagaaggtggtgaagggcaaccagaagagactggagagcctgcgggagctggccggcaaggaaaacctggaataccctagcgtgaccctgccacctcagcctcacaccaaggagggcgttgatgcctacaacgaagtgatcgcccgggtgcgaatgtgggtgaacctgaacctgtggcagaagctgaagctaagcagagatgatgccaagcctctgctgagactgaagggattcccttcctttcctctggtcgagagacaggccaacgaagtggactggtgggacatggtgtgtaacgtgaagaagctgatcaacgagaaaaaggaggatggcaaggtgttttggcagaatctggctggctacaagagacaggaagccctgagaccatacctgagcagcgaggaagatcggaagaagggaaagaaattcgctcggtaccagctgggcgacctgctgctgcacctggaaaagaagcacggcgaggactggggaaaggtgtacgacgaggcctgggagcggattgacaagaaagtggaaggcctgagcaagcacatcaagctggaagaggaacggagaagcgaggacgcccagagcaaggccgccctgaccgactggctgcgggctaaggccagcttcgtgatcgagggcctgaaggaggccgacaaggacgagttctgcagatgcgagctgaagctgcagaagtggtacggggacctgcggggaaagcccttcgccatcgaagccgagaacagcatcctggacatcagcggcttcagcaagcagtacaactgtgccttcatctggcagaaggacggcgtgaagaagctgaacctgtacctgatcatcaactacttcaagggcggcaagctgcggttcaagaagatcaaacctgaagccttcgaagccaacagattctacaccgtgatcaacaaaaagagcggcgagatcgtgcccatggaggtgaacttcaacttcgacgaccccaacctgatcatcctgcctctggcctttggcaagagacagggcagagaattcatctggaacgacctgctgtccctggaaaccggcagcctgaagctggccaacggaagagtgatcgagaagacactgtacaacagaagaacccggcaggatgagcctgccctgttcgtggccctgaccttcgagcggcgggaggtcctggactcctccaatatcaaaccaatgaacctgatcggcgtggcaagaggcgaaaacatccccgccgtgatcgccctgaccgaccccgagggctgcccactgagccggtttaaggatagcctgggaaacccaacccacatcctgagaatcggcgagagctataaggagaagcagcggaccatccaggccaagaaggaggtggagcagcggagagccggcggctacagccggaagtacgccagcaaagccaagaatctggcagacgatatggtgagaaacaccgctagagatctgctgtactacgccgtgacccaggatgccatgctgatcttcgccaacctgagccggggcttcggccggcagggcaagcggaccttcatggccgagagacagtacacacggatggaggactggctgaccgccaagctggcctacgagggcctgagcaagacctacctgtccaagacactggcccagtacacctccaagacatgcagcaactgtgggtttaccatcaccagcgccgactacgacagggtgctggagaagctgaagaagacagcaacaggctggatgaccacaattaacggcaaggagctgaaggtggagggccagattacctactacaacagatacaagagacagaacgtagtcaaggacctgtccgtcgagctggatagactgagcgaagaatctgtgaacaacgacatctcctcctggacaaagggcagaagcggagaagctctgagcctcctgaagaaaagattctcccatagacccgtgcaggagaagttcgtgtgcctgaactgcggcttcgagacacacgcagccgagcaagccgccctgaacatcgccagatcctggctgttcctgcggagccaggagtacaagaaataccagacaaacaagacaaccggcaacaccgataagagagccttcgtcgagacctggcagtccttttaccggaagaagcttaaggaggtgtggaaacctgccgtgcggtctggcggatctggcggaggctccacaagcgtgaccttcgaggacgtggccgtgaacttcaccctggaggagtgggccctgctggaccccagccagaagaagctgtacagggacgtgatgagggagaccctgaggaacctggccagcgtgggcgagaagtgggaggaccacgacatcgaggaccagtacaagaaccagggcaggaagctgaggagccacgtgctggagaggctgtgcgagagcaaggagggcagccagtgcggcgagaacttcagcctgatccccaacctgaccagccccaagaaaaagagaaaagtctaagctgccttctgcggggcttgccttctggccatgcccttcttctctcccttgcacctgtacctcttggtctttgaataaagcctgagtaggaaggctagcaaaaaaaaaaaaaaaaaaaaaaaaaaaaaaaaaaaaaaaaaaaaaaaaaaaaaaaaaaaaaaaaaaaaaaaaaaaaaaaa

SEQ ID NO: 2790 - RNA, 5419 nt, synthetic construct
  source 1..5419: mol_type = other RNA
aggaaataagagagaaaagaagagtaagaagaaatataagagccaccatggcccctaagaagaagcgtaaagtgagccgggtgaacggcagcggcagcggcggcggcatgaaccacgaccaggagttcgacccccctaaggtgtaccctcccgtccccgccgagaagagaaagcccatccgggtcctgagcctgttcgatggcatcgccaccggtctgctggtgctgaaggacctgggcatccaggtggataggtacattgcctccgaggtgtgcgaggactccatcaccgtgggaatggtgcgtcatcagggcaagatcatgtacgtgggcgacgtgcggagcgtgacacagaagcatatccaggagtggggccctttcgacctggtgatcggcggcagcccttgcaatgacctgagcatcgtgaacccagcccggaagggcctgtacgagggaaccggcagactgttcttcgagttttacagactgctgcacgacgcccggcctaaggaaggcgacgaccggcccttcttttggctgttcgagaatgtggtggccatgggagtcagcgacaagcgggatattagccggttcctggagagcaaccccgtgatgatcgatgccaaggaagtgagcgccgcccaccgggccagatacttctggggcaatctgcctggcatgaacagacccctggccagcaccgtgaacgacaagctggagctgcaggagtgcctggagcacggccggatcgccaagttcagcaaggtgagaaccatcaccacccgaagcaacagcatcaaacaaggcaaggaccagcactttcctgtgttcatgaacgagaaggaggacatcctgtggtgtaccgagatggagagagtgttcgggttcccagtccactacacagatgtcagcaacatgtctagactggccagacagagactgctgggaagaagctggtccgtccctgtgatcagacacctgttcgcccctctgaaggagtacttcgcctgcgtgagcagcggcaacagcaacgccaacagccggggccccagcttctctagcggcctggtgccactgtccctgagagggagccacatgggccccatggagatctacaaaaccgtgagcgcctggaagcggcagcctgtgcgcgtgctgagcctgtttcggaatatcgataaagtcctgaaaagcctgggattcctggagagcggctctggctccggcggtggcaccctgaagtacgtggaggatgtgacaaacgtggtcagacgggatgtggagaagtggggccccttcgatctggtgtacggcagcacccaacccctgggcagctcttgtgaccggtgccctggctggtacatgtttcagttccaccggatcctgcagtacgccctgccgagacaggagtcccagcggccattcttttggattttcatggacaacttgctgctgaccgaggatgaccaggaaactaccactcggttcctgcagaccgaagccgtgaccctgcaggacgtgagaggccgggactaccagaacgccatgcgggtgtggtccaacatccctggactgaaaagcaagcacgcacctctgacccctaaagaagaggagtacctgcaggcccaggtgcggagcagaagcaagctggacgcccctaaggtggatctgctggtgaagaattgcctcctgcccctgagagagtacttcaagtatttcagccagaatagtctgcccctgggcggcccaagcagcggcgcccctcctcccagcggcggcagcccagccggctccccaacctctaccgaggagggcacctctgagtccgccacccccgagagcggccctggcacctccaccgagcccagcgagggcagcgcacccggcagccctgccggcagccccacctccacagaggagggaaccagcaccgagcccagcgaaggcagcgccccaggcaccagcaccgagcctagtgagggcggctctggcggcggcagcgcccaggagattaaacggatcaacaagatcagaagaagacttgtgaaagacagcaacaccaagaaggccggcaagacaggccccatgaaaaccctgctggttagagtgatgacacccgatctgagagagcggctggaaaacctgagaaagaagcctgaaaatatcccccagcccatcagcaatacatctagagccaacctgaataagctgctgaccgattacaccgaaatgaagaaggcgatcctgcatgtgtactgggaagagttccagaaggaccctgtgggcctgatgagccgggtggcccagcctgccagcaagaagatcgatcagaacaagctgaaacctgagatggacgagaagggcaacctgaccaccgccggctttgcctgctctcagtgtggccagcccctgttcgtgtacaagctggagcaggtgtctgagaagggcaaggcttacaccaactacttcggacggtgcaatgtggccgagcacgaaaagctgatcctgctggcccagctgaagcccgagaaggatagcgacgaagccgtgacatatagcctgggaaagtttgggcagagggccctggatttctacagcattcatgtgaccaaggagtccacccaccccgtgaagcccctggcccagatcgccggaaacagatacgcctccggacctgtgggaaaggccctgagcgacgcatgtatgggcacaatcgcctccttcctgtctaagtaccaggacatcatcatcgaacaccagaaggtggtgaagggcaaccagaagagactggagagcctgcgggagctggccggcaaggaaaacctggaataccctagcgtgaccctgccacctcagcctcacaccaaggagggcgttgatgcctacaacgaagtgatcgcccgggtgcgaatgtgggtgaacctgaacctgtggcagaagctgaagctaagcagagatgatgccaagcctctgctgagactgaagggattcccttcctttcctctggtcgagagacaggccaacgaagtggactggtgggacatggtgtgtaacgtgaagaagctgatcaacgagaaaaaggaggatggcaaggtgttttggcagaatctggctggctacaagagacaggaagccctgagaccatacctgagcagcgaggaagatcggaagaagggaaagaaattcgctcggtaccagctgggcgacctgctgctgcacctggaaaagaagcacggcgaggactggggaaaggtgtacgacgaggcctgggagcggattgacaagaaagtggaaggcctgagcaagcacatcaagctggaagaggaacggagaagcgaggacgcccagagcaaggccgccctgaccgactggctgcgggctaaggccagcttcgtgatcgagggcctgaaggaggccgacaaggacgagttctgcagatgcgagctgaagctgcagaagtggtacggggacctgcggggaaagcccttcgccatcgaagccgagaacagcatcctggacatcagcggcttcagcaagcagtacaactgtgccttcatctggcagaaggacggcgtgaagaagctgaacctgtacctgatcatcaactacttcaagggcggcaagctgcggttcaagaagatcaaacctgaagccttcgaagccaacagattctacaccgtgatcaacaaaaagagcggcgagatcgtgcccatggaggtgaacttcaacttcgacgaccccaacctgatcatcctgcctctggcctttggcaagagacagggcagagaattcatctggaacgacctgctgtccctggaaaccggcagcctgaagctggccaacggaagagtgatcgagaagacactgtacaacagaagaacccggcaggatgagcctgccctgttcgtggccctgaccttcgagcggcgggaggtcctggactcctccaatatcaaaccaatgaacctgatcggcgtggcaagaggcgaaaacatccccgccgtgatcgccctgaccgaccccgagggctgcccactgagccggtttaaggatagcctgggaaacccaacccacatcctgagaatcggcgagagctataaggagaagcagcggaccatccaggccaagaaggaggtggagcagcggagagccggcggctacagccggaagtacgccagcaaagccaagaatctggcagacgatatggtgagaaacaccgctagagatctgctgtactacgccgtgacccaggatgccatgctgatcttcgccaacctgagccggggcttcggccggcagggcaagcggaccttcatggccgagagacagtacacacggatggaggactggctgaccgccaagctggcctacgagggcctgagcaagacctacctgtccaagacactggcccagtacacctccaagacatgcagcaactgtgggtttaccatcaccagcgccgactacgacagggtgctggagaagctgaagaagacagcaacaggctggatgaccacaattaacggcaaggagctgaaggtggagggccagattacctactacaacagatacaagagacagaacgtagtcaaggacctgtccgtcgagctggatagactgagcgaagaatctgtgaacaacgacatctcctcctggacaaagggcagaagcggagaagctctgagcctcctgaagaaaagattctcccatagacccgtgcaggagaagttcgtgtgcctgaactgcggcttcgagacacacgcagccgagcaagccgccctgaacatcgccagatcctggctgttcctgcggagccaggagtacaagaaataccagacaaacaagacaaccggcaacaccgataagagagccttcgtcgagacctggcagtccttttaccggaagaagcttaaggaggtgtggaaacctgccgtgcggtctggcggatctggcggaggctccacaagcaagcccgagctggtgagcttcgaggacgtggccgtgtacttcagcccccacgagtggggctgcctgaggcccgcccagagggccctgtacagggaggtgatgagggagacctacggcctgctgggcgccctgggcttccccggccccaagcccgccctgatcagctggatggagcaggagagcgaggcctggagccccgccgcccaggaccccgccgagggcgagagcctgggcggcgccctgaccagccccaagaaaaagagaaaagtctaagctgccttctgcggggcttgccttctggccatgcccttcttctctcccttgcacctgtacctcttggtctttgaataaagcctgagtaggaaggctagcaaaaaaaaaaaaaaaaaaaaaaaaaaaaaaaaaaaaaaaaaaaaaaaaaaaaaaaaaaaaaaaaaaaaaaaaaaaaaaaa

SEQ ID NO: 2791 - RNA, 5419 nt, synthetic construct
  source 1..5419: mol_type = other RNA
aggaaataagagagaaaagaagagtaagaagaaatataagagccaccatggcccctaagaagaagcgtaaagtgagccgggtgaacggcagcggcagcggcggcggcatgaaccacgaccaggagttcgacccccctaaggtgtaccctcccgtccccgccgagaagagaaagcccatccgggtcctgagcctgttcgatggcatcgccaccggtctgctggtgctgaaggacctgggcatccaggtggataggtacattgcctccgaggtgtgcgaggactccatcaccgtgggaatggtgcgtcatcagggcaagatcatgtacgtgggcgacgtgcggagcgtgacacagaagcatatccaggagtggggccctttcgacctggtgatcggcggcagcccttgcaatgacctgagcatcgtgaacccagcccggaagggcctgtacgagggaaccggcagactgttcttcgagttttacagactgctgcacgacgcccggcctaaggaaggcgacgaccggcccttcttttggctgttcgagaatgtggtggccatgggagtcagcgacaagcgggatattagccggttcctggagagcaaccccgtgatgatcgatgccaaggaagtgagcgccgcccaccgggccagatacttctggggcaatctgcctggcatgaacagacccctggccagcaccgtgaacgacaagctggagctgcaggagtgcctggagcacggccggatcgccaagttcagcaaggtgagaaccatcaccacccgaagcaacagcatcaaacaaggcaaggaccagcactttcctgtgttcatgaacgagaaggaggacatcctgtggtgtaccgagatggagagagtgttcgggttcccagtccactacacagatgtcagcaacatgtctagactggccagacagagactgctgggaagaagctggtccgtccctgtgatcagacacctgttcgcccctctgaaggagtacttcgcctgcgtgagcagcggcaacagcaacgccaacagccggggccccagcttctctagcggcctggtgccactgtccctgagagggagccacatgggccccatggagatctacaaaaccgtgagcgcctggaagcggcagcctgtgcgcgtgctgagcctgtttcggaatatcgataaagtcctgaaaagcctgggattcctggagagcggctctggctccggcggtggcaccctgaagtacgtggaggatgtgacaaacgtggtcagacgggatgtggagaagtggggccccttcgatctggtgtacggcagcacccaacccctgggcagctcttgtgaccggtgccctggctggtacatgtttcagttccaccggatcctgcagtacgccctgccgagacaggagtcccagcggccattcttttggattttcatggacaacttgctgctgaccgaggatgaccaggaaactaccactcggttcctgcagaccgaagccgtgaccctgcaggacgtgagaggccgggactaccagaacgccatgcgggtgtggtccaacatccctggactgaaaagcaagcacgcacctctgacccctaaagaagaggagtacctgcaggcccaggtgcggagcagaagcaagctggacgcccctaaggtggatctgctggtgaagaattgcctcctgcccctgagagagtacttcaagtatttcagccagaatagtctgcccctgggcggcccaagcagcggcgcccctcctcccagcggcggcagcccagccggctccccaacctctaccgaggagggcacctctgagtccgccacccccgagagcggccctggcacctccaccgagcccagcgagggcagcgcacccggcagccctgccggcagccccacctccacagaggagggaaccagcaccgagcccagcgaaggcagcgccccaggcaccagcaccgagcctagtgagggcggctctggcggcggcagcgcccaggagattaaacggatcaacaagatcagaagaagacttgtgaaagacagcaacaccaagaaggccggcaagacaggccccatgaaaaccctgctggttagagtgatgacacccgatctgagagagcggctggaaaacctgagaaagaagcctgaaaatatcccccagcccatcagcaatacatctagagccaacctgaataagctgctgaccgattacaccgaaatgaagaaggcgatcctgcatgtgtactgggaagagttccagaaggaccctgtgggcctgatgagccgggtggcccagcctgccagcaagaagatcgatcagaacaagctgaaacctgagatggacgagaagggcaacctgaccaccgccggctttgcctgctctcagtgtggccagcccctgttcgtgtacaagctggagcaggtgtctgagaagggcaaggcttacaccaactacttcggacggtgcaatgtggccgagcacgaaaagctgatcctgctggcccagctgaagcccgagaaggatagcgacgaagccgtgacatatagcctgggaaagtttgggcagagggccctggatttctacagcattcatgtgaccaaggagtccacccaccccgtgaagcccctggcccagatcgccggaaacagatacgcctccggacctgtgggaaaggccctgagcgacgcatgtatgggcacaatcgcctccttcctgtctaagtaccaggacatcatcatcgaacaccagaaggtggtgaagggcaaccagaagagactggagagcctgcgggagctggccggcaaggaaaacctggaataccctagcgtgaccctgccacctcagcctcacaccaaggagggcgttgatgcctacaacgaagtgatcgcccgggtgcgaatgtgggtgaacctgaacctgtggcagaagctgaagctaagcagagatgatgccaagcctctgctgagactgaagggattcccttcctttcctctggtcgagagacaggccaacgaagtggactggtgggacatggtgtgtaacgtgaagaagctgatcaacgagaaaaaggaggatggcaaggtgttttggcagaatctggctggctacaagagacaggaagccctgagaccatacctgagcagcgaggaagatcggaagaagggaaagaaattcgctcggtaccagctgggcgacctgctgctgcacctggaaaagaagcacggcgaggactggggaaaggtgtacgacgaggcctgggagcggattgacaagaaagtggaaggcctgagcaagcacatcaagctggaagaggaacggagaagcgaggacgcccagagcaaggccgccctgaccgactggctgcgggctaaggccagcttcgtgatcgagggcctgaaggaggccgacaaggacgagttctgcagatgcgagctgaagctgcagaagtggtacggggacctgcggggaaagcccttcgccatcgaagccgagaacagcatcctggacatcagcggcttcagcaagcagtacaactgtgccttcatctggcagaaggacggcgtgaagaagctgaacctgtacctgatcatcaactacttcaagggcggcaagctgcggttcaagaagatcaaacctgaagccttcgaagccaacagattctacaccgtgatcaacaaaaagagcggcgagatcgtgcccatggaggtgaacttcaacttcgacgaccccaacctgatcatcctgcctctggcctttggcaagagacagggcagagaattcatctggaacgacctgctgtccctggaaaccggcagcctgaagctggccaacggaagagtgatcgagaagacactgtacaacagaagaacccggcaggatgagcctgccctgttcgtggccctgaccttcgagcggcgggaggtcctggactcctccaatatcaaaccaatgaacctgatcggcgtggcaagaggcgaaaacatccccgccgtgatcgccctgaccgaccccgagggctgcccactgagccggtttaaggatagcctgggaaacccaacccacatcctgagaatcggcgagagctataaggagaagcagcggaccatccaggccaagaaggaggtggagcagcggagagccggcggctacagccggaagtacgccagcaaagccaagaatctggcagacgatatggtgagaaacaccgctagagatctgctgtactacgccgtgacccaggatgccatgctgatcttcgccaacctgagccggggcttcggccggcagggcaagcggaccttcatggccgagagacagtacacacggatggaggactggctgaccgccaagctggcctacgagggcctgagcaagacctacctgtccaagacactggcccagtacacctccaagacatgcagcaactgtgggtttaccatcaccagcgccgactacgacagggtgctggagaagctgaagaagacagcaacaggctggatgaccacaattaacggcaaggagctgaaggtggagggccagattacctactacaacagatacaagagacagaacgtagtcaaggacctgtccgtcgagctggatagactgagcgaagaatctgtgaacaacgacatctcctcctggacaaagggcagaagcggagaagctctgagcctcctgaagaaaagattctcccatagacccgtgcaggagaagttcgtgtgcctgaactgcggcttcgagacacacgcagccgagcaagccgccctgaacatcgccagatcctggctgttcctgcggagccaggagtacaagaaataccagacaaacaagacaaccggcaacaccgataagagagccttcgtcgagacctggcagtccttttaccggaagaagcttaaggaggtgtggaaacctgccgtgcggtctggcggatctggcggaggctccacaagcgcccccgcccccgtgagcttcagggacgtggccgtggacttcaccaggcaggagtggcagctgctggcccccgcccagagggccctgtacagggaggtgatgctggagaactacaggaacgtggccagcctgggccaccccgtgagcaagcccaacgtgatcttccagctggagcagagcgaggccccctggatgcccgagggcgaggccgccaggagcctgccccccgactgggaggccaggaccagccccaagaaaaagagaaaagtctaagctgccttctgcggggcttgccttctggccatgcccttcttctctcccttgcacctgtacctcttggtctttgaataaagcctgagtaggaaggctagcaaaaaaaaaaaaaaaaaaaaaaaaaaaaaaaaaaaaaaaaaaaaaaaaaaaaaaaaaaaaaaaaaaaaaaaaaaaaaaaa

SEQ ID NO: 2792 - RNA, 5419 nt, synthetic construct
  source 1..5419: mol_type = other RNA
aggaaataagagagaaaagaagagtaagaagaaatataagagccaccatggcccctaagaagaagcgtaaagtgagccgggtgaacggcagcggcagcggcggcggcatgaaccacgaccaggagttcgacccccctaaggtgtaccctcccgtccccgccgagaagagaaagcccatccgggtcctgagcctgttcgatggcatcgccaccggtctgctggtgctgaaggacctgggcatccaggtggataggtacattgcctccgaggtgtgcgaggactccatcaccgtgggaatggtgcgtcatcagggcaagatcatgtacgtgggcgacgtgcggagcgtgacacagaagcatatccaggagtggggccctttcgacctggtgatcggcggcagcccttgcaatgacctgagcatcgtgaacccagcccggaagggcctgtacgagggaaccggcagactgttcttcgagttttacagactgctgcacgacgcccggcctaaggaaggcgacgaccggcccttcttttggctgttcgagaatgtggtggccatgggagtcagcgacaagcgggatattagccggttcctggagagcaaccccgtgatgatcgatgccaaggaagtgagcgccgcccaccgggccagatacttctggggcaatctgcctggcatgaacagacccctggccagcaccgtgaacgacaagctggagctgcaggagtgcctggagcacggccggatcgccaagttcagcaaggtgagaaccatcaccacccgaagcaacagcatcaaacaaggcaaggaccagcactttcctgtgttcatgaacgagaaggaggacatcctgtggtgtaccgagatggagagagtgttcgggttcccagtccactacacagatgtcagcaacatgtctagactggccagacagagactgctgggaagaagctggtccgtccctgtgatcagacacctgttcgcccctctgaaggagtacttcgcctgcgtgagcagcggcaacagcaacgccaacagccggggccccagcttctctagcggcctggtgccactgtccctgagagggagccacatgggccccatggagatctacaaaaccgtgagcgcctggaagcggcagcctgtgcgcgtgctgagcctgtttcggaatatcgataaagtcctgaaaagcctgggattcctggagagcggctctggctccggcggtggcaccctgaagtacgtggaggatgtgacaaacgtggtcagacgggatgtggagaagtggggccccttcgatctggtgtacggcagcacccaacccctgggcagctcttgtgaccggtgccctggctggtacatgtttcagttccaccggatcctgcagtacgccctgccgagacaggagtcccagcggccattcttttggattttcatggacaacttgctgctgaccgaggatgaccaggaaactaccactcggttcctgcagaccgaagccgtgaccctgcaggacgtgagaggccgggactaccagaacgccatgcgggtgtggtccaacatccctggactgaaaagcaagcacgcacctctgacccctaaagaagaggagtacctgcaggcccaggtgcggagcagaagcaagctggacgcccctaaggtggatctgctggtgaagaattgcctcctgcccctgagagagtacttcaagtatttcagccagaatagtctgcccctgggcggcccaagcagcggcgcccctcctcccagcggcggcagcccagccggctccccaacctctaccgaggagggcacctctgagtccgccacccccgagagcggccctggcacctccaccgagcccagcgagggcagcgcacccggcagccctgccggcagccccacctccacagaggagggaaccagcaccgagcccagcgaaggcagcgccccaggcaccagcaccgagcctagtgagggcggctctggcggcggcagcgcccaggagattaaacggatcaacaagatcagaagaagacttgtgaaagacagcaacaccaagaaggccggcaagacaggccccatgaaaaccctgctggttagagtgatgacacccgatctgagagagcggctggaaaacctgagaaagaagcctgaaaatatcccccagcccatcagcaatacatctagagccaacctgaataagctgctgaccgattacaccgaaatgaagaaggcgatcctgcatgtgtactgggaagagttccagaaggaccctgtgggcctgatgagccgggtggcccagcctgccagcaagaagatcgatcagaacaagctgaaacctgagatggacgagaagggcaacctgaccaccgccggctttgcctgctctcagtgtggccagcccctgttcgtgtacaagctggagcaggtgtctgagaagggcaaggcttacaccaactacttcggacggtgcaatgtggccgagcacgaaaagctgatcctgctggcccagctgaagcccgagaaggatagcgacgaagccgtgacatatagcctgggaaagtttgggcagagggccctggatttctacagcattcatgtgaccaaggagtccacccaccccgtgaagcccctggcccagatcgccggaaacagatacgcctccggacctgtgggaaaggccctgagcgacgcatgtatgggcacaatcgcctccttcctgtctaagtaccaggacatcatcatcgaacaccagaaggtggtgaagggcaaccagaagagactggagagcctgcgggagctggccggcaaggaaaacctggaataccctagcgtgaccctgccacctcagcctcacaccaaggagggcgttgatgcctacaacgaagtgatcgcccgggtgcgaatgtgggtgaacctgaacctgtggcagaagctgaagctaagcagagatgatgccaagcctctgctgagactgaagggattcccttcctttcctctggtcgagagacaggccaacgaagtggactggtgggacatggtgtgtaacgtgaagaagctgatcaacgagaaaaaggaggatggcaaggtgttttggcagaatctggctggctacaagagacaggaagccctgagaccatacctgagcagcgaggaagatcggaagaagggaaagaaattcgctcggtaccagctgggcgacctgctgctgcacctggaaaagaagcacggcgaggactggggaaaggtgtacgacgaggcctgggagcggattgacaagaaagtggaaggcctgagcaagcacatcaagctggaagaggaacggagaagcgaggacgcccagagcaaggccgccctgaccgactggctgcgggctaaggccagcttcgtgatcgagggcctgaaggaggccgacaaggacgagttctgcagatgcgagctgaagctgcagaagtggtacggggacctgcggggaaagcccttcgccatcgaagccgagaacagcatcctggacatcagcggcttcagcaagcagtacaactgtgccttcatctggcagaaggacggcgtgaagaagctgaacctgtacctgatcatcaactacttcaagggcggcaagctgcggttcaagaagatcaaacctgaagccttcgaagccaacagattctacaccgtgatcaacaaaaagagcggcgagatcgtgcccatggaggtgaacttcaacttcgacgaccccaacctgatcatcctgcctctggcctttggcaagagacagggcagagaattcatctggaacgacctgctgtccctggaaaccggcagcctgaagctggccaacggaagagtgatcgagaagacactgtacaacagaagaacccggcaggatgagcctgccctgttcgtggccctgaccttcgagcggcgggaggtcctggactcctccaatatcaaaccaatgaacctgatcggcgtggcaagaggcgaaaacatccccgccgtgatcgccctgaccgaccccgagggctgcccactgagccggtttaaggatagcctgggaaacccaacccacatcctgagaatcggcgagagctataaggagaagcagcggaccatccaggccaagaaggaggtggagcagcggagagccggcggctacagccggaagtacgccagcaaagccaagaatctggcagacgatatggtgagaaacaccgctagagatctgctgtactacgccgtgacccaggatgccatgctgatcttcgccaacctgagccggggcttcggccggcagggcaagcggaccttcatggccgagagacagtacacacggatggaggactggctgaccgccaagctggcctacgagggcctgagcaagacctacctgtccaagacactggcccagtacacctccaagacatgcagcaactgtgggtttaccatcaccagcgccgactacgacagggtgctggagaagctgaagaagacagcaacaggctggatgaccacaattaacggcaaggagctgaaggtggagggccagattacctactacaacagatacaagagacagaacgtagtcaaggacctgtccgtcgagctggatagactgagcgaagaatctgtgaacaacgacatctcctcctggacaaagggcagaagcggagaagctctgagcctcctgaagaaaagattctcccatagacccgtgcaggagaagttcgtgtgcctgaactgcggcttcgagacacacgcagccgagcaagccgccctgaacatcgccagatcctggctgttcctgcggagccaggagtacaagaaataccagacaaacaagacaaccggcaacaccgataagagagccttcgtcgagacctggcagtccttttaccggaagaagcttaaggaggtgtggaaacctgccgtgcggtctggcggatctggcggaggctccacaagcagcgtgatgttcaacgacatcagcatcgtgttcagccaggaggagtgggagtacctggacctggagcagaaggacctgtacaaggacgtgatgctggagaactacggcaacctggtgagcctgggctgcttcatcgccaagcccgacgtgatcagcctgctggagcagggcaaggagccctggaaggtgatcaggaagggcaggaggggctaccccgacctggagaccaggtacgagaccaagaccagccccaagaaaaagagaaaagtctaagctgccttctgcggggcttgccttctggccatgcccttcttctctcccttgcacctgtacctcttggtctttgaataaagcctgagtaggaaggctagcaaaaaaaaaaaaaaaaaaaaaaaaaaaaaaaaaaaaaaaaaaaaaaaaaaaaaaaaaaaaaaaaaaaaaaaaaaaaaaaa

SEQ ID NO: 2793 - RNA, 5419 nt, synthetic construct
  source 1..5419: mol_type = other RNA
aggaaataagagagaaaagaagagtaagaagaaatataagagccaccatggcccctaagaagaagcgtaaagtgagccgggtgaacggcagcggcagcggcggcggcatgaaccacgaccaggagttcgacccccctaaggtgtaccctcccgtccccgccgagaagagaaagcccatccgggtcctgagcctgttcgatggcatcgccaccggtctgctggtgctgaaggacctgggcatccaggtggataggtacattgcctccgaggtgtgcgaggactccatcaccgtgggaatggtgcgtcatcagggcaagatcatgtacgtgggcgacgtgcggagcgtgacacagaagcatatccaggagtggggccctttcgacctggtgatcggcggcagcccttgcaatgacctgagcatcgtgaacccagcccggaagggcctgtacgagggaaccggcagactgttcttcgagttttacagactgctgcacgacgcccggcctaaggaaggcgacgaccggcccttcttttggctgttcgagaatgtggtggccatgggagtcagcgacaagcgggatattagccggttcctggagagcaaccccgtgatgatcgatgccaaggaagtgagcgccgcccaccgggccagatacttctggggcaatctgcctggcatgaacagacccctggccagcaccgtgaacgacaagctggagctgcaggagtgcctggagcacggccggatcgccaagttcagcaaggtgagaaccatcaccacccgaagcaacagcatcaaacaaggcaaggaccagcactttcctgtgttcatgaacgagaaggaggacatcctgtggtgtaccgagatggagagagtgttcgggttcccagtccactacacagatgtcagcaacatgtctagactggccagacagagactgctgggaagaagctggtccgtccctgtgatcagacacctgttcgcccctctgaaggagtacttcgcctgcgtgagcagcggcaacagcaacgccaacagccggggccccagcttctctagcggcctggtgccactgtccctgagagggagccacatgggccccatggagatctacaaaaccgtgagcgcctggaagcggcagcctgtgcgcgtgctgagcctgtttcggaatatcgataaagtcctgaaaagcctgggattcctggagagcggctctggctccggcggtggcaccctgaagtacgtggaggatgtgacaaacgtggtcagacgggatgtggagaagtggggccccttcgatctggtgtacggcagcacccaacccctgggcagctcttgtgaccggtgccctggctggtacatgtttcagttccaccggatcctgcagtacgccctgccgagacaggagtcccagcggccattcttttggattttcatggacaacttgctgctgaccgaggatgaccaggaaactaccactcggttcctgcagaccgaagccgtgaccctgcaggacgtgagaggccgggactaccagaacgccatgcgggtgtggtccaacatccctggactgaaaagcaagcacgcacctctgacccctaaagaagaggagtacctgcaggcccaggtgcggagcagaagcaagctggacgcccctaaggtggatctgctggtgaagaattgcctcctgcccctgagagagtacttcaagtatttcagccagaatagtctgcccctgggcggcccaagcagcggcgcccctcctcccagcggcggcagcccagccggctccccaacctctaccgaggagggcacctctgagtccgccacccccgagagcggccctggcacctccaccgagcccagcgagggcagcgcacccggcagccctgccggcagccccacctccacagaggagggaaccagcaccgagcccagcgaaggcagcgccccaggcaccagcaccgagcctagtgagggcggctctggcggcggcagcgcccaggagattaaacggatcaacaagatcagaagaagacttgtgaaagacagcaacaccaagaaggccggcaagacaggccccatgaaaaccctgctggttagagtgatgacacccgatctgagagagcggctggaaaacctgagaaagaagcctgaaaatatcccccagcccatcagcaatacatctagagccaacctgaataagctgctgaccgattacaccgaaatgaagaaggcgatcctgcatgtgtactgggaagagttccagaaggaccctgtgggcctgatgagccgggtggcccagcctgccagcaagaagatcgatcagaacaagctgaaacctgagatggacgagaagggcaacctgaccaccgccggctttgcctgctctcagtgtggccagcccctgttcgtgtacaagctggagcaggtgtctgagaagggcaaggcttacaccaactacttcggacggtgcaatgtggccgagcacgaaaagctgatcctgctggcccagctgaagcccgagaaggatagcgacgaagccgtgacatatagcctgggaaagtttgggcagagggccctggatttctacagcattcatgtgaccaaggagtccacccaccccgtgaagcccctggcccagatcgccggaaacagatacgcctccggacctgtgggaaaggccctgagcgacgcatgtatgggcacaatcgcctccttcctgtctaagtaccaggacatcatcatcgaacaccagaaggtggtgaagggcaaccagaagagactggagagcctgcgggagctggccggcaaggaaaacctggaataccctagcgtgaccctgccacctcagcctcacaccaaggagggcgttgatgcctacaacgaagtgatcgcccgggtgcgaatgtgggtgaacctgaacctgtggcagaagctgaagctaagcagagatgatgccaagcctctgctgagactgaagggattcccttcctttcctctggtcgagagacaggccaacgaagtggactggtgggacatggtgtgtaacgtgaagaagctgatcaacgagaaaaaggaggatggcaaggtgttttggcagaatctggctggctacaagagacaggaagccctgagaccatacctgagcagcgaggaagatcggaagaagggaaagaaattcgctcggtaccagctgggcgacctgctgctgcacctggaaaagaagcacggcgaggactggggaaaggtgtacgacgaggcctgggagcggattgacaagaaagtggaaggcctgagcaagcacatcaagctggaagaggaacggagaagcgaggacgcccagagcaaggccgccctgaccgactggctgcgggctaaggccagcttcgtgatcgagggcctgaaggaggccgacaaggacgagttctgcagatgcgagctgaagctgcagaagtggtacggggacctgcggggaaagcccttcgccatcgaagccgagaacagcatcctggacatcagcggcttcagcaagcagtacaactgtgccttcatctggcagaaggacggcgtgaagaagctgaacctgtacctgatcatcaactacttcaagggcggcaagctgcggttcaagaagatcaaacctgaagccttcgaagccaacagattctacaccgtgatcaacaaaaagagcggcgagatcgtgcccatggaggtgaacttcaacttcgacgaccccaacctgatcatcctgcctctggcctttggcaagagacagggcagagaattcatctggaacgacctgctgtccctggaaaccggcagcctgaagctggccaacggaagagtgatcgagaagacactgtacaacagaagaacccggcaggatgagcctgccctgttcgtggccctgaccttcgagcggcgggaggtcctggactcctccaatatcaaaccaatgaacctgatcggcgtggcaagaggcgaaaacatccccgccgtgatcgccctgaccgaccccgagggctgcccactgagccggtttaaggatagcctgggaaacccaacccacatcctgagaatcggcgagagctataaggagaagcagcggaccatccaggccaagaaggaggtggagcagcggagagccggcggctacagccggaagtacgccagcaaagccaagaatctggcagacgatatggtgagaaacaccgctagagatctgctgtactacgccgtgacccaggatgccatgctgatcttcgccaacctgagccggggcttcggccggcagggcaagcggaccttcatggccgagagacagtacacacggatggaggactggctgaccgccaagctggcctacgagggcctgagcaagacctacctgtccaagacactggcccagtacacctccaagacatgcagcaactgtgggtttaccatcaccagcgccgactacgacagggtgctggagaagctgaagaagacagcaacaggctggatgaccacaattaacggcaaggagctgaaggtggagggccagattacctactacaacagatacaagagacagaacgtagtcaaggacctgtccgtcgagctggatagactgagcgaagaatctgtgaacaacgacatctcctcctggacaaagggcagaagcggagaagctctgagcctcctgaagaaaagattctcccatagacccgtgcaggagaagttcgtgtgcctgaactgcggcttcgagacacacgcagccgagcaagccgccctgaacatcgccagatcctggctgttcctgcggagccaggagtacaagaaataccagacaaacaagacaaccggcaacaccgataagagagccttcgtcgagacctggcagtccttttaccggaagaagcttaaggaggtgtggaaacctgccgtgcggtctggcggatctggcggaggctccacaagcatgatcaactaccagacccccgtgagcttcagggacgtggtggtgggcttcacccaggaggagtggcacaggctgaaccccacccagagggccctgtacagggacgtgatgctggagacctacagcaacctggtgagcgtgggctacgagggcaccaagcccgacgtgatcctgaggctggagcaggaggaggccccctggatcggcgaggccgcctgcctgggctgccactgctggggcaagaccagccccaagaaaaagagaaaagtctaagctgccttctgcggggcttgccttctggccatgcccttcttctctcccttgcacctgtacctcttggtctttgaataaagcctgagtaggaaggctagcaaaaaaaaaaaaaaaaaaaaaaaaaaaaaaaaaaaaaaaaaaaaaaaaaaaaaaaaaaaaaaaaaaaaaaaaaaaaaaaa

SEQ ID NO: 2794 - RNA, 5419 nt, synthetic construct
  source 1..5419: mol_type = other RNA
aggaaataagagagaaaagaagagtaagaagaaatataagagccaccatggcccctaagaagaagcgtaaagtgagccgggtgaacggcagcggcagcggcggcggcatgaaccacgaccaggagttcgacccccctaaggtgtaccctcccgtccccgccgagaagagaaagcccatccgggtcctgagcctgttcgatggcatcgccaccggtctgctggtgctgaaggacctgggcatccaggtggataggtacattgcctccgaggtgtgcgaggactccatcaccgtgggaatggtgcgtcatcagggcaagatcatgtacgtgggcgacgtgcggagcgtgacacagaagcatatccaggagtggggccctttcgacctggtgatcggcggcagcccttgcaatgacctgagcatcgtgaacccagcccggaagggcctgtacgagggaaccggcagactgttcttcgagttttacagactgctgcacgacgcccggcctaaggaaggcgacgaccggcccttcttttggctgttcgagaatgtggtggccatgggagtcagcgacaagcgggatattagccggttcctggagagcaaccccgtgatgatcgatgccaaggaagtgagcgccgcccaccgggccagatacttctggggcaatctgcctggcatgaacagacccctggccagcaccgtgaacgacaagctggagctgcaggagtgcctggagcacggccggatcgccaagttcagcaaggtgagaaccatcaccacccgaagcaacagcatcaaacaaggcaaggaccagcactttcctgtgttcatgaacgagaaggaggacatcctgtggtgtaccgagatggagagagtgttcgggttcccagtccactacacagatgtcagcaacatgtctagactggccagacagagactgctgggaagaagctggtccgtccctgtgatcagacacctgttcgcccctctgaaggagtacttcgcctgcgtgagcagcggcaacagcaacgccaacagccggggccccagcttctctagcggcctggtgccactgtccctgagagggagccacatgggccccatggagatctacaaaaccgtgagcgcctggaagcggcagcctgtgcgcgtgctgagcctgtttcggaatatcgataaagtcctgaaaagcctgggattcctggagagcggctctggctccggcggtggcaccctgaagtacgtggaggatgtgacaaacgtggtcagacgggatgtggagaagtggggccccttcgatctggtgtacggcagcacccaacccctgggcagctcttgtgaccggtgccctggctggtacatgtttcagttccaccggatcctgcagtacgccctgccgagacaggagtcccagcggccattcttttggattttcatggacaacttgctgctgaccgaggatgaccaggaaactaccactcggttcctgcagaccgaagccgtgaccctgcaggacgtgagaggccgggactaccagaacgccatgcgggtgtggtccaacatccctggactgaaaagcaagcacgcacctctgacccctaaagaagaggagtacctgcaggcccaggtgcggagcagaagcaagctggacgcccctaaggtggatctgctggtgaagaattgcctcctgcccctgagagagtacttcaagtatttcagccagaatagtctgcccctgggcggcccaagcagcggcgcccctcctcccagcggcggcagcccagccggctccccaacctctaccgaggagggcacctctgagtccgccacccccgagagcggccctggcacctccaccgagcccagcgagggcagcgcacccggcagccctgccggcagccccacctccacagaggagggaaccagcaccgagcccagcgaaggcagcgccccaggcaccagcaccgagcctagtgagggcggctctggcggcggcagcgcccaggagattaaacggatcaacaagatcagaagaagacttgtgaaagacagcaacaccaagaaggccggcaagacaggccccatgaaaaccctgctggttagagtgatgacacccgatctgagagagcggctggaaaacctgagaaagaagcctgaaaatatcccccagcccatcagcaatacatctagagccaacctgaataagctgctgaccgattacaccgaaatgaagaaggcgatcctgcatgtgtactgggaagagttccagaaggaccctgtgggcctgatgagccgggtggcccagcctgccagcaagaagatcgatcagaacaagctgaaacctgagatggacgagaagggcaacctgaccaccgccggctttgcctgctctcagtgtggccagcccctgttcgtgtacaagctggagcaggtgtctgagaagggcaaggcttacaccaactacttcggacggtgcaatgtggccgagcacgaaaagctgatcctgctggcccagctgaagcccgagaaggatagcgacgaagccgtgacatatagcctgggaaagtttgggcagagggccctggatttctacagcattcatgtgaccaaggagtccacccaccccgtgaagcccctggcccagatcgccggaaacagatacgcctccggacctgtgggaaaggccctgagcgacgcatgtatgggcacaatcgcctccttcctgtctaagtaccaggacatcatcatcgaacaccagaaggtggtgaagggcaaccagaagagactggagagcctgcgggagctggccggcaaggaaaacctggaataccctagcgtgaccctgccacctcagcctcacaccaaggagggcgttgatgcctacaacgaagtgatcgcccgggtgcgaatgtgggtgaacctgaacctgtggcagaagctgaagctaagcagagatgatgccaagcctctgctgagactgaagggattcccttcctttcctctggtcgagagacaggccaacgaagtggactggtgggacatggtgtgtaacgtgaagaagctgatcaacgagaaaaaggaggatggcaaggtgttttggcagaatctggctggctacaagagacaggaagccctgagaccatacctgagcagcgaggaagatcggaagaagggaaagaaattcgctcggtaccagctgggcgacctgctgctgcacctggaaaagaagcacggcgaggactggggaaaggtgtacgacgaggcctgggagcggattgacaagaaagtggaaggcctgagcaagcacatcaagctggaagaggaacggagaagcgaggacgcccagagcaaggccgccctgaccgactggctgcgggctaaggccagcttcgtgatcgagggcctgaaggaggccgacaaggacgagttctgcagatgcgagctgaagctgcagaagtggtacggggacctgcggggaaagcccttcgccatcgaagccgagaacagcatcctggacatcagcggcttcagcaagcagtacaactgtgccttcatctggcagaaggacggcgtgaagaagctgaacctgtacctgatcatcaactacttcaagggcggcaagctgcggttcaagaagatcaaacctgaagccttcgaagccaacagattctacaccgtgatcaacaaaaagagcggcgagatcgtgcccatggaggtgaacttcaacttcgacgaccccaacctgatcatcctgcctctggcctttggcaagagacagggcagagaattcatctggaacgacctgctgtccctggaaaccggcagcctgaagctggccaacggaagagtgatcgagaagacactgtacaacagaagaacccggcaggatgagcctgccctgttcgtggccctgaccttcgagcggcgggaggtcctggactcctccaatatcaaaccaatgaacctgatcggcgtggcaagaggcgaaaacatccccgccgtgatcgccctgaccgaccccgagggctgcccactgagccggtttaaggatagcctgggaaacccaacccacatcctgagaatcggcgagagctataaggagaagcagcggaccatccaggccaagaaggaggtggagcagcggagagccggcggctacagccggaagtacgccagcaaagccaagaatctggcagacgatatggtgagaaacaccgctagagatctgctgtactacgccgtgacccaggatgccatgctgatcttcgccaacctgagccggggcttcggccggcagggcaagcggaccttcatggccgagagacagtacacacggatggaggactggctgaccgccaagctggcctacgagggcctgagcaagacctacctgtccaagacactggcccagtacacctccaagacatgcagcaactgtgggtttaccatcaccagcgccgactacgacagggtgctggagaagctgaagaagacagcaacaggctggatgaccacaattaacggcaaggagctgaaggtggagggccagattacctactacaacagatacaagagacagaacgtagtcaaggacctgtccgtcgagctggatagactgagcgaagaatctgtgaacaacgacatctcctcctggacaaagggcagaagcggagaagctctgagcctcctgaagaaaagattctcccatagacccgtgcaggagaagttcgtgtgcctgaactgcggcttcgagacacacgcagccgagcaagccgccctgaacatcgccagatcctggctgttcctgcggagccaggagtacaagaaataccagacaaacaagacaaccggcaacaccgataagagagccttcgtcgagacctggcagtccttttaccggaagaagcttaaggaggtgtggaaacctgccgtgcggtctggcggatctggcggaggctccacaagcggcctgctgagcttcgaggacgtggccctgtacttcaccagggaggagtgggacaccctggactgggcccagaaggccctgtacagggacgtgatgctggacaactacaggcacatcgtgagcctgggcttccccttccccaagcccgaggtgatctgccagctggagcagtgggaggagccctggatcctggacctgcccagggccggcaccaggaaggccagcggcagcgcctgccccgacaccagccccaagaaaaagagaaaagtctaagctgccttctgcggggcttgccttctggccatgcccttcttctctcccttgcacctgtacctcttggtctttgaataaagcctgagtaggaaggctagcaaaaaaaaaaaaaaaaaaaaaaaaaaaaaaaaaaaaaaaaaaaaaaaaaaaaaaaaaaaaaaaaaaaaaaaaaaaaaaaa

SEQ ID NO: 2795 - RNA, 5419 nt, synthetic construct
  source 1..5419: mol_type = other RNA
aggaaataagagagaaaagaagagtaagaagaaatataagagccaccatggcccctaagaagaagcgtaaagtgagccgggtgaacggcagcggcagcggcggcggcatgaaccacgaccaggagttcgacccccctaaggtgtaccctcccgtccccgccgagaagagaaagcccatccgggtcctgagcctgttcgatggcatcgccaccggtctgctggtgctgaaggacctgggcatccaggtggataggtacattgcctccgaggtgtgcgaggactccatcaccgtgggaatggtgcgtcatcagggcaagatcatgtacgtgggcgacgtgcggagcgtgacacagaagcatatccaggagtggggccctttcgacctggtgatcggcggcagcccttgcaatgacctgagcatcgtgaacccagcccggaagggcctgtacgagggaaccggcagactgttcttcgagttttacagactgctgcacgacgcccggcctaaggaaggcgacgaccggcccttcttttggctgttcgagaatgtggtggccatgggagtcagcgacaagcgggatattagccggttcctggagagcaaccccgtgatgatcgatgccaaggaagtgagcgccgcccaccgggccagatacttctggggcaatctgcctggcatgaacagacccctggccagcaccgtgaacgacaagctggagctgcaggagtgcctggagcacggccggatcgccaagttcagcaaggtgagaaccatcaccacccgaagcaacagcatcaaacaaggcaaggaccagcactttcctgtgttcatgaacgagaaggaggacatcctgtggtgtaccgagatggagagagtgttcgggttcccagtccactacacagatgtcagcaacatgtctagactggccagacagagactgctgggaagaagctggtccgtccctgtgatcagacacctgttcgcccctctgaaggagtacttcgcctgcgtgagcagcggcaacagcaacgccaacagccggggccccagcttctctagcggcctggtgccactgtccctgagagggagccacatgggccccatggagatctacaaaaccgtgagcgcctggaagcggcagcctgtgcgcgtgctgagcctgtttcggaatatcgataaagtcctgaaaagcctgggattcctggagagcggctctggctccggcggtggcaccctgaagtacgtggaggatgtgacaaacgtggtcagacgggatgtggagaagtggggccccttcgatctggtgtacggcagcacccaacccctgggcagctcttgtgaccggtgccctggctggtacatgtttcagttccaccggatcctgcagtacgccctgccgagacaggagtcccagcggccattcttttggattttcatggacaacttgctgctgaccgaggatgaccaggaaactaccactcggttcctgcagaccgaagccgtgaccctgcaggacgtgagaggccgggactaccagaacgccatgcgggtgtggtccaacatccctggactgaaaagcaagcacgcacctctgacccctaaagaagaggagtacctgcaggcccaggtgcggagcagaagcaagctggacgcccctaaggtggatctgctggtgaagaattgcctcctgcccctgagagagtacttcaagtatttcagccagaatagtctgcccctgggcggcccaagcagcggcgcccctcctcccagcggcggcagcccagccggctccccaacctctaccgaggagggcacctctgagtccgccacccccgagagcggccctggcacctccaccgagcccagcgagggcagcgcacccggcagccctgccggcagccccacctccacagaggagggaaccagcaccgagcccagcgaaggcagcgccccaggcaccagcaccgagcctagtgagggcggctctggcggcggcagcgcccaggagattaaacggatcaacaagatcagaagaagacttgtgaaagacagcaacaccaagaaggccggcaagacaggccccatgaaaaccctgctggttagagtgatgacacccgatctgagagagcggctggaaaacctgagaaagaagcctgaaaatatcccccagcccatcagcaatacatctagagccaacctgaataagctgctgaccgattacaccgaaatgaagaaggcgatcctgcatgtgtactgggaagagttccagaaggaccctgtgggcctgatgagccgggtggcccagcctgccagcaagaagatcgatcagaacaagctgaaacctgagatggacgagaagggcaacctgaccaccgccggctttgcctgctctcagtgtggccagcccctgttcgtgtacaagctggagcaggtgtctgagaagggcaaggcttacaccaactacttcggacggtgcaatgtggccgagcacgaaaagctgatcctgctggcccagctgaagcccgagaaggatagcgacgaagccgtgacatatagcctgggaaagtttgggcagagggccctggatttctacagcattcatgtgaccaaggagtccacccaccccgtgaagcccctggcccagatcgccggaaacagatacgcctccggacctgtgggaaaggccctgagcgacgcatgtatgggcacaatcgcctccttcctgtctaagtaccaggacatcatcatcgaacaccagaaggtggtgaagggcaaccagaagagactggagagcctgcgggagctggccggcaaggaaaacctggaataccctagcgtgaccctgccacctcagcctcacaccaaggagggcgttgatgcctacaacgaagtgatcgcccgggtgcgaatgtgggtgaacctgaacctgtggcagaagctgaagctaagcagagatgatgccaagcctctgctgagactgaagggattcccttcctttcctctggtcgagagacaggccaacgaagtggactggtgggacatggtgtgtaacgtgaagaagctgatcaacgagaaaaaggaggatggcaaggtgttttggcagaatctggctggctacaagagacaggaagccctgagaccatacctgagcagcgaggaagatcggaagaagggaaagaaattcgctcggtaccagctgggcgacctgctgctgcacctggaaaagaagcacggcgaggactggggaaaggtgtacgacgaggcctgggagcggattgacaagaaagtggaaggcctgagcaagcacatcaagctggaagaggaacggagaagcgaggacgcccagagcaaggccgccctgaccgactggctgcgggctaaggccagcttcgtgatcgagggcctgaaggaggccgacaaggacgagttctgcagatgcgagctgaagctgcagaagtggtacggggacctgcggggaaagcccttcgccatcgaagccgagaacagcatcctggacatcagcggcttcagcaagcagtacaactgtgccttcatctggcagaaggacggcgtgaagaagctgaacctgtacctgatcatcaactacttcaagggcggcaagctgcggttcaagaagatcaaacctgaagccttcgaagccaacagattctacaccgtgatcaacaaaaagagcggcgagatcgtgcccatggaggtgaacttcaacttcgacgaccccaacctgatcatcctgcctctggcctttggcaagagacagggcagagaattcatctggaacgacctgctgtccctggaaaccggcagcctgaagctggccaacggaagagtgatcgagaagacactgtacaacagaagaacccggcaggatgagcctgccctgttcgtggccctgaccttcgagcggcgggaggtcctggactcctccaatatcaaaccaatgaacctgatcggcgtggcaagaggcgaaaacatccccgccgtgatcgccctgaccgaccccgagggctgcccactgagccggtttaaggatagcctgggaaacccaacccacatcctgagaatcggcgagagctataaggagaagcagcggaccatccaggccaagaaggaggtggagcagcggagagccggcggctacagccggaagtacgccagcaaagccaagaatctggcagacgatatggtgagaaacaccgctagagatctgctgtactacgccgtgacccaggatgccatgctgatcttcgccaacctgagccggggcttcggccggcagggcaagcggaccttcatggccgagagacagtacacacggatggaggactggctgaccgccaagctggcctacgagggcctgagcaagacctacctgtccaagacactggcccagtacacctccaagacatgcagcaactgtgggtttaccatcaccagcgccgactacgacagggtgctggagaagctgaagaagacagcaacaggctggatgaccacaattaacggcaaggagctgaaggtggagggccagattacctactacaacagatacaagagacagaacgtagtcaaggacctgtccgtcgagctggatagactgagcgaagaatctgtgaacaacgacatctcctcctggacaaagggcagaagcggagaagctctgagcctcctgaagaaaagattctcccatagacccgtgcaggagaagttcgtgtgcctgaactgcggcttcgagacacacgcagccgagcaagccgccctgaacatcgccagatcctggctgttcctgcggagccaggagtacaagaaataccagacaaacaagacaaccggcaacaccgataagagagccttcgtcgagacctggcagtccttttaccggaagaagcttaaggaggtgtggaaacctgccgtgcggtctggcggatctggcggaggctccacaagcgtgttccagggcagcctgagcttcgaggacgtgaccgtggacttcagcagggaggagtggaggctgctggacctggcccagaagagcctgtacagggacgtgatgctggagaactacttcaacctgatcagcgtgggctgccaggtgcccaagcaggaggtgctgttcagcctggagcaggaggagcccaggatgctggacggcgagatcagcagccacaactgcctgggcggcgacatcggcaccagccccaagaaaaagagaaaagtctaagctgccttctgcggggcttgccttctggccatgcccttcttctctcccttgcacctgtacctcttggtctttgaataaagcctgagtaggaaggctagcaaaaaaaaaaaaaaaaaaaaaaaaaaaaaaaaaaaaaaaaaaaaaaaaaaaaaaaaaaaaaaaaaaaaaaaaaaaaaaaa

SEQ ID NO: 2796 - RNA, 5419 nt, synthetic construct
  source 1..5419: mol_type = other RNA
aggaaataagagagaaaagaagagtaagaagaaatataagagccaccatggcccctaagaagaagcgtaaagtgagccgggtgaacggcagcggcagcggcggcggcatgaaccacgaccaggagttcgacccccctaaggtgtaccctcccgtccccgccgagaagagaaagcccatccgggtcctgagcctgttcgatggcatcgccaccggtctgctggtgctgaaggacctgggcatccaggtggataggtacattgcctccgaggtgtgcgaggactccatcaccgtgggaatggtgcgtcatcagggcaagatcatgtacgtgggcgacgtgcggagcgtgacacagaagcatatccaggagtggggccctttcgacctggtgatcggcggcagcccttgcaatgacctgagcatcgtgaacccagcccggaagggcctgtacgagggaaccggcagactgttcttcgagttttacagactgctgcacgacgcccggcctaaggaaggcgacgaccggcccttcttttggctgttcgagaatgtggtggccatgggagtcagcgacaagcgggatattagccggttcctggagagcaaccccgtgatgatcgatgccaaggaagtgagcgccgcccaccgggccagatacttctggggcaatctgcctggcatgaacagacccctggccagcaccgtgaacgacaagctggagctgcaggagtgcctggagcacggccggatcgccaagttcagcaaggtgagaaccatcaccacccgaagcaacagcatcaaacaaggcaaggaccagcactttcctgtgttcatgaacgagaaggaggacatcctgtggtgtaccgagatggagagagtgttcgggttcccagtccactacacagatgtcagcaacatgtctagactggccagacagagactgctgggaagaagctggtccgtccctgtgatcagacacctgttcgcccctctgaaggagtacttcgcctgcgtgagcagcggcaacagcaacgccaacagccggggccccagcttctctagcggcctggtgccactgtccctgagagggagccacatgggccccatggagatctacaaaaccgtgagcgcctggaagcggcagcctgtgcgcgtgctgagcctgtttcggaatatcgataaagtcctgaaaagcctgggattcctggagagcggctctggctccggcggtggcaccctgaagtacgtggaggatgtgacaaacgtggtcagacgggatgtggagaagtggggccccttcgatctggtgtacggcagcacccaacccctgggcagctcttgtgaccggtgccctggctggtacatgtttcagttccaccggatcctgcagtacgccctgccgagacaggagtcccagcggccattcttttggattttcatggacaacttgctgctgaccgaggatgaccaggaaactaccactcggttcctgcagaccgaagccgtgaccctgcaggacgtgagaggccgggactaccagaacgccatgcgggtgtggtccaacatccctggactgaaaagcaagcacgcacctctgacccctaaagaagaggagtacctgcaggcccaggtgcggagcagaagcaagctggacgcccctaaggtggatctgctggtgaagaattgcctcctgcccctgagagagtacttcaagtatttcagccagaatagtctgcccctgggcggcccaagcagcggcgcccctcctcccagcggcggcagcccagccggctccccaacctctaccgaggagggcacctctgagtccgccacccccgagagcggccctggcacctccaccgagcccagcgagggcagcgcacccggcagccctgccggcagccccacctccacagaggagggaaccagcaccgagcccagcgaaggcagcgccccaggcaccagcaccgagcctagtgagggcggctctggcggcggcagcgcccaggagattaaacggatcaacaagatcagaagaagacttgtgaaagacagcaacaccaagaaggccggcaagacaggccccatgaaaaccctgctggttagagtgatgacacccgatctgagagagcggctggaaaacctgagaaagaagcctgaaaatatcccccagcccatcagcaatacatctagagccaacctgaataagctgctgaccgattacaccgaaatgaagaaggcgatcctgcatgtgtactgggaagagttccagaaggaccctgtgggcctgatgagccgggtggcccagcctgccagcaagaagatcgatcagaacaagctgaaacctgagatggacgagaagggcaacctgaccaccgccggctttgcctgctctcagtgtggccagcccctgttcgtgtacaagctggagcaggtgtctgagaagggcaaggcttacaccaactacttcggacggtgcaatgtggccgagcacgaaaagctgatcctgctggcccagctgaagcccgagaaggatagcgacgaagccgtgacatatagcctgggaaagtttgggcagagggccctggatttctacagcattcatgtgaccaaggagtccacccaccccgtgaagcccctggcccagatcgccggaaacagatacgcctccggacctgtgggaaaggccctgagcgacgcatgtatgggcacaatcgcctccttcctgtctaagtaccaggacatcatcatcgaacaccagaaggtggtgaagggcaaccagaagagactggagagcctgcgggagctggccggcaaggaaaacctggaataccctagcgtgaccctgccacctcagcctcacaccaaggagggcgttgatgcctacaacgaagtgatcgcccgggtgcgaatgtgggtgaacctgaacctgtggcagaagctgaagctaagcagagatgatgccaagcctctgctgagactgaagggattcccttcctttcctctggtcgagagacaggccaacgaagtggactggtgggacatggtgtgtaacgtgaagaagctgatcaacgagaaaaaggaggatggcaaggtgttttggcagaatctggctggctacaagagacaggaagccctgagaccatacctgagcagcgaggaagatcggaagaagggaaagaaattcgctcggtaccagctgggcgacctgctgctgcacctggaaaagaagcacggcgaggactggggaaaggtgtacgacgaggcctgggagcggattgacaagaaagtggaaggcctgagcaagcacatcaagctggaagaggaacggagaagcgaggacgcccagagcaaggccgccctgaccgactggctgcgggctaaggccagcttcgtgatcgagggcctgaaggaggccgacaaggacgagttctgcagatgcgagctgaagctgcagaagtggtacggggacctgcggggaaagcccttcgccatcgaagccgagaacagcatcctggacatcagcggcttcagcaagcagtacaactgtgccttcatctggcagaaggacggcgtgaagaagctgaacctgtacctgatcatcaactacttcaagggcggcaagctgcggttcaagaagatcaaacctgaagccttcgaagccaacagattctacaccgtgatcaacaaaaagagcggcgagatcgtgcccatggaggtgaacttcaacttcgacgaccccaacctgatcatcctgcctctggcctttggcaagagacagggcagagaattcatctggaacgacctgctgtccctggaaaccggcagcctgaagctggccaacggaagagtgatcgagaagacactgtacaacagaagaacccggcaggatgagcctgccctgttcgtggccctgaccttcgagcggcgggaggtcctggactcctccaatatcaaaccaatgaacctgatcggcgtggcaagaggcgaaaacatccccgccgtgatcgccctgaccgaccccgagggctgcccactgagccggtttaaggatagcctgggaaacccaacccacatcctgagaatcggcgagagctataaggagaagcagcggaccatccaggccaagaaggaggtggagcagcggagagccggcggctacagccggaagtacgccagcaaagccaagaatctggcagacgatatggtgagaaacaccgctagagatctgctgtactacgccgtgacccaggatgccatgctgatcttcgccaacctgagccggggcttcggccggcagggcaagcggaccttcatggccgagagacagtacacacggatggaggactggctgaccgccaagctggcctacgagggcctgagcaagacctacctgtccaagacactggcccagtacacctccaagacatgcagcaactgtgggtttaccatcaccagcgccgactacgacagggtgctggagaagctgaagaagacagcaacaggctggatgaccacaattaacggcaaggagctgaaggtggagggccagattacctactacaacagatacaagagacagaacgtagtcaaggacctgtccgtcgagctggatagactgagcgaagaatctgtgaacaacgacatctcctcctggacaaagggcagaagcggagaagctctgagcctcctgaagaaaagattctcccatagacccgtgcaggagaagttcgtgtgcctgaactgcggcttcgagacacacgcagccgagcaagccgccctgaacatcgccagatcctggctgttcctgcggagccaggagtacaagaaataccagacaaacaagacaaccggcaacaccgataagagagccttcgtcgagacctggcagtccttttaccggaagaagcttaaggaggtgtggaaacctgccgtgcggtctggcggatctggcggaggctccacaagcatgcccgtgaccttcgaggaggtggccgtgtacttcacccagggccagggcgccctgctggaccccgcccagagggccctgtacagggacgtgatgcaggagaactacgagaccgtgaccagcctgggcttccccatccccaagcccgagctgatcgccaggctggagaggggcgaggagccctgggtgcccgacctgcaggcctgcaaggagaggaggctgcccaggtgcaccaggaccggcaccagccccaagaaaaagagaaaagtctaagctgccttctgcggggcttgccttctggccatgcccttcttctctcccttgcacctgtacctcttggtctttgaataaagcctgagtaggaaggctagcaaaaaaaaaaaaaaaaaaaaaaaaaaaaaaaaaaaaaaaaaaaaaaaaaaaaaaaaaaaaaaaaaaaaaaaaaaaaaaaa

SEQ ID NO: 2797 - RNA, 5419 nt, synthetic construct
  source 1..5419: mol_type = other RNA
aggaaataagagagaaaagaagagtaagaagaaatataagagccaccatggcccctaagaagaagcgtaaagtgagccgggtgaacggcagcggcagcggcggcggcatgaaccacgaccaggagttcgacccccctaaggtgtaccctcccgtccccgccgagaagagaaagcccatccgggtcctgagcctgttcgatggcatcgccaccggtctgctggtgctgaaggacctgggcatccaggtggataggtacattgcctccgaggtgtgcgaggactccatcaccgtgggaatggtgcgtcatcagggcaagatcatgtacgtgggcgacgtgcggagcgtgacacagaagcatatccaggagtggggccctttcgacctggtgatcggcggcagcccttgcaatgacctgagcatcgtgaacccagcccggaagggcctgtacgagggaaccggcagactgttcttcgagttttacagactgctgcacgacgcccggcctaaggaaggcgacgaccggcccttcttttggctgttcgagaatgtggtggccatgggagtcagcgacaagcgggatattagccggttcctggagagcaaccccgtgatgatcgatgccaaggaagtgagcgccgcccaccgggccagatacttctggggcaatctgcctggcatgaacagacccctggccagcaccgtgaacgacaagctggagctgcaggagtgcctggagcacggccggatcgccaagttcagcaaggtgagaaccatcaccacccgaagcaacagcatcaaacaaggcaaggaccagcactttcctgtgttcatgaacgagaaggaggacatcctgtggtgtaccgagatggagagagtgttcgggttcccagtccactacacagatgtcagcaacatgtctagactggccagacagagactgctgggaagaagctggtccgtccctgtgatcagacacctgttcgcccctctgaaggagtacttcgcctgcgtgagcagcggcaacagcaacgccaacagccggggccccagcttctctagcggcctggtgccactgtccctgagagggagccacatgggccccatggagatctacaaaaccgtgagcgcctggaagcggcagcctgtgcgcgtgctgagcctgtttcggaatatcgataaagtcctgaaaagcctgggattcctggagagcggctctggctccggcggtggcaccctgaagtacgtggaggatgtgacaaacgtggtcagacgggatgtggagaagtggggccccttcgatctggtgtacggcagcacccaacccctgggcagctcttgtgaccggtgccctggctggtacatgtttcagttccaccggatcctgcagtacgccctgccgagacaggagtcccagcggccattcttttggattttcatggacaacttgctgctgaccgaggatgaccaggaaactaccactcggttcctgcagaccgaagccgtgaccctgcaggacgtgagaggccgggactaccagaacgccatgcgggtgtggtccaacatccctggactgaaaagcaagcacgcacctctgacccctaaagaagaggagtacctgcaggcccaggtgcggagcagaagcaagctggacgcccctaaggtggatctgctggtgaagaattgcctcctgcccctgagagagtacttcaagtatttcagccagaatagtctgcccctgggcggcccaagcagcggcgcccctcctcccagcggcggcagcccagccggctccccaacctctaccgaggagggcacctctgagtccgccacccccgagagcggccctggcacctccaccgagcccagcgagggcagcgcacccggcagccctgccggcagccccacctccacagaggagggaaccagcaccgagcccagcgaaggcagcgccccaggcaccagcaccgagcctagtgagggcggctctggcggcggcagcgcccaggagattaaacggatcaacaagatcagaagaagacttgtgaaagacagcaacaccaagaaggccggcaagacaggccccatgaaaaccctgctggttagagtgatgacacccgatctgagagagcggctggaaaacctgagaaagaagcctgaaaatatcccccagcccatcagcaatacatctagagccaacctgaataagctgctgaccgattacaccgaaatgaagaaggcgatcctgcatgtgtactgggaagagttccagaaggaccctgtgggcctgatgagccgggtggcccagcctgccagcaagaagatcgatcagaacaagctgaaacctgagatggacgagaagggcaacctgaccaccgccggctttgcctgctctcagtgtggccagcccctgttcgtgtacaagctggagcaggtgtctgagaagggcaaggcttacaccaactacttcggacggtgcaatgtggccgagcacgaaaagctgatcctgctggcccagctgaagcccgagaaggatagcgacgaagccgtgacatatagcctgggaaagtttgggcagagggccctggatttctacagcattcatgtgaccaaggagtccacccaccccgtgaagcccctggcccagatcgccggaaacagatacgcctccggacctgtgggaaaggccctgagcgacgcatgtatgggcacaatcgcctccttcctgtctaagtaccaggacatcatcatcgaacaccagaaggtggtgaagggcaaccagaagagactggagagcctgcgggagctggccggcaaggaaaacctggaataccctagcgtgaccctgccacctcagcctcacaccaaggagggcgttgatgcctacaacgaagtgatcgcccgggtgcgaatgtgggtgaacctgaacctgtggcagaagctgaagctaagcagagatgatgccaagcctctgctgagactgaagggattcccttcctttcctctggtcgagagacaggccaacgaagtggactggtgggacatggtgtgtaacgtgaagaagctgatcaacgagaaaaaggaggatggcaaggtgttttggcagaatctggctggctacaagagacaggaagccctgagaccatacctgagcagcgaggaagatcggaagaagggaaagaaattcgctcggtaccagctgggcgacctgctgctgcacctggaaaagaagcacggcgaggactggggaaaggtgtacgacgaggcctgggagcggattgacaagaaagtggaaggcctgagcaagcacatcaagctggaagaggaacggagaagcgaggacgcccagagcaaggccgccctgaccgactggctgcgggctaaggccagcttcgtgatcgagggcctgaaggaggccgacaaggacgagttctgcagatgcgagctgaagctgcagaagtggtacggggacctgcggggaaagcccttcgccatcgaagccgagaacagcatcctggacatcagcggcttcagcaagcagtacaactgtgccttcatctggcagaaggacggcgtgaagaagctgaacctgtacctgatcatcaactacttcaagggcggcaagctgcggttcaagaagatcaaacctgaagccttcgaagccaacagattctacaccgtgatcaacaaaaagagcggcgagatcgtgcccatggaggtgaacttcaacttcgacgaccccaacctgatcatcctgcctctggcctttggcaagagacagggcagagaattcatctggaacgacctgctgtccctggaaaccggcagcctgaagctggccaacggaagagtgatcgagaagacactgtacaacagaagaacccggcaggatgagcctgccctgttcgtggccctgaccttcgagcggcgggaggtcctggactcctccaatatcaaaccaatgaacctgatcggcgtggcaagaggcgaaaacatccccgccgtgatcgccctgaccgaccccgagggctgcccactgagccggtttaaggatagcctgggaaacccaacccacatcctgagaatcggcgagagctataaggagaagcagcggaccatccaggccaagaaggaggtggagcagcggagagccggcggctacagccggaagtacgccagcaaagccaagaatctggcagacgatatggtgagaaacaccgctagagatctgctgtactacgccgtgacccaggatgccatgctgatcttcgccaacctgagccggggcttcggccggcagggcaagcggaccttcatggccgagagacagtacacacggatggaggactggctgaccgccaagctggcctacgagggcctgagcaagacctacctgtccaagacactggcccagtacacctccaagacatgcagcaactgtgggtttaccatcaccagcgccgactacgacagggtgctggagaagctgaagaagacagcaacaggctggatgaccacaattaacggcaaggagctgaaggtggagggccagattacctactacaacagatacaagagacagaacgtagtcaaggacctgtccgtcgagctggatagactgagcgaagaatctgtgaacaacgacatctcctcctggacaaagggcagaagcggagaagctctgagcctcctgaagaaaagattctcccatagacccgtgcaggagaagttcgtgtgcctgaactgcggcttcgagacacacgcagccgagcaagccgccctgaacatcgccagatcctggctgttcctgcggagccaggagtacaagaaataccagacaaacaagacaaccggcaacaccgataagagagccttcgtcgagacctggcagtccttttaccggaagaagcttaaggaggtgtggaaacctgccgtgcggtctggcggatctggcggaggctccacaagcagccagagcctggtgaccttcggcgacgtggccgtgaacttcagccaggaggagtgggagtggctgaacagcgcccagaggaacctgtacaggagcgtgatgctggagaactacaggaacctggtgagcctgggcctgtgcgtgagcaagcccgacatgatcagcagcctggagcagaggaaggagccctggatggtgaagaggaagctgaccaggggcaggtgccccgacctgaaggccgtgaccagccccaagaaaaagagaaaagtctaagctgccttctgcggggcttgccttctggccatgcccttcttctctcccttgcacctgtacctcttggtctttgaataaagcctgagtaggaaggctagcaaaaaaaaaaaaaaaaaaaaaaaaaaaaaaaaaaaaaaaaaaaaaaaaaaaaaaaaaaaaaaaaaaaaaaaaaaaaaaaa

SEQ ID NO: 2798 - RNA, 5419 nt, synthetic construct
  source 1..5419: mol_type = other RNA
aggaaataagagagaaaagaagagtaagaagaaatataagagccaccatggcccctaagaagaagcgtaaagtgagccgggtgaacggcagcggcagcggcggcggcatgaaccacgaccaggagttcgacccccctaaggtgtaccctcccgtccccgccgagaagagaaagcccatccgggtcctgagcctgttcgatggcatcgccaccggtctgctggtgctgaaggacctgggcatccaggtggataggtacattgcctccgaggtgtgcgaggactccatcaccgtgggaatggtgcgtcatcagggcaagatcatgtacgtgggcgacgtgcggagcgtgacacagaagcatatccaggagtggggccctttcgacctggtgatcggcggcagcccttgcaatgacctgagcatcgtgaacccagcccggaagggcctgtacgagggaaccggcagactgttcttcgagttttacagactgctgcacgacgcccggcctaaggaaggcgacgaccggcccttcttttggctgttcgagaatgtggtggccatgggagtcagcgacaagcgggatattagccggttcctggagagcaaccccgtgatgatcgatgccaaggaagtgagcgccgcccaccgggccagatacttctggggcaatctgcctggcatgaacagacccctggccagcaccgtgaacgacaagctggagctgcaggagtgcctggagcacggccggatcgccaagttcagcaaggtgagaaccatcaccacccgaagcaacagcatcaaacaaggcaaggaccagcactttcctgtgttcatgaacgagaaggaggacatcctgtggtgtaccgagatggagagagtgttcgggttcccagtccactacacagatgtcagcaacatgtctagactggccagacagagactgctgggaagaagctggtccgtccctgtgatcagacacctgttcgcccctctgaaggagtacttcgcctgcgtgagcagcggcaacagcaacgccaacagccggggccccagcttctctagcggcctggtgccactgtccctgagagggagccacatgggccccatggagatctacaaaaccgtgagcgcctggaagcggcagcctgtgcgcgtgctgagcctgtttcggaatatcgataaagtcctgaaaagcctgggattcctggagagcggctctggctccggcggtggcaccctgaagtacgtggaggatgtgacaaacgtggtcagacgggatgtggagaagtggggccccttcgatctggtgtacggcagcacccaacccctgggcagctcttgtgaccggtgccctggctggtacatgtttcagttccaccggatcctgcagtacgccctgccgagacaggagtcccagcggccattcttttggattttcatggacaacttgctgctgaccgaggatgaccaggaaactaccactcggttcctgcagaccgaagccgtgaccctgcaggacgtgagaggccgggactaccagaacgccatgcgggtgtggtccaacatccctggactgaaaagcaagcacgcacctctgacccctaaagaagaggagtacctgcaggcccaggtgcggagcagaagcaagctggacgcccctaaggtggatctgctggtgaagaattgcctcctgcccctgagagagtacttcaagtatttcagccagaatagtctgcccctgggcggcccaagcagcggcgcccctcctcccagcggcggcagcccagccggctccccaacctctaccgaggagggcacctctgagtccgccacccccgagagcggccctggcacctccaccgagcccagcgagggcagcgcacccggcagccctgccggcagccccacctccacagaggagggaaccagcaccgagcccagcgaaggcagcgccccaggcaccagcaccgagcctagtgagggcggctctggcggcggcagcgcccaggagattaaacggatcaacaagatcagaagaagacttgtgaaagacagcaacaccaagaaggccggcaagacaggccccatgaaaaccctgctggttagagtgatgacacccgatctgagagagcggctggaaaacctgagaaagaagcctgaaaatatcccccagcccatcagcaatacatctagagccaacctgaataagctgctgaccgattacaccgaaatgaagaaggcgatcctgcatgtgtactgggaagagttccagaaggaccctgtgggcctgatgagccgggtggcccagcctgccagcaagaagatcgatcagaacaagctgaaacctgagatggacgagaagggcaacctgaccaccgccggctttgcctgctctcagtgtggccagcccctgttcgtgtacaagctggagcaggtgtctgagaagggcaaggcttacaccaactacttcggacggtgcaatgtggccgagcacgaaaagctgatcctgctggcccagctgaagcccgagaaggatagcgacgaagccgtgacatatagcctgggaaagtttgggcagagggccctggatttctacagcattcatgtgaccaaggagtccacccaccccgtgaagcccctggcccagatcgccggaaacagatacgcctccggacctgtgggaaaggccctgagcgacgcatgtatgggcacaatcgcctccttcctgtctaagtaccaggacatcatcatcgaacaccagaaggtggtgaagggcaaccagaagagactggagagcctgcgggagctggccggcaaggaaaacctggaataccctagcgtgaccctgccacctcagcctcacaccaaggagggcgttgatgcctacaacgaagtgatcgcccgggtgcgaatgtgggtgaacctgaacctgtggcagaagctgaagctaagcagagatgatgccaagcctctgctgagactgaagggattcccttcctttcctctggtcgagagacaggccaacgaagtggactggtgggacatggtgtgtaacgtgaagaagctgatcaacgagaaaaaggaggatggcaaggtgttttggcagaatctggctggctacaagagacaggaagccctgagaccatacctgagcagcgaggaagatcggaagaagggaaagaaattcgctcggtaccagctgggcgacctgctgctgcacctggaaaagaagcacggcgaggactggggaaaggtgtacgacgaggcctgggagcggattgacaagaaagtggaaggcctgagcaagcacatcaagctggaagaggaacggagaagcgaggacgcccagagcaaggccgccctgaccgactggctgcgggctaaggccagcttcgtgatcgagggcctgaaggaggccgacaaggacgagttctgcagatgcgagctgaagctgcagaagtggtacggggacctgcggggaaagcccttcgccatcgaagccgagaacagcatcctggacatcagcggcttcagcaagcagtacaactgtgccttcatctggcagaaggacggcgtgaagaagctgaacctgtacctgatcatcaactacttcaagggcggcaagctgcggttcaagaagatcaaacctgaagccttcgaagccaacagattctacaccgtgatcaacaaaaagagcggcgagatcgtgcccatggaggtgaacttcaacttcgacgaccccaacctgatcatcctgcctctggcctttggcaagagacagggcagagaattcatctggaacgacctgctgtccctggaaaccggcagcctgaagctggccaacggaagagtgatcgagaagacactgtacaacagaagaacccggcaggatgagcctgccctgttcgtggccctgaccttcgagcggcgggaggtcctggactcctccaatatcaaaccaatgaacctgatcggcgtggcaagaggcgaaaacatccccgccgtgatcgccctgaccgaccccgagggctgcccactgagccggtttaaggatagcctgggaaacccaacccacatcctgagaatcggcgagagctataaggagaagcagcggaccatccaggccaagaaggaggtggagcagcggagagccggcggctacagccggaagtacgccagcaaagccaagaatctggcagacgatatggtgagaaacaccgctagagatctgctgtactacgccgtgacccaggatgccatgctgatcttcgccaacctgagccggggcttcggccggcagggcaagcggaccttcatggccgagagacagtacacacggatggaggactggctgaccgccaagctggcctacgagggcctgagcaagacctacctgtccaagacactggcccagtacacctccaagacatgcagcaactgtgggtttaccatcaccagcgccgactacgacagggtgctggagaagctgaagaagacagcaacaggctggatgaccacaattaacggcaaggagctgaaggtggagggccagattacctactacaacagatacaagagacagaacgtagtcaaggacctgtccgtcgagctggatagactgagcgaagaatctgtgaacaacgacatctcctcctggacaaagggcagaagcggagaagctctgagcctcctgaagaaaagattctcccatagacccgtgcaggagaagttcgtgtgcctgaactgcggcttcgagacacacgcagccgagcaagccgccctgaacatcgccagatcctggctgttcctgcggagccaggagtacaagaaataccagacaaacaagacaaccggcaacaccgataagagagccttcgtcgagacctggcagtccttttaccggaagaagcttaaggaggtgtggaaacctgccgtgcggtctggcggatctggcggaggctccacaagcgaggagctgcccgtggtgttcgaggacgtggccgtgtacttcaccagggaggagtggggcatgctggtgaagaggcagaaggagctgtacagggacgtgatgaggatgaactacgagctgctggccgccctgggccccgccgccgccaagcccgacctgatcagcaagctggagaggagggccgccccctggatcaaggaccccaacaggcccaagtggggcaagggcaggcccctgggcaagaccagccccaagaaaaagagaaaagtctaagctgccttctgcggggcttgccttctggccatgcccttcttctctcccttgcacctgtacctcttggtctttgaataaagcctgagtaggaaggctagcaaaaaaaaaaaaaaaaaaaaaaaaaaaaaaaaaaaaaaaaaaaaaaaaaaaaaaaaaaaaaaaaaaaaaaaaaaaaaaaa

SEQ ID NO: 2799 - RNA, 5419 nt, synthetic construct
  source 1..5419: mol_type = other RNA
aggaaataagagagaaaagaagagtaagaagaaatataagagccaccatggcccctaagaagaagcgtaaagtgagccgggtgaacggcagcggcagcggcggcggcatgaaccacgaccaggagttcgacccccctaaggtgtaccctcccgtccccgccgagaagagaaagcccatccgggtcctgagcctgttcgatggcatcgccaccggtctgctggtgctgaaggacctgggcatccaggtggataggtacattgcctccgaggtgtgcgaggactccatcaccgtgggaatggtgcgtcatcagggcaagatcatgtacgtgggcgacgtgcggagcgtgacacagaagcatatccaggagtggggccctttcgacctggtgatcggcggcagcccttgcaatgacctgagcatcgtgaacccagcccggaagggcctgtacgagggaaccggcagactgttcttcgagttttacagactgctgcacgacgcccggcctaaggaaggcgacgaccggcccttcttttggctgttcgagaatgtggtggccatgggagtcagcgacaagcgggatattagccggttcctggagagcaaccccgtgatgatcgatgccaaggaagtgagcgccgcccaccgggccagatacttctggggcaatctgcctggcatgaacagacccctggccagcaccgtgaacgacaagctggagctgcaggagtgcctggagcacggccggatcgccaagttcagcaaggtgagaaccatcaccacccgaagcaacagcatcaaacaaggcaaggaccagcactttcctgtgttcatgaacgagaaggaggacatcctgtggtgtaccgagatggagagagtgttcgggttcccagtccactacacagatgtcagcaacatgtctagactggccagacagagactgctgggaagaagctggtccgtccctgtgatcagacacctgttcgcccctctgaaggagtacttcgcctgcgtgagcagcggcaacagcaacgccaacagccggggccccagcttctctagcggcctggtgccactgtccctgagagggagccacatgggccccatggagatctacaaaaccgtgagcgcctggaagcggcagcctgtgcgcgtgctgagcctgtttcggaatatcgataaagtcctgaaaagcctgggattcctggagagcggctctggctccggcggtggcaccctgaagtacgtggaggatgtgacaaacgtggtcagacgggatgtggagaagtggggccccttcgatctggtgtacggcagcacccaacccctgggcagctcttgtgaccggtgccctggctggtacatgtttcagttccaccggatcctgcagtacgccctgccgagacaggagtcccagcggccattcttttggattttcatggacaacttgctgctgaccgaggatgaccaggaaactaccactcggttcctgcagaccgaagccgtgaccctgcaggacgtgagaggccgggactaccagaacgccatgcgggtgtggtccaacatccctggactgaaaagcaagcacgcacctctgacccctaaagaagaggagtacctgcaggcccaggtgcggagcagaagcaagctggacgcccctaaggtggatctgctggtgaagaattgcctcctgcccctgagagagtacttcaagtatttcagccagaatagtctgcccctgggcggcccaagcagcggcgcccctcctcccagcggcggcagcccagccggctccccaacctctaccgaggagggcacctctgagtccgccacccccgagagcggccctggcacctccaccgagcccagcgagggcagcgcacccggcagccctgccggcagccccacctccacagaggagggaaccagcaccgagcccagcgaaggcagcgccccaggcaccagcaccgagcctagtgagggcggctctggcggcggcagcgcccaggagattaaacggatcaacaagatcagaagaagacttgtgaaagacagcaacaccaagaaggccggcaagacaggccccatgaaaaccctgctggttagagtgatgacacccgatctgagagagcggctggaaaacctgagaaagaagcctgaaaatatcccccagcccatcagcaatacatctagagccaacctgaataagctgctgaccgattacaccgaaatgaagaaggcgatcctgcatgtgtactgggaagagttccagaaggaccctgtgggcctgatgagccgggtggcccagcctgccagcaagaagatcgatcagaacaagctgaaacctgagatggacgagaagggcaacctgaccaccgccggctttgcctgctctcagtgtggccagcccctgttcgtgtacaagctggagcaggtgtctgagaagggcaaggcttacaccaactacttcggacggtgcaatgtggccgagcacgaaaagctgatcctgctggcccagctgaagcccgagaaggatagcgacgaagccgtgacatatagcctgggaaagtttgggcagagggccctggatttctacagcattcatgtgaccaaggagtccacccaccccgtgaagcccctggcccagatcgccggaaacagatacgcctccggacctgtgggaaaggccctgagcgacgcatgtatgggcacaatcgcctccttcctgtctaagtaccaggacatcatcatcgaacaccagaaggtggtgaagggcaaccagaagagactggagagcctgcgggagctggccggcaaggaaaacctggaataccctagcgtgaccctgccacctcagcctcacaccaaggagggcgttgatgcctacaacgaagtgatcgcccgggtgcgaatgtgggtgaacctgaacctgtggcagaagctgaagctaagcagagatgatgccaagcctctgctgagactgaagggattcccttcctttcctctggtcgagagacaggccaacgaagtggactggtgggacatggtgtgtaacgtgaagaagctgatcaacgagaaaaaggaggatggcaaggtgttttggcagaatctggctggctacaagagacaggaagccctgagaccatacctgagcagcgaggaagatcggaagaagggaaagaaattcgctcggtaccagctgggcgacctgctgctgcacctggaaaagaagcacggcgaggactggggaaaggtgtacgacgaggcctgggagcggattgacaagaaagtggaaggcctgagcaagcacatcaagctggaagaggaacggagaagcgaggacgcccagagcaaggccgccctgaccgactggctgcgggctaaggccagcttcgtgatcgagggcctgaaggaggccgacaaggacgagttctgcagatgcgagctgaagctgcagaagtggtacggggacctgcggggaaagcccttcgccatcgaagccgagaacagcatcctggacatcagcggcttcagcaagcagtacaactgtgccttcatctggcagaaggacggcgtgaagaagctgaacctgtacctgatcatcaactacttcaagggcggcaagctgcggttcaagaagatcaaacctgaagccttcgaagccaacagattctacaccgtgatcaacaaaaagagcggcgagatcgtgcccatggaggtgaacttcaacttcgacgaccccaacctgatcatcctgcctctggcctttggcaagagacagggcagagaattcatctggaacgacctgctgtccctggaaaccggcagcctgaagctggccaacggaagagtgatcgagaagacactgtacaacagaagaacccggcaggatgagcctgccctgttcgtggccctgaccttcgagcggcgggaggtcctggactcctccaatatcaaaccaatgaacctgatcggcgtggcaagaggcgaaaacatccccgccgtgatcgccctgaccgaccccgagggctgcccactgagccggtttaaggatagcctgggaaacccaacccacatcctgagaatcggcgagagctataaggagaagcagcggaccatccaggccaagaaggaggtggagcagcggagagccggcggctacagccggaagtacgccagcaaagccaagaatctggcagacgatatggtgagaaacaccgctagagatctgctgtactacgccgtgacccaggatgccatgctgatcttcgccaacctgagccggggcttcggccggcagggcaagcggaccttcatggccgagagacagtacacacggatggaggactggctgaccgccaagctggcctacgagggcctgagcaagacctacctgtccaagacactggcccagtacacctccaagacatgcagcaactgtgggtttaccatcaccagcgccgactacgacagggtgctggagaagctgaagaagacagcaacaggctggatgaccacaattaacggcaaggagctgaaggtggagggccagattacctactacaacagatacaagagacagaacgtagtcaaggacctgtccgtcgagctggatagactgagcgaagaatctgtgaacaacgacatctcctcctggacaaagggcagaagcggagaagctctgagcctcctgaagaaaagattctcccatagacccgtgcaggagaagttcgtgtgcctgaactgcggcttcgagacacacgcagccgagcaagccgccctgaacatcgccagatcctggctgttcctgcggagccaggagtacaagaaataccagacaaacaagacaaccggcaacaccgataagagagccttcgtcgagacctggcagtccttttaccggaagaagcttaaggaggtgtggaaacctgccgtgcggtctggcggatctggcggaggctccacaagcccccagaagagcgtgaccttcgaggacgtggccgtgtacttcacccagaccgagtgggacggcctgagccccgcccagagggccctgtacagggacgtgatgctggagaactacggcaacgtggccagcctgggcttcagcctgctgaagcccgccgtgatcagccagctggagggcgccggcgagctgggcaggcccagccccctggtggccggcaccgagatcggcctgcagggcctgtggaccagccccaagaaaaagagaaaagtctaagctgccttctgcggggcttgccttctggccatgcccttcttctctcccttgcacctgtacctcttggtctttgaataaagcctgagtaggaaggctagcaaaaaaaaaaaaaaaaaaaaaaaaaaaaaaaaaaaaaaaaaaaaaaaaaaaaaaaaaaaaaaaaaaaaaaaaaaaaaaaa

SEQ ID NO: 2800 - RNA, 5419 nt, synthetic construct
  source 1..5419: mol_type = other RNA
aggaaataagagagaaaagaagagtaagaagaaatataagagccaccatggcccctaagaagaagcgtaaagtgagccgggtgaacggcagcggcagcggcggcggcatgaaccacgaccaggagttcgacccccctaaggtgtaccctcccgtccccgccgagaagagaaagcccatccgggtcctgagcctgttcgatggcatcgccaccggtctgctggtgctgaaggacctgggcatccaggtggataggtacattgcctccgaggtgtgcgaggactccatcaccgtgggaatggtgcgtcatcagggcaagatcatgtacgtgggcgacgtgcggagcgtgacacagaagcatatccaggagtggggccctttcgacctggtgatcggcggcagcccttgcaatgacctgagcatcgtgaacccagcccggaagggcctgtacgagggaaccggcagactgttcttcgagttttacagactgctgcacgacgcccggcctaaggaaggcgacgaccggcccttcttttggctgttcgagaatgtggtggccatgggagtcagcgacaagcgggatattagccggttcctggagagcaaccccgtgatgatcgatgccaaggaagtgagcgccgcccaccgggccagatacttctggggcaatctgcctggcatgaacagacccctggccagcaccgtgaacgacaagctggagctgcaggagtgcctggagcacggccggatcgccaagttcagcaaggtgagaaccatcaccacccgaagcaacagcatcaaacaaggcaaggaccagcactttcctgtgttcatgaacgagaaggaggacatcctgtggtgtaccgagatggagagagtgttcgggttcccagtccactacacagatgtcagcaacatgtctagactggccagacagagactgctgggaagaagctggtccgtccctgtgatcagacacctgttcgcccctctgaaggagtacttcgcctgcgtgagcagcggcaacagcaacgccaacagccggggccccagcttctctagcggcctggtgccactgtccctgagagggagccacatgggccccatggagatctacaaaaccgtgagcgcctggaagcggcagcctgtgcgcgtgctgagcctgtttcggaatatcgataaagtcctgaaaagcctgggattcctggagagcggctctggctccggcggtggcaccctgaagtacgtggaggatgtgacaaacgtggtcagacgggatgtggagaagtggggccccttcgatctggtgtacggcagcacccaacccctgggcagctcttgtgaccggtgccctggctggtacatgtttcagttccaccggatcctgcagtacgccctgccgagacaggagtcccagcggccattcttttggattttcatggacaacttgctgctgaccgaggatgaccaggaaactaccactcggttcctgcagaccgaagccgtgaccctgcaggacgtgagaggccgggactaccagaacgccatgcgggtgtggtccaacatccctggactgaaaagcaagcacgcacctctgacccctaaagaagaggagtacctgcaggcccaggtgcggagcagaagcaagctggacgcccctaaggtggatctgctggtgaagaattgcctcctgcccctgagagagtacttcaagtatttcagccagaatagtctgcccctgggcggcccaagcagcggcgcccctcctcccagcggcggcagcccagccggctccccaacctctaccgaggagggcacctctgagtccgccacccccgagagcggccctggcacctccaccgagcccagcgagggcagcgcacccggcagccctgccggcagccccacctccacagaggagggaaccagcaccgagcccagcgaaggcagcgccccaggcaccagcaccgagcctagtgagggcggctctggcggcggcagcgcccaggagattaaacggatcaacaagatcagaagaagacttgtgaaagacagcaacaccaagaaggccggcaagacaggccccatgaaaaccctgctggttagagtgatgacacccgatctgagagagcggctggaaaacctgagaaagaagcctgaaaatatcccccagcccatcagcaatacatctagagccaacctgaataagctgctgaccgattacaccgaaatgaagaaggcgatcctgcatgtgtactgggaagagttccagaaggaccctgtgggcctgatgagccgggtggcccagcctgccagcaagaagatcgatcagaacaagctgaaacctgagatggacgagaagggcaacctgaccaccgccggctttgcctgctctcagtgtggccagcccctgttcgtgtacaagctggagcaggtgtctgagaagggcaaggcttacaccaactacttcggacggtgcaatgtggccgagcacgaaaagctgatcctgctggcccagctgaagcccgagaaggatagcgacgaagccgtgacatatagcctgggaaagtttgggcagagggccctggatttctacagcattcatgtgaccaaggagtccacccaccccgtgaagcccctggcccagatcgccggaaacagatacgcctccggacctgtgggaaaggccctgagcgacgcatgtatgggcacaatcgcctccttcctgtctaagtaccaggacatcatcatcgaacaccagaaggtggtgaagggcaaccagaagagactggagagcctgcgggagctggccggcaaggaaaacctggaataccctagcgtgaccctgccacctcagcctcacaccaaggagggcgttgatgcctacaacgaagtgatcgcccgggtgcgaatgtgggtgaacctgaacctgtggcagaagctgaagctaagcagagatgatgccaagcctctgctgagactgaagggattcccttcctttcctctggtcgagagacaggccaacgaagtggactggtgggacatggtgtgtaacgtgaagaagctgatcaacgagaaaaaggaggatggcaaggtgttttggcagaatctggctggctacaagagacaggaagccctgagaccatacctgagcagcgaggaagatcggaagaagggaaagaaattcgctcggtaccagctgggcgacctgctgctgcacctggaaaagaagcacggcgaggactggggaaaggtgtacgacgaggcctgggagcggattgacaagaaagtggaaggcctgagcaagcacatcaagctggaagaggaacggagaagcgaggacgcccagagcaaggccgccctgaccgactggctgcgggctaaggccagcttcgtgatcgagggcctgaaggaggccgacaaggacgagttctgcagatgcgagctgaagctgcagaagtggtacggggacctgcggggaaagcccttcgccatcgaagccgagaacagcatcctggacatcagcggcttcagcaagcagtacaactgtgccttcatctggcagaaggacggcgtgaagaagctgaacctgtacctgatcatcaactacttcaagggcggcaagctgcggttcaagaagatcaaacctgaagccttcgaagccaacagattctacaccgtgatcaacaaaaagagcggcgagatcgtgcccatggaggtgaacttcaacttcgacgaccccaacctgatcatcctgcctctggcctttggcaagagacagggcagagaattcatctggaacgacctgctgtccctggaaaccggcagcctgaagctggccaacggaagagtgatcgagaagacactgtacaacagaagaacccggcaggatgagcctgccctgttcgtggccctgaccttcgagcggcgggaggtcctggactcctccaatatcaaaccaatgaacctgatcggcgtggcaagaggcgaaaacatccccgccgtgatcgccctgaccgaccccgagggctgcccactgagccggtttaaggatagcctgggaaacccaacccacatcctgagaatcggcgagagctataaggagaagcagcggaccatccaggccaagaaggaggtggagcagcggagagccggcggctacagccggaagtacgccagcaaagccaagaatctggcagacgatatggtgagaaacaccgctagagatctgctgtactacgccgtgacccaggatgccatgctgatcttcgccaacctgagccggggcttcggccggcagggcaagcggaccttcatggccgagagacagtacacacggatggaggactggctgaccgccaagctggcctacgagggcctgagcaagacctacctgtccaagacactggcccagtacacctccaagacatgcagcaactgtgggtttaccatcaccagcgccgactacgacagggtgctggagaagctgaagaagacagcaacaggctggatgaccacaattaacggcaaggagctgaaggtggagggccagattacctactacaacagatacaagagacagaacgtagtcaaggacctgtccgtcgagctggatagactgagcgaagaatctgtgaacaacgacatctcctcctggacaaagggcagaagcggagaagctctgagcctcctgaagaaaagattctcccatagacccgtgcaggagaagttcgtgtgcctgaactgcggcttcgagacacacgcagccgagcaagccgccctgaacatcgccagatcctggctgttcctgcggagccaggagtacaagaaataccagacaaacaagacaaccggcaacaccgataagagagccttcgtcgagacctggcagtccttttaccggaagaagcttaaggaggtgtggaaacctgccgtgcggtctggcggatctggcggaggctccacaagcgcccaggaggtggtgagcttcaaggacgtggccgtggacttcaccagggaggagtggaggctgctgagccccccccagaaggagctgtacaaggaggtgatgctggagaacgccaggaacctgctgagcgtgggcctgcccgcccccagcgaggaggtgatcagctacctggagcagagggaggccccctggatcctggagcaggagggcctgaggaactgctgcagcgagggcgagatcaggaccagccccaagaaaaagagaaaagtctaagctgccttctgcggggcttgccttctggccatgcccttcttctctcccttgcacctgtacctcttggtctttgaataaagcctgagtaggaaggctagcaaaaaaaaaaaaaaaaaaaaaaaaaaaaaaaaaaaaaaaaaaaaaaaaaaaaaaaaaaaaaaaaaaaaaaaaaaaaaaaa

SEQ ID NO: 2801 - RNA, 5419 nt, synthetic construct
  source 1..5419: mol_type = other RNA
aggaaataagagagaaaagaagagtaagaagaaatataagagccaccatggcccctaagaagaagcgtaaagtgagccgggtgaacggcagcggcagcggcggcggcatgaaccacgaccaggagttcgacccccctaaggtgtaccctcccgtccccgccgagaagagaaagcccatccgggtcctgagcctgttcgatggcatcgccaccggtctgctggtgctgaaggacctgggcatccaggtggataggtacattgcctccgaggtgtgcgaggactccatcaccgtgggaatggtgcgtcatcagggcaagatcatgtacgtgggcgacgtgcggagcgtgacacagaagcatatccaggagtggggccctttcgacctggtgatcggcggcagcccttgcaatgacctgagcatcgtgaacccagcccggaagggcctgtacgagggaaccggcagactgttcttcgagttttacagactgctgcacgacgcccggcctaaggaaggcgacgaccggcccttcttttggctgttcgagaatgtggtggccatgggagtcagcgacaagcgggatattagccggttcctggagagcaaccccgtgatgatcgatgccaaggaagtgagcgccgcccaccgggccagatacttctggggcaatctgcctggcatgaacagacccctggccagcaccgtgaacgacaagctggagctgcaggagtgcctggagcacggccggatcgccaagttcagcaaggtgagaaccatcaccacccgaagcaacagcatcaaacaaggcaaggaccagcactttcctgtgttcatgaacgagaaggaggacatcctgtggtgtaccgagatggagagagtgttcgggttcccagtccactacacagatgtcagcaacatgtctagactggccagacagagactgctgggaagaagctggtccgtccctgtgatcagacacctgttcgcccctctgaaggagtacttcgcctgcgtgagcagcggcaacagcaacgccaacagccggggccccagcttctctagcggcctggtgccactgtccctgagagggagccacatgggccccatggagatctacaaaaccgtgagcgcctggaagcggcagcctgtgcgcgtgctgagcctgtttcggaatatcgataaagtcctgaaaagcctgggattcctggagagcggctctggctccggcggtggcaccctgaagtacgtggaggatgtgacaaacgtggtcagacgggatgtggagaagtggggccccttcgatctggtgtacggcagcacccaacccctgggcagctcttgtgaccggtgccctggctggtacatgtttcagttccaccggatcctgcagtacgccctgccgagacaggagtcccagcggccattcttttggattttcatggacaacttgctgctgaccgaggatgaccaggaaactaccactcggttcctgcagaccgaagccgtgaccctgcaggacgtgagaggccgggactaccagaacgccatgcgggtgtggtccaacatccctggactgaaaagcaagcacgcacctctgacccctaaagaagaggagtacctgcaggcccaggtgcggagcagaagcaagctggacgcccctaaggtggatctgctggtgaagaattgcctcctgcccctgagagagtacttcaagtatttcagccagaatagtctgcccctgggcggcccaagcagcggcgcccctcctcccagcggcggcagcccagccggctccccaacctctaccgaggagggcacctctgagtccgccacccccgagagcggccctggcacctccaccgagcccagcgagggcagcgcacccggcagccctgccggcagccccacctccacagaggagggaaccagcaccgagcccagcgaaggcagcgccccaggcaccagcaccgagcctagtgagggcggctctggcggcggcagcgcccaggagattaaacggatcaacaagatcagaagaagacttgtgaaagacagcaacaccaagaaggccggcaagacaggccccatgaaaaccctgctggttagagtgatgacacccgatctgagagagcggctggaaaacctgagaaagaagcctgaaaatatcccccagcccatcagcaatacatctagagccaacctgaataagctgctgaccgattacaccgaaatgaagaaggcgatcctgcatgtgtactgggaagagttccagaaggaccctgtgggcctgatgagccgggtggcccagcctgccagcaagaagatcgatcagaacaagctgaaacctgagatggacgagaagggcaacctgaccaccgccggctttgcctgctctcagtgtggccagcccctgttcgtgtacaagctggagcaggtgtctgagaagggcaaggcttacaccaactacttcggacggtgcaatgtggccgagcacgaaaagctgatcctgctggcccagctgaagcccgagaaggatagcgacgaagccgtgacatatagcctgggaaagtttgggcagagggccctggatttctacagcattcatgtgaccaaggagtccacccaccccgtgaagcccctggcccagatcgccggaaacagatacgcctccggacctgtgggaaaggccctgagcgacgcatgtatgggcacaatcgcctccttcctgtctaagtaccaggacatcatcatcgaacaccagaaggtggtgaagggcaaccagaagagactggagagcctgcgggagctggccggcaaggaaaacctggaataccctagcgtgaccctgccacctcagcctcacaccaaggagggcgttgatgcctacaacgaagtgatcgcccgggtgcgaatgtgggtgaacctgaacctgtggcagaagctgaagctaagcagagatgatgccaagcctctgctgagactgaagggattcccttcctttcctctggtcgagagacaggccaacgaagtggactggtgggacatggtgtgtaacgtgaagaagctgatcaacgagaaaaaggaggatggcaaggtgttttggcagaatctggctggctacaagagacaggaagccctgagaccatacctgagcagcgaggaagatcggaagaagggaaagaaattcgctcggtaccagctgggcgacctgctgctgcacctggaaaagaagcacggcgaggactggggaaaggtgtacgacgaggcctgggagcggattgacaagaaagtggaaggcctgagcaagcacatcaagctggaagaggaacggagaagcgaggacgcccagagcaaggccgccctgaccgactggctgcgggctaaggccagcttcgtgatcgagggcctgaaggaggccgacaaggacgagttctgcagatgcgagctgaagctgcagaagtggtacggggacctgcggggaaagcccttcgccatcgaagccgagaacagcatcctggacatcagcggcttcagcaagcagtacaactgtgccttcatctggcagaaggacggcgtgaagaagctgaacctgtacctgatcatcaactacttcaagggcggcaagctgcggttcaagaagatcaaacctgaagccttcgaagccaacagattctacaccgtgatcaacaaaaagagcggcgagatcgtgcccatggaggtgaacttcaacttcgacgaccccaacctgatcatcctgcctctggcctttggcaagagacagggcagagaattcatctggaacgacctgctgtccctggaaaccggcagcctgaagctggccaacggaagagtgatcgagaagacactgtacaacagaagaacccggcaggatgagcctgccctgttcgtggccctgaccttcgagcggcgggaggtcctggactcctccaatatcaaaccaatgaacctgatcggcgtggcaagaggcgaaaacatccccgccgtgatcgccctgaccgaccccgagggctgcccactgagccggtttaaggatagcctgggaaacccaacccacatcctgagaatcggcgagagctataaggagaagcagcggaccatccaggccaagaaggaggtggagcagcggagagccggcggctacagccggaagtacgccagcaaagccaagaatctggcagacgatatggtgagaaacaccgctagagatctgctgtactacgccgtgacccaggatgccatgctgatcttcgccaacctgagccggggcttcggccggcagggcaagcggaccttcatggccgagagacagtacacacggatggaggactggctgaccgccaagctggcctacgagggcctgagcaagacctacctgtccaagacactggcccagtacacctccaagacatgcagcaactgtgggtttaccatcaccagcgccgactacgacagggtgctggagaagctgaagaagacagcaacaggctggatgaccacaattaacggcaaggagctgaaggtggagggccagattacctactacaacagatacaagagacagaacgtagtcaaggacctgtccgtcgagctggatagactgagcgaagaatctgtgaacaacgacatctcctcctggacaaagggcagaagcggagaagctctgagcctcctgaagaaaagattctcccatagacccgtgcaggagaagttcgtgtgcctgaactgcggcttcgagacacacgcagccgagcaagccgccctgaacatcgccagatcctggctgttcctgcggagccaggagtacaagaaataccagacaaacaagacaaccggcaacaccgataagagagccttcgtcgagacctggcagtccttttaccggaagaagcttaaggaggtgtggaaacctgccgtgcggtctggcggatctggcggaggctccacaagcatggccttcgaggacgtggccgtgtacttcagcagggaggagtgggagctgctggacaccgcccagagggccctgtacaggcacgtgatgctggagaacttcgccctggtggccagcctgggcttcagccccagcaggccctgcgtggtgatccagctggagagcggcaaggagccctggctgcacagcggcatggacaccaccatgagcaggcacgcccacaagaggcccagcagcggcagcaccagccccaagaaaaagagaaaagtctaagctgccttctgcggggcttgccttctggccatgcccttcttctctcccttgcacctgtacctcttggtctttgaataaagcctgagtaggaaggctagcaaaaaaaaaaaaaaaaaaaaaaaaaaaaaaaaaaaaaaaaaaaaaaaaaaaaaaaaaaaaaaaaaaaaaaaaaaaaaaaa

SEQ ID NO: 2802 - RNA, 5419 nt, synthetic construct
  source 1..5419: mol_type = other RNA
aggaaataagagagaaaagaagagtaagaagaaatataagagccaccatggcccctaagaagaagcgtaaagtgagccgggtgaacggcagcggcagcggcggcggcatgaaccacgaccaggagttcgacccccctaaggtgtaccctcccgtccccgccgagaagagaaagcccatccgggtcctgagcctgttcgatggcatcgccaccggtctgctggtgctgaaggacctgggcatccaggtggataggtacattgcctccgaggtgtgcgaggactccatcaccgtgggaatggtgcgtcatcagggcaagatcatgtacgtgggcgacgtgcggagcgtgacacagaagcatatccaggagtggggccctttcgacctggtgatcggcggcagcccttgcaatgacctgagcatcgtgaacccagcccggaagggcctgtacgagggaaccggcagactgttcttcgagttttacagactgctgcacgacgcccggcctaaggaaggcgacgaccggcccttcttttggctgttcgagaatgtggtggccatgggagtcagcgacaagcgggatattagccggttcctggagagcaaccccgtgatgatcgatgccaaggaagtgagcgccgcccaccgggccagatacttctggggcaatctgcctggcatgaacagacccctggccagcaccgtgaacgacaagctggagctgcaggagtgcctggagcacggccggatcgccaagttcagcaaggtgagaaccatcaccacccgaagcaacagcatcaaacaaggcaaggaccagcactttcctgtgttcatgaacgagaaggaggacatcctgtggtgtaccgagatggagagagtgttcgggttcccagtccactacacagatgtcagcaacatgtctagactggccagacagagactgctgggaagaagctggtccgtccctgtgatcagacacctgttcgcccctctgaaggagtacttcgcctgcgtgagcagcggcaacagcaacgccaacagccggggccccagcttctctagcggcctggtgccactgtccctgagagggagccacatgggccccatggagatctacaaaaccgtgagcgcctggaagcggcagcctgtgcgcgtgctgagcctgtttcggaatatcgataaagtcctgaaaagcctgggattcctggagagcggctctggctccggcggtggcaccctgaagtacgtggaggatgtgacaaacgtggtcagacgggatgtggagaagtggggccccttcgatctggtgtacggcagcacccaacccctgggcagctcttgtgaccggtgccctggctggtacatgtttcagttccaccggatcctgcagtacgccctgccgagacaggagtcccagcggccattcttttggattttcatggacaacttgctgctgaccgaggatgaccaggaaactaccactcggttcctgcagaccgaagccgtgaccctgcaggacgtgagaggccgggactaccagaacgccatgcgggtgtggtccaacatccctggactgaaaagcaagcacgcacctctgacccctaaagaagaggagtacctgcaggcccaggtgcggagcagaagcaagctggacgcccctaaggtggatctgctggtgaagaattgcctcctgcccctgagagagtacttcaagtatttcagccagaatagtctgcccctgggcggcccaagcagcggcgcccctcctcccagcggcggcagcccagccggctccccaacctctaccgaggagggcacctctgagtccgccacccccgagagcggccctggcacctccaccgagcccagcgagggcagcgcacccggcagccctgccggcagccccacctccacagaggagggaaccagcaccgagcccagcgaaggcagcgccccaggcaccagcaccgagcctagtgagggcggctctggcggcggcagcgcccaggagattaaacggatcaacaagatcagaagaagacttgtgaaagacagcaacaccaagaaggccggcaagacaggccccatgaaaaccctgctggttagagtgatgacacccgatctgagagagcggctggaaaacctgagaaagaagcctgaaaatatcccccagcccatcagcaatacatctagagccaacctgaataagctgctgaccgattacaccgaaatgaagaaggcgatcctgcatgtgtactgggaagagttccagaaggaccctgtgggcctgatgagccgggtggcccagcctgccagcaagaagatcgatcagaacaagctgaaacctgagatggacgagaagggcaacctgaccaccgccggctttgcctgctctcagtgtggccagcccctgttcgtgtacaagctggagcaggtgtctgagaagggcaaggcttacaccaactacttcggacggtgcaatgtggccgagcacgaaaagctgatcctgctggcccagctgaagcccgagaaggatagcgacgaagccgtgacatatagcctgggaaagtttgggcagagggccctggatttctacagcattcatgtgaccaaggagtccacccaccccgtgaagcccctggcccagatcgccggaaacagatacgcctccggacctgtgggaaaggccctgagcgacgcatgtatgggcacaatcgcctccttcctgtctaagtaccaggacatcatcatcgaacaccagaaggtggtgaagggcaaccagaagagactggagagcctgcgggagctggccggcaaggaaaacctggaataccctagcgtgaccctgccacctcagcctcacaccaaggagggcgttgatgcctacaacgaagtgatcgcccgggtgcgaatgtgggtgaacctgaacctgtggcagaagctgaagctaagcagagatgatgccaagcctctgctgagactgaagggattcccttcctttcctctggtcgagagacaggccaacgaagtggactggtgggacatggtgtgtaacgtgaagaagctgatcaacgagaaaaaggaggatggcaaggtgttttggcagaatctggctggctacaagagacaggaagccctgagaccatacctgagcagcgaggaagatcggaagaagggaaagaaattcgctcggtaccagctgggcgacctgctgctgcacctggaaaagaagcacggcgaggactggggaaaggtgtacgacgaggcctgggagcggattgacaagaaagtggaaggcctgagcaagcacatcaagctggaagaggaacggagaagcgaggacgcccagagcaaggccgccctgaccgactggctgcgggctaaggccagcttcgtgatcgagggcctgaaggaggccgacaaggacgagttctgcagatgcgagctgaagctgcagaagtggtacggggacctgcggggaaagcccttcgccatcgaagccgagaacagcatcctggacatcagcggcttcagcaagcagtacaactgtgccttcatctggcagaaggacggcgtgaagaagctgaacctgtacctgatcatcaactacttcaagggcggcaagctgcggttcaagaagatcaaacctgaagccttcgaagccaacagattctacaccgtgatcaacaaaaagagcggcgagatcgtgcccatggaggtgaacttcaacttcgacgaccccaacctgatcatcctgcctctggcctttggcaagagacagggcagagaattcatctggaacgacctgctgtccctggaaaccggcagcctgaagctggccaacggaagagtgatcgagaagacactgtacaacagaagaacccggcaggatgagcctgccctgttcgtggccctgaccttcgagcggcgggaggtcctggactcctccaatatcaaaccaatgaacctgatcggcgtggcaagaggcgaaaacatccccgccgtgatcgccctgaccgaccccgagggctgcccactgagccggtttaaggatagcctgggaaacccaacccacatcctgagaatcggcgagagctataaggagaagcagcggaccatccaggccaagaaggaggtggagcagcggagagccggcggctacagccggaagtacgccagcaaagccaagaatctggcagacgatatggtgagaaacaccgctagagatctgctgtactacgccgtgacccaggatgccatgctgatcttcgccaacctgagccggggcttcggccggcagggcaagcggaccttcatggccgagagacagtacacacggatggaggactggctgaccgccaagctggcctacgagggcctgagcaagacctacctgtccaagacactggcccagtacacctccaagacatgcagcaactgtgggtttaccatcaccagcgccgactacgacagggtgctggagaagctgaagaagacagcaacaggctggatgaccacaattaacggcaaggagctgaaggtggagggccagattacctactacaacagatacaagagacagaacgtagtcaaggacctgtccgtcgagctggatagactgagcgaagaatctgtgaacaacgacatctcctcctggacaaagggcagaagcggagaagctctgagcctcctgaagaaaagattctcccatagacccgtgcaggagaagttcgtgtgcctgaactgcggcttcgagacacacgcagccgagcaagccgccctgaacatcgccagatcctggctgttcctgcggagccaggagtacaagaaataccagacaaacaagacaaccggcaacaccgataagagagccttcgtcgagacctggcagtccttttaccggaagaagcttaaggaggtgtggaaacctgccgtgcggtctggcggatctggcggaggctccacaagcatgatcgagtaccagatccccgtgagcttcaaggacgtggtggtgggcttcacccaggaggagtggcaccagctgagccccgcccagagggccctgtacagggacgtgatgctggagacctacagcaacctggtgagcgtgggctacgagggcaccaagcccgacgtgatcctgaggctggagcaggaggaggccccctggatcggcgaggccgcctgccccggctgccactgctggggcatcaccagccccaagaaaaagagaaaagtctaagctgccttctgcggggcttgccttctggccatgcccttcttctctcccttgcacctgtacctcttggtctttgaataaagcctgagtaggaaggctagcaaaaaaaaaaaaaaaaaaaaaaaaaaaaaaaaaaaaaaaaaaaaaaaaaaaaaaaaaaaaaaaaaaaaaaaaaaaaaaaa

SEQ ID NO: 2803 - RNA, 5419 nt, synthetic construct
  source 1..5419: mol_type = other RNA
aggaaataagagagaaaagaagagtaagaagaaatataagagccaccatggcccctaagaagaagcgtaaagtgagccgggtgaacggcagcggcagcggcggcggcatgaaccacgaccaggagttcgacccccctaaggtgtaccctcccgtccccgccgagaagagaaagcccatccgggtcctgagcctgttcgatggcatcgccaccggtctgctggtgctgaaggacctgggcatccaggtggataggtacattgcctccgaggtgtgcgaggactccatcaccgtgggaatggtgcgtcatcagggcaagatcatgtacgtgggcgacgtgcggagcgtgacacagaagcatatccaggagtggggccctttcgacctggtgatcggcggcagcccttgcaatgacctgagcatcgtgaacccagcccggaagggcctgtacgagggaaccggcagactgttcttcgagttttacagactgctgcacgacgcccggcctaaggaaggcgacgaccggcccttcttttggctgttcgagaatgtggtggccatgggagtcagcgacaagcgggatattagccggttcctggagagcaaccccgtgatgatcgatgccaaggaagtgagcgccgcccaccgggccagatacttctggggcaatctgcctggcatgaacagacccctggccagcaccgtgaacgacaagctggagctgcaggagtgcctggagcacggccggatcgccaagttcagcaaggtgagaaccatcaccacccgaagcaacagcatcaaacaaggcaaggaccagcactttcctgtgttcatgaacgagaaggaggacatcctgtggtgtaccgagatggagagagtgttcgggttcccagtccactacacagatgtcagcaacatgtctagactggccagacagagactgctgggaagaagctggtccgtccctgtgatcagacacctgttcgcccctctgaaggagtacttcgcctgcgtgagcagcggcaacagcaacgccaacagccggggccccagcttctctagcggcctggtgccactgtccctgagagggagccacatgggccccatggagatctacaaaaccgtgagcgcctggaagcggcagcctgtgcgcgtgctgagcctgtttcggaatatcgataaagtcctgaaaagcctgggattcctggagagcggctctggctccggcggtggcaccctgaagtacgtggaggatgtgacaaacgtggtcagacgggatgtggagaagtggggccccttcgatctggtgtacggcagcacccaacccctgggcagctcttgtgaccggtgccctggctggtacatgtttcagttccaccggatcctgcagtacgccctgccgagacaggagtcccagcggccattcttttggattttcatggacaacttgctgctgaccgaggatgaccaggaaactaccactcggttcctgcagaccgaagccgtgaccctgcaggacgtgagaggccgggactaccagaacgccatgcgggtgtggtccaacatccctggactgaaaagcaagcacgcacctctgacccctaaagaagaggagtacctgcaggcccaggtgcggagcagaagcaagctggacgcccctaaggtggatctgctggtgaagaattgcctcctgcccctgagagagtacttcaagtatttcagccagaatagtctgcccctgggcggcccaagcagcggcgcccctcctcccagcggcggcagcccagccggctccccaacctctaccgaggagggcacctctgagtccgccacccccgagagcggccctggcacctccaccgagcccagcgagggcagcgcacccggcagccctgccggcagccccacctccacagaggagggaaccagcaccgagcccagcgaaggcagcgccccaggcaccagcaccgagcctagtgagggcggctctggcggcggcagcgcccaggagattaaacggatcaacaagatcagaagaagacttgtgaaagacagcaacaccaagaaggccggcaagacaggccccatgaaaaccctgctggttagagtgatgacacccgatctgagagagcggctggaaaacctgagaaagaagcctgaaaatatcccccagcccatcagcaatacatctagagccaacctgaataagctgctgaccgattacaccgaaatgaagaaggcgatcctgcatgtgtactgggaagagttccagaaggaccctgtgggcctgatgagccgggtggcccagcctgccagcaagaagatcgatcagaacaagctgaaacctgagatggacgagaagggcaacctgaccaccgccggctttgcctgctctcagtgtggccagcccctgttcgtgtacaagctggagcaggtgtctgagaagggcaaggcttacaccaactacttcggacggtgcaatgtggccgagcacgaaaagctgatcctgctggcccagctgaagcccgagaaggatagcgacgaagccgtgacatatagcctgggaaagtttgggcagagggccctggatttctacagcattcatgtgaccaaggagtccacccaccccgtgaagcccctggcccagatcgccggaaacagatacgcctccggacctgtgggaaaggccctgagcgacgcatgtatgggcacaatcgcctccttcctgtctaagtaccaggacatcatcatcgaacaccagaaggtggtgaagggcaaccagaagagactggagagcctgcgggagctggccggcaaggaaaacctggaataccctagcgtgaccctgccacctcagcctcacaccaaggagggcgttgatgcctacaacgaagtgatcgcccgggtgcgaatgtgggtgaacctgaacctgtggcagaagctgaagctaagcagagatgatgccaagcctctgctgagactgaagggattcccttcctttcctctggtcgagagacaggccaacgaagtggactggtgggacatggtgtgtaacgtgaagaagctgatcaacgagaaaaaggaggatggcaaggtgttttggcagaatctggctggctacaagagacaggaagccctgagaccatacctgagcagcgaggaagatcggaagaagggaaagaaattcgctcggtaccagctgggcgacctgctgctgcacctggaaaagaagcacggcgaggactggggaaaggtgtacgacgaggcctgggagcggattgacaagaaagtggaaggcctgagcaagcacatcaagctggaagaggaacggagaagcgaggacgcccagagcaaggccgccctgaccgactggctgcgggctaaggccagcttcgtgatcgagggcctgaaggaggccgacaaggacgagttctgcagatgcgagctgaagctgcagaagtggtacggggacctgcggggaaagcccttcgccatcgaagccgagaacagcatcctggacatcagcggcttcagcaagcagtacaactgtgccttcatctggcagaaggacggcgtgaagaagctgaacctgtacctgatcatcaactacttcaagggcggcaagctgcggttcaagaagatcaaacctgaagccttcgaagccaacagattctacaccgtgatcaacaaaaagagcggcgagatcgtgcccatggaggtgaacttcaacttcgacgaccccaacctgatcatcctgcctctggcctttggcaagagacagggcagagaattcatctggaacgacctgctgtccctggaaaccggcagcctgaagctggccaacggaagagtgatcgagaagacactgtacaacagaagaacccggcaggatgagcctgccctgttcgtggccctgaccttcgagcggcgggaggtcctggactcctccaatatcaaaccaatgaacctgatcggcgtggcaagaggcgaaaacatccccgccgtgatcgccctgaccgaccccgagggctgcccactgagccggtttaaggatagcctgggaaacccaacccacatcctgagaatcggcgagagctataaggagaagcagcggaccatccaggccaagaaggaggtggagcagcggagagccggcggctacagccggaagtacgccagcaaagccaagaatctggcagacgatatggtgagaaacaccgctagagatctgctgtactacgccgtgacccaggatgccatgctgatcttcgccaacctgagccggggcttcggccggcagggcaagcggaccttcatggccgagagacagtacacacggatggaggactggctgaccgccaagctggcctacgagggcctgagcaagacctacctgtccaagacactggcccagtacacctccaagacatgcagcaactgtgggtttaccatcaccagcgccgactacgacagggtgctggagaagctgaagaagacagcaacaggctggatgaccacaattaacggcaaggagctgaaggtggagggccagattacctactacaacagatacaagagacagaacgtagtcaaggacctgtccgtcgagctggatagactgagcgaagaatctgtgaacaacgacatctcctcctggacaaagggcagaagcggagaagctctgagcctcctgaagaaaagattctcccatagacccgtgcaggagaagttcgtgtgcctgaactgcggcttcgagacacacgcagccgagcaagccgccctgaacatcgccagatcctggctgttcctgcggagccaggagtacaagaaataccagacaaacaagacaaccggcaacaccgataagagagccttcgtcgagacctggcagtccttttaccggaagaagcttaaggaggtgtggaaacctgccgtgcggtctggcggatctggcggaggctccacaagcgcccaggtgcccgtgaccttcgaggacgtggccgtgtacttcagcagggaggagtgggccgccctggacggcaggcagaaggagctgtacagggacgtgatgaggggcaactacgagctggtggccagcctgggctgccccgccgccaagcccgacctgatctgccagatcgagagggacgaggagctgggcgtgggcgagccccagggcaggcccgtgaggaggcagccccagaggaggagcaccagccccaagaaaaagagaaaagtctaagctgccttctgcggggcttgccttctggccatgcccttcttctctcccttgcacctgtacctcttggtctttgaataaagcctgagtaggaaggctagcaaaaaaaaaaaaaaaaaaaaaaaaaaaaaaaaaaaaaaaaaaaaaaaaaaaaaaaaaaaaaaaaaaaaaaaaaaaaaaaa

SEQ ID NO: 2804 - RNA, 5419 nt, synthetic construct
  source 1..5419: mol_type = other RNA
aggaaataagagagaaaagaagagtaagaagaaatataagagccaccatggcccctaagaagaagcgtaaagtgagccgggtgaacggcagcggcagcggcggcggcatgaaccacgaccaggagttcgacccccctaaggtgtaccctcccgtccccgccgagaagagaaagcccatccgggtcctgagcctgttcgatggcatcgccaccggtctgctggtgctgaaggacctgggcatccaggtggataggtacattgcctccgaggtgtgcgaggactccatcaccgtgggaatggtgcgtcatcagggcaagatcatgtacgtgggcgacgtgcggagcgtgacacagaagcatatccaggagtggggccctttcgacctggtgatcggcggcagcccttgcaatgacctgagcatcgtgaacccagcccggaagggcctgtacgagggaaccggcagactgttcttcgagttttacagactgctgcacgacgcccggcctaaggaaggcgacgaccggcccttcttttggctgttcgagaatgtggtggccatgggagtcagcgacaagcgggatattagccggttcctggagagcaaccccgtgatgatcgatgccaaggaagtgagcgccgcccaccgggccagatacttctggggcaatctgcctggcatgaacagacccctggccagcaccgtgaacgacaagctggagctgcaggagtgcctggagcacggccggatcgccaagttcagcaaggtgagaaccatcaccacccgaagcaacagcatcaaacaaggcaaggaccagcactttcctgtgttcatgaacgagaaggaggacatcctgtggtgtaccgagatggagagagtgttcgggttcccagtccactacacagatgtcagcaacatgtctagactggccagacagagactgctgggaagaagctggtccgtccctgtgatcagacacctgttcgcccctctgaaggagtacttcgcctgcgtgagcagcggcaacagcaacgccaacagccggggccccagcttctctagcggcctggtgccactgtccctgagagggagccacatgggccccatggagatctacaaaaccgtgagcgcctggaagcggcagcctgtgcgcgtgctgagcctgtttcggaatatcgataaagtcctgaaaagcctgggattcctggagagcggctctggctccggcggtggcaccctgaagtacgtggaggatgtgacaaacgtggtcagacgggatgtggagaagtggggccccttcgatctggtgtacggcagcacccaacccctgggcagctcttgtgaccggtgccctggctggtacatgtttcagttccaccggatcctgcagtacgccctgccgagacaggagtcccagcggccattcttttggattttcatggacaacttgctgctgaccgaggatgaccaggaaactaccactcggttcctgcagaccgaagccgtgaccctgcaggacgtgagaggccgggactaccagaacgccatgcgggtgtggtccaacatccctggactgaaaagcaagcacgcacctctgacccctaaagaagaggagtacctgcaggcccaggtgcggagcagaagcaagctggacgcccctaaggtggatctgctggtgaagaattgcctcctgcccctgagagagtacttcaagtatttcagccagaatagtctgcccctgggcggcccaagcagcggcgcccctcctcccagcggcggcagcccagccggctccccaacctctaccgaggagggcacctctgagtccgccacccccgagagcggccctggcacctccaccgagcccagcgagggcagcgcacccggcagccctgccggcagccccacctccacagaggagggaaccagcaccgagcccagcgaaggcagcgccccaggcaccagcaccgagcctagtgagggcggctctggcggcggcagcgcccaggagattaaacggatcaacaagatcagaagaagacttgtgaaagacagcaacaccaagaaggccggcaagacaggccccatgaaaaccctgctggttagagtgatgacacccgatctgagagagcggctggaaaacctgagaaagaagcctgaaaatatcccccagcccatcagcaatacatctagagccaacctgaataagctgctgaccgattacaccgaaatgaagaaggcgatcctgcatgtgtactgggaagagttccagaaggaccctgtgggcctgatgagccgggtggcccagcctgccagcaagaagatcgatcagaacaagctgaaacctgagatggacgagaagggcaacctgaccaccgccggctttgcctgctctcagtgtggccagcccctgttcgtgtacaagctggagcaggtgtctgagaagggcaaggcttacaccaactacttcggacggtgcaatgtggccgagcacgaaaagctgatcctgctggcccagctgaagcccgagaaggatagcgacgaagccgtgacatatagcctgggaaagtttgggcagagggccctggatttctacagcattcatgtgaccaaggagtccacccaccccgtgaagcccctggcccagatcgccggaaacagatacgcctccggacctgtgggaaaggccctgagcgacgcatgtatgggcacaatcgcctccttcctgtctaagtaccaggacatcatcatcgaacaccagaaggtggtgaagggcaaccagaagagactggagagcctgcgggagctggccggcaaggaaaacctggaataccctagcgtgaccctgccacctcagcctcacaccaaggagggcgttgatgcctacaacgaagtgatcgcccgggtgcgaatgtgggtgaacctgaacctgtggcagaagctgaagctaagcagagatgatgccaagcctctgctgagactgaagggattcccttcctttcctctggtcgagagacaggccaacgaagtggactggtgggacatggtgtgtaacgtgaagaagctgatcaacgagaaaaaggaggatggcaaggtgttttggcagaatctggctggctacaagagacaggaagccctgagaccatacctgagcagcgaggaagatcggaagaagggaaagaaattcgctcggtaccagctgggcgacctgctgctgcacctggaaaagaagcacggcgaggactggggaaaggtgtacgacgaggcctgggagcggattgacaagaaagtggaaggcctgagcaagcacatcaagctggaagaggaacggagaagcgaggacgcccagagcaaggccgccctgaccgactggctgcgggctaaggccagcttcgtgatcgagggcctgaaggaggccgacaaggacgagttctgcagatgcgagctgaagctgcagaagtggtacggggacctgcggggaaagcccttcgccatcgaagccgagaacagcatcctggacatcagcggcttcagcaagcagtacaactgtgccttcatctggcagaaggacggcgtgaagaagctgaacctgtacctgatcatcaactacttcaagggcggcaagctgcggttcaagaagatcaaacctgaagccttcgaagccaacagattctacaccgtgatcaacaaaaagagcggcgagatcgtgcccatggaggtgaacttcaacttcgacgaccccaacctgatcatcctgcctctggcctttggcaagagacagggcagagaattcatctggaacgacctgctgtccctggaaaccggcagcctgaagctggccaacggaagagtgatcgagaagacactgtacaacagaagaacccggcaggatgagcctgccctgttcgtggccctgaccttcgagcggcgggaggtcctggactcctccaatatcaaaccaatgaacctgatcggcgtggcaagaggcgaaaacatccccgccgtgatcgccctgaccgaccccgagggctgcccactgagccggtttaaggatagcctgggaaacccaacccacatcctgagaatcggcgagagctataaggagaagcagcggaccatccaggccaagaaggaggtggagcagcggagagccggcggctacagccggaagtacgccagcaaagccaagaatctggcagacgatatggtgagaaacaccgctagagatctgctgtactacgccgtgacccaggatgccatgctgatcttcgccaacctgagccggggcttcggccggcagggcaagcggaccttcatggccgagagacagtacacacggatggaggactggctgaccgccaagctggcctacgagggcctgagcaagacctacctgtccaagacactggcccagtacacctccaagacatgcagcaactgtgggtttaccatcaccagcgccgactacgacagggtgctggagaagctgaagaagacagcaacaggctggatgaccacaattaacggcaaggagctgaaggtggagggccagattacctactacaacagatacaagagacagaacgtagtcaaggacctgtccgtcgagctggatagactgagcgaagaatctgtgaacaacgacatctcctcctggacaaagggcagaagcggagaagctctgagcctcctgaagaaaagattctcccatagacccgtgcaggagaagttcgtgtgcctgaactgcggcttcgagacacacgcagccgagcaagccgccctgaacatcgccagatcctggctgttcctgcggagccaggagtacaagaaataccagacaaacaagacaaccggcaacaccgataagagagccttcgtcgagacctggcagtccttttaccggaagaagcttaaggaggtgtggaaacctgccgtgcggtctggcggatctggcggaggctccacaagcgcccagggcagcgtgatgttcaacgacgtgagcatcgtgttcagccaggaggagtgggagtacctggacctggagcagaaggacctgtacagggacgtgatgctggagaactacagcaacctggtgagcctgggctgcttcatcagcaagcccgacgtgatcagcctgctggagcagggcaaggagccctggaaggtggtgaggaagggcaggaggaggtacctggacctggagaacaggtacaccagccccaagaaaaagagaaaagtctaagctgccttctgcggggcttgccttctggccatgcccttcttctctcccttgcacctgtacctcttggtctttgaataaagcctgagtaggaaggctagcaaaaaaaaaaaaaaaaaaaaaaaaaaaaaaaaaaaaaaaaaaaaaaaaaaaaaaaaaaaaaaaaaaaaaaaaaaaaaaaa

SEQ ID NO: 2805 - RNA, 5419 nt, synthetic construct
  source 1..5419: mol_type = other RNA
aggaaataagagagaaaagaagagtaagaagaaatataagagccaccatggcccctaagaagaagcgtaaagtgagccgggtgaacggcagcggcagcggcggcggcatgaaccacgaccaggagttcgacccccctaaggtgtaccctcccgtccccgccgagaagagaaagcccatccgggtcctgagcctgttcgatggcatcgccaccggtctgctggtgctgaaggacctgggcatccaggtggataggtacattgcctccgaggtgtgcgaggactccatcaccgtgggaatggtgcgtcatcagggcaagatcatgtacgtgggcgacgtgcggagcgtgacacagaagcatatccaggagtggggccctttcgacctggtgatcggcggcagcccttgcaatgacctgagcatcgtgaacccagcccggaagggcctgtacgagggaaccggcagactgttcttcgagttttacagactgctgcacgacgcccggcctaaggaaggcgacgaccggcccttcttttggctgttcgagaatgtggtggccatgggagtcagcgacaagcgggatattagccggttcctggagagcaaccccgtgatgatcgatgccaaggaagtgagcgccgcccaccgggccagatacttctggggcaatctgcctggcatgaacagacccctggccagcaccgtgaacgacaagctggagctgcaggagtgcctggagcacggccggatcgccaagttcagcaaggtgagaaccatcaccacccgaagcaacagcatcaaacaaggcaaggaccagcactttcctgtgttcatgaacgagaaggaggacatcctgtggtgtaccgagatggagagagtgttcgggttcccagtccactacacagatgtcagcaacatgtctagactggccagacagagactgctgggaagaagctggtccgtccctgtgatcagacacctgttcgcccctctgaaggagtacttcgcctgcgtgagcagcggcaacagcaacgccaacagccggggccccagcttctctagcggcctggtgccactgtccctgagagggagccacatgggccccatggagatctacaaaaccgtgagcgcctggaagcggcagcctgtgcgcgtgctgagcctgtttcggaatatcgataaagtcctgaaaagcctgggattcctggagagcggctctggctccggcggtggcaccctgaagtacgtggaggatgtgacaaacgtggtcagacgggatgtggagaagtggggccccttcgatctggtgtacggcagcacccaacccctgggcagctcttgtgaccggtgccctggctggtacatgtttcagttccaccggatcctgcagtacgccctgccgagacaggagtcccagcggccattcttttggattttcatggacaacttgctgctgaccgaggatgaccaggaaactaccactcggttcctgcagaccgaagccgtgaccctgcaggacgtgagaggccgggactaccagaacgccatgcgggtgtggtccaacatccctggactgaaaagcaagcacgcacctctgacccctaaagaagaggagtacctgcaggcccaggtgcggagcagaagcaagctggacgcccctaaggtggatctgctggtgaagaattgcctcctgcccctgagagagtacttcaagtatttcagccagaatagtctgcccctgggcggcccaagcagcggcgcccctcctcccagcggcggcagcccagccggctccccaacctctaccgaggagggcacctctgagtccgccacccccgagagcggccctggcacctccaccgagcccagcgagggcagcgcacccggcagccctgccggcagccccacctccacagaggagggaaccagcaccgagcccagcgaaggcagcgccccaggcaccagcaccgagcctagtgagggcggctctggcggcggcagcgcccaggagattaaacggatcaacaagatcagaagaagacttgtgaaagacagcaacaccaagaaggccggcaagacaggccccatgaaaaccctgctggttagagtgatgacacccgatctgagagagcggctggaaaacctgagaaagaagcctgaaaatatcccccagcccatcagcaatacatctagagccaacctgaataagctgctgaccgattacaccgaaatgaagaaggcgatcctgcatgtgtactgggaagagttccagaaggaccctgtgggcctgatgagccgggtggcccagcctgccagcaagaagatcgatcagaacaagctgaaacctgagatggacgagaagggcaacctgaccaccgccggctttgcctgctctcagtgtggccagcccctgttcgtgtacaagctggagcaggtgtctgagaagggcaaggcttacaccaactacttcggacggtgcaatgtggccgagcacgaaaagctgatcctgctggcccagctgaagcccgagaaggatagcgacgaagccgtgacatatagcctgggaaagtttgggcagagggccctggatttctacagcattcatgtgaccaaggagtccacccaccccgtgaagcccctggcccagatcgccggaaacagatacgcctccggacctgtgggaaaggccctgagcgacgcatgtatgggcacaatcgcctccttcctgtctaagtaccaggacatcatcatcgaacaccagaaggtggtgaagggcaaccagaagagactggagagcctgcgggagctggccggcaaggaaaacctggaataccctagcgtgaccctgccacctcagcctcacaccaaggagggcgttgatgcctacaacgaagtgatcgcccgggtgcgaatgtgggtgaacctgaacctgtggcagaagctgaagctaagcagagatgatgccaagcctctgctgagactgaagggattcccttcctttcctctggtcgagagacaggccaacgaagtggactggtgggacatggtgtgtaacgtgaagaagctgatcaacgagaaaaaggaggatggcaaggtgttttggcagaatctggctggctacaagagacaggaagccctgagaccatacctgagcagcgaggaagatcggaagaagggaaagaaattcgctcggtaccagctgggcgacctgctgctgcacctggaaaagaagcacggcgaggactggggaaaggtgtacgacgaggcctgggagcggattgacaagaaagtggaaggcctgagcaagcacatcaagctggaagaggaacggagaagcgaggacgcccagagcaaggccgccctgaccgactggctgcgggctaaggccagcttcgtgatcgagggcctgaaggaggccgacaaggacgagttctgcagatgcgagctgaagctgcagaagtggtacggggacctgcggggaaagcccttcgccatcgaagccgagaacagcatcctggacatcagcggcttcagcaagcagtacaactgtgccttcatctggcagaaggacggcgtgaagaagctgaacctgtacctgatcatcaactacttcaagggcggcaagctgcggttcaagaagatcaaacctgaagccttcgaagccaacagattctacaccgtgatcaacaaaaagagcggcgagatcgtgcccatggaggtgaacttcaacttcgacgaccccaacctgatcatcctgcctctggcctttggcaagagacagggcagagaattcatctggaacgacctgctgtccctggaaaccggcagcctgaagctggccaacggaagagtgatcgagaagacactgtacaacagaagaacccggcaggatgagcctgccctgttcgtggccctgaccttcgagcggcgggaggtcctggactcctccaatatcaaaccaatgaacctgatcggcgtggcaagaggcgaaaacatccccgccgtgatcgccctgaccgaccccgagggctgcccactgagccggtttaaggatagcctgggaaacccaacccacatcctgagaatcggcgagagctataaggagaagcagcggaccatccaggccaagaaggaggtggagcagcggagagccggcggctacagccggaagtacgccagcaaagccaagaatctggcagacgatatggtgagaaacaccgctagagatctgctgtactacgccgtgacccaggatgccatgctgatcttcgccaacctgagccggggcttcggccggcagggcaagcggaccttcatggccgagagacagtacacacggatggaggactggctgaccgccaagctggcctacgagggcctgagcaagacctacctgtccaagacactggcccagtacacctccaagacatgcagcaactgtgggtttaccatcaccagcgccgactacgacagggtgctggagaagctgaagaagacagcaacaggctggatgaccacaattaacggcaaggagctgaaggtggagggccagattacctactacaacagatacaagagacagaacgtagtcaaggacctgtccgtcgagctggatagactgagcgaagaatctgtgaacaacgacatctcctcctggacaaagggcagaagcggagaagctctgagcctcctgaagaaaagattctcccatagacccgtgcaggagaagttcgtgtgcctgaactgcggcttcgagacacacgcagccgagcaagccgccctgaacatcgccagatcctggctgttcctgcggagccaggagtacaagaaataccagacaaacaagacaaccggcaacaccgataagagagccttcgtcgagacctggcagtccttttaccggaagaagcttaaggaggtgtggaaacctgccgtgcggtctggcggatctggcggaggctccacaagcccccagaagagcgtgaccttcgaggacgtggccgtgtacttcacccagaccgagtgggacggcctgagccccgcccagagggccctgtacagggacgtgatgctggagaactacggcaacgtggccagcctgggcttccccctgctgaagcccaccgtgatcagccagctggagggcggcggcgagctggagggccccagccccctggccagcggcaccggcaccggcccccagggcctgtggaccagccccaagaaaaagagaaaagtctaagctgccttctgcggggcttgccttctggccatgcccttcttctctcccttgcacctgtacctcttggtctttgaataaagcctgagtaggaaggctagcaaaaaaaaaaaaaaaaaaaaaaaaaaaaaaaaaaaaaaaaaaaaaaaaaaaaaaaaaaaaaaaaaaaaaaaaaaaaaaaa

SEQ ID NO: 2806 - RNA, 5419 nt, synthetic construct
  source 1..5419: mol_type = other RNA
aggaaataagagagaaaagaagagtaagaagaaatataagagccaccatggcccctaagaagaagcgtaaagtgagccgggtgaacggcagcggcagcggcggcggcatgaaccacgaccaggagttcgacccccctaaggtgtaccctcccgtccccgccgagaagagaaagcccatccgggtcctgagcctgttcgatggcatcgccaccggtctgctggtgctgaaggacctgggcatccaggtggataggtacattgcctccgaggtgtgcgaggactccatcaccgtgggaatggtgcgtcatcagggcaagatcatgtacgtgggcgacgtgcggagcgtgacacagaagcatatccaggagtggggccctttcgacctggtgatcggcggcagcccttgcaatgacctgagcatcgtgaacccagcccggaagggcctgtacgagggaaccggcagactgttcttcgagttttacagactgctgcacgacgcccggcctaaggaaggcgacgaccggcccttcttttggctgttcgagaatgtggtggccatgggagtcagcgacaagcgggatattagccggttcctggagagcaaccccgtgatgatcgatgccaaggaagtgagcgccgcccaccgggccagatacttctggggcaatctgcctggcatgaacagacccctggccagcaccgtgaacgacaagctggagctgcaggagtgcctggagcacggccggatcgccaagttcagcaaggtgagaaccatcaccacccgaagcaacagcatcaaacaaggcaaggaccagcactttcctgtgttcatgaacgagaaggaggacatcctgtggtgtaccgagatggagagagtgttcgggttcccagtccactacacagatgtcagcaacatgtctagactggccagacagagactgctgggaagaagctggtccgtccctgtgatcagacacctgttcgcccctctgaaggagtacttcgcctgcgtgagcagcggcaacagcaacgccaacagccggggccccagcttctctagcggcctggtgccactgtccctgagagggagccacatgggccccatggagatctacaaaaccgtgagcgcctggaagcggcagcctgtgcgcgtgctgagcctgtttcggaatatcgataaagtcctgaaaagcctgggattcctggagagcggctctggctccggcggtggcaccctgaagtacgtggaggatgtgacaaacgtggtcagacgggatgtggagaagtggggccccttcgatctggtgtacggcagcacccaacccctgggcagctcttgtgaccggtgccctggctggtacatgtttcagttccaccggatcctgcagtacgccctgccgagacaggagtcccagcggccattcttttggattttcatggacaacttgctgctgaccgaggatgaccaggaaactaccactcggttcctgcagaccgaagccgtgaccctgcaggacgtgagaggccgggactaccagaacgccatgcgggtgtggtccaacatccctggactgaaaagcaagcacgcacctctgacccctaaagaagaggagtacctgcaggcccaggtgcggagcagaagcaagctggacgcccctaaggtggatctgctggtgaagaattgcctcctgcccctgagagagtacttcaagtatttcagccagaatagtctgcccctgggcggcccaagcagcggcgcccctcctcccagcggcggcagcccagccggctccccaacctctaccgaggagggcacctctgagtccgccacccccgagagcggccctggcacctccaccgagcccagcgagggcagcgcacccggcagccctgccggcagccccacctccacagaggagggaaccagcaccgagcccagcgaaggcagcgccccaggcaccagcaccgagcctagtgagggcggctctggcggcggcagcgcccaggagattaaacggatcaacaagatcagaagaagacttgtgaaagacagcaacaccaagaaggccggcaagacaggccccatgaaaaccctgctggttagagtgatgacacccgatctgagagagcggctggaaaacctgagaaagaagcctgaaaatatcccccagcccatcagcaatacatctagagccaacctgaataagctgctgaccgattacaccgaaatgaagaaggcgatcctgcatgtgtactgggaagagttccagaaggaccctgtgggcctgatgagccgggtggcccagcctgccagcaagaagatcgatcagaacaagctgaaacctgagatggacgagaagggcaacctgaccaccgccggctttgcctgctctcagtgtggccagcccctgttcgtgtacaagctggagcaggtgtctgagaagggcaaggcttacaccaactacttcggacggtgcaatgtggccgagcacgaaaagctgatcctgctggcccagctgaagcccgagaaggatagcgacgaagccgtgacatatagcctgggaaagtttgggcagagggccctggatttctacagcattcatgtgaccaaggagtccacccaccccgtgaagcccctggcccagatcgccggaaacagatacgcctccggacctgtgggaaaggccctgagcgacgcatgtatgggcacaatcgcctccttcctgtctaagtaccaggacatcatcatcgaacaccagaaggtggtgaagggcaaccagaagagactggagagcctgcgggagctggccggcaaggaaaacctggaataccctagcgtgaccctgccacctcagcctcacaccaaggagggcgttgatgcctacaacgaagtgatcgcccgggtgcgaatgtgggtgaacctgaacctgtggcagaagctgaagctaagcagagatgatgccaagcctctgctgagactgaagggattcccttcctttcctctggtcgagagacaggccaacgaagtggactggtgggacatggtgtgtaacgtgaagaagctgatcaacgagaaaaaggaggatggcaaggtgttttggcagaatctggctggctacaagagacaggaagccctgagaccatacctgagcagcgaggaagatcggaagaagggaaagaaattcgctcggtaccagctgggcgacctgctgctgcacctggaaaagaagcacggcgaggactggggaaaggtgtacgacgaggcctgggagcggattgacaagaaagtggaaggcctgagcaagcacatcaagctggaagaggaacggagaagcgaggacgcccagagcaaggccgccctgaccgactggctgcgggctaaggccagcttcgtgatcgagggcctgaaggaggccgacaaggacgagttctgcagatgcgagctgaagctgcagaagtggtacggggacctgcggggaaagcccttcgccatcgaagccgagaacagcatcctggacatcagcggcttcagcaagcagtacaactgtgccttcatctggcagaaggacggcgtgaagaagctgaacctgtacctgatcatcaactacttcaagggcggcaagctgcggttcaagaagatcaaacctgaagccttcgaagccaacagattctacaccgtgatcaacaaaaagagcggcgagatcgtgcccatggaggtgaacttcaacttcgacgaccccaacctgatcatcctgcctctggcctttggcaagagacagggcagagaattcatctggaacgacctgctgtccctggaaaccggcagcctgaagctggccaacggaagagtgatcgagaagacactgtacaacagaagaacccggcaggatgagcctgccctgttcgtggccctgaccttcgagcggcgggaggtcctggactcctccaatatcaaaccaatgaacctgatcggcgtggcaagaggcgaaaacatccccgccgtgatcgccctgaccgaccccgagggctgcccactgagccggtttaaggatagcctgggaaacccaacccacatcctgagaatcggcgagagctataaggagaagcagcggaccatccaggccaagaaggaggtggagcagcggagagccggcggctacagccggaagtacgccagcaaagccaagaatctggcagacgatatggtgagaaacaccgctagagatctgctgtactacgccgtgacccaggatgccatgctgatcttcgccaacctgagccggggcttcggccggcagggcaagcggaccttcatggccgagagacagtacacacggatggaggactggctgaccgccaagctggcctacgagggcctgagcaagacctacctgtccaagacactggcccagtacacctccaagacatgcagcaactgtgggtttaccatcaccagcgccgactacgacagggtgctggagaagctgaagaagacagcaacaggctggatgaccacaattaacggcaaggagctgaaggtggagggccagattacctactacaacagatacaagagacagaacgtagtcaaggacctgtccgtcgagctggatagactgagcgaagaatctgtgaacaacgacatctcctcctggacaaagggcagaagcggagaagctctgagcctcctgaagaaaagattctcccatagacccgtgcaggagaagttcgtgtgcctgaactgcggcttcgagacacacgcagccgagcaagccgccctgaacatcgccagatcctggctgttcctgcggagccaggagtacaagaaataccagacaaacaagacaaccggcaacaccgataagagagccttcgtcgagacctggcagtccttttaccggaagaagcttaaggaggtgtggaaacctgccgtgcggtctggcggatctggcggaggctccacaagcgtgcaggagcccgtgaccttcaaggacgtggccgtggacttcacccaggaggagtggggccagctggacctggtgcagaggaccctgtacagggacgtgatgctggagacctacggccacctgctgagcgtgggcaaccagatcgccaagcccgaggtgatcagcctgctggagcagggcgaggagccctggagcgtggagcaggcctgcccccagaggacctgcagcgagtgggtgaggaacaccagccccaagaaaaagagaaaagtctaagctgccttctgcggggcttgccttctggccatgcccttcttctctcccttgcacctgtacctcttggtctttgaataaagcctgagtaggaaggctagcaaaaaaaaaaaaaaaaaaaaaaaaaaaaaaaaaaaaaaaaaaaaaaaaaaaaaaaaaaaaaaaaaaaaaaaaaaaaaaaa

SEQ ID NO: 2807 - RNA, 5419 nt, synthetic construct
  source 1..5419: mol_type = other RNA
aggaaataagagagaaaagaagagtaagaagaaatataagagccaccatggcccctaagaagaagcgtaaagtgagccgggtgaacggcagcggcagcggcggcggcatgaaccacgaccaggagttcgacccccctaaggtgtaccctcccgtccccgccgagaagagaaagcccatccgggtcctgagcctgttcgatggcatcgccaccggtctgctggtgctgaaggacctgggcatccaggtggataggtacattgcctccgaggtgtgcgaggactccatcaccgtgggaatggtgcgtcatcagggcaagatcatgtacgtgggcgacgtgcggagcgtgacacagaagcatatccaggagtggggccctttcgacctggtgatcggcggcagcccttgcaatgacctgagcatcgtgaacccagcccggaagggcctgtacgagggaaccggcagactgttcttcgagttttacagactgctgcacgacgcccggcctaaggaaggcgacgaccggcccttcttttggctgttcgagaatgtggtggccatgggagtcagcgacaagcgggatattagccggttcctggagagcaaccccgtgatgatcgatgccaaggaagtgagcgccgcccaccgggccagatacttctggggcaatctgcctggcatgaacagacccctggccagcaccgtgaacgacaagctggagctgcaggagtgcctggagcacggccggatcgccaagttcagcaaggtgagaaccatcaccacccgaagcaacagcatcaaacaaggcaaggaccagcactttcctgtgttcatgaacgagaaggaggacatcctgtggtgtaccgagatggagagagtgttcgggttcccagtccactacacagatgtcagcaacatgtctagactggccagacagagactgctgggaagaagctggtccgtccctgtgatcagacacctgttcgcccctctgaaggagtacttcgcctgcgtgagcagcggcaacagcaacgccaacagccggggccccagcttctctagcggcctggtgccactgtccctgagagggagccacatgggccccatggagatctacaaaaccgtgagcgcctggaagcggcagcctgtgcgcgtgctgagcctgtttcggaatatcgataaagtcctgaaaagcctgggattcctggagagcggctctggctccggcggtggcaccctgaagtacgtggaggatgtgacaaacgtggtcagacgggatgtggagaagtggggccccttcgatctggtgtacggcagcacccaacccctgggcagctcttgtgaccggtgccctggctggtacatgtttcagttccaccggatcctgcagtacgccctgccgagacaggagtcccagcggccattcttttggattttcatggacaacttgctgctgaccgaggatgaccaggaaactaccactcggttcctgcagaccgaagccgtgaccctgcaggacgtgagaggccgggactaccagaacgccatgcgggtgtggtccaacatccctggactgaaaagcaagcacgcacctctgacccctaaagaagaggagtacctgcaggcccaggtgcggagcagaagcaagctggacgcccctaaggtggatctgctggtgaagaattgcctcctgcccctgagagagtacttcaagtatttcagccagaatagtctgcccctgggcggcccaagcagcggcgcccctcctcccagcggcggcagcccagccggctccccaacctctaccgaggagggcacctctgagtccgccacccccgagagcggccctggcacctccaccgagcccagcgagggcagcgcacccggcagccctgccggcagccccacctccacagaggagggaaccagcaccgagcccagcgaaggcagcgccccaggcaccagcaccgagcctagtgagggcggctctggcggcggcagcgcccaggagattaaacggatcaacaagatcagaagaagacttgtgaaagacagcaacaccaagaaggccggcaagacaggccccatgaaaaccctgctggttagagtgatgacacccgatctgagagagcggctggaaaacctgagaaagaagcctgaaaatatcccccagcccatcagcaatacatctagagccaacctgaataagctgctgaccgattacaccgaaatgaagaaggcgatcctgcatgtgtactgggaagagttccagaaggaccctgtgggcctgatgagccgggtggcccagcctgccagcaagaagatcgatcagaacaagctgaaacctgagatggacgagaagggcaacctgaccaccgccggctttgcctgctctcagtgtggccagcccctgttcgtgtacaagctggagcaggtgtctgagaagggcaaggcttacaccaactacttcggacggtgcaatgtggccgagcacgaaaagctgatcctgctggcccagctgaagcccgagaaggatagcgacgaagccgtgacatatagcctgggaaagtttgggcagagggccctggatttctacagcattcatgtgaccaaggagtccacccaccccgtgaagcccctggcccagatcgccggaaacagatacgcctccggacctgtgggaaaggccctgagcgacgcatgtatgggcacaatcgcctccttcctgtctaagtaccaggacatcatcatcgaacaccagaaggtggtgaagggcaaccagaagagactggagagcctgcgggagctggccggcaaggaaaacctggaataccctagcgtgaccctgccacctcagcctcacaccaaggagggcgttgatgcctacaacgaagtgatcgcccgggtgcgaatgtgggtgaacctgaacctgtggcagaagctgaagctaagcagagatgatgccaagcctctgctgagactgaagggattcccttcctttcctctggtcgagagacaggccaacgaagtggactggtgggacatggtgtgtaacgtgaagaagctgatcaacgagaaaaaggaggatggcaaggtgttttggcagaatctggctggctacaagagacaggaagccctgagaccatacctgagcagcgaggaagatcggaagaagggaaagaaattcgctcggtaccagctgggcgacctgctgctgcacctggaaaagaagcacggcgaggactggggaaaggtgtacgacgaggcctgggagcggattgacaagaaagtggaaggcctgagcaagcacatcaagctggaagaggaacggagaagcgaggacgcccagagcaaggccgccctgaccgactggctgcgggctaaggccagcttcgtgatcgagggcctgaaggaggccgacaaggacgagttctgcagatgcgagctgaagctgcagaagtggtacggggacctgcggggaaagcccttcgccatcgaagccgagaacagcatcctggacatcagcggcttcagcaagcagtacaactgtgccttcatctggcagaaggacggcgtgaagaagctgaacctgtacctgatcatcaactacttcaagggcggcaagctgcggttcaagaagatcaaacctgaagccttcgaagccaacagattctacaccgtgatcaacaaaaagagcggcgagatcgtgcccatggaggtgaacttcaacttcgacgaccccaacctgatcatcctgcctctggcctttggcaagagacagggcagagaattcatctggaacgacctgctgtccctggaaaccggcagcctgaagctggccaacggaagagtgatcgagaagacactgtacaacagaagaacccggcaggatgagcctgccctgttcgtggccctgaccttcgagcggcgggaggtcctggactcctccaatatcaaaccaatgaacctgatcggcgtggcaagaggcgaaaacatccccgccgtgatcgccctgaccgaccccgagggctgcccactgagccggtttaaggatagcctgggaaacccaacccacatcctgagaatcggcgagagctataaggagaagcagcggaccatccaggccaagaaggaggtggagcagcggagagccggcggctacagccggaagtacgccagcaaagccaagaatctggcagacgatatggtgagaaacaccgctagagatctgctgtactacgccgtgacccaggatgccatgctgatcttcgccaacctgagccggggcttcggccggcagggcaagcggaccttcatggccgagagacagtacacacggatggaggactggctgaccgccaagctggcctacgagggcctgagcaagacctacctgtccaagacactggcccagtacacctccaagacatgcagcaactgtgggtttaccatcaccagcgccgactacgacagggtgctggagaagctgaagaagacagcaacaggctggatgaccacaattaacggcaaggagctgaaggtggagggccagattacctactacaacagatacaagagacagaacgtagtcaaggacctgtccgtcgagctggatagactgagcgaagaatctgtgaacaacgacatctcctcctggacaaagggcagaagcggagaagctctgagcctcctgaagaaaagattctcccatagacccgtgcaggagaagttcgtgtgcctgaactgcggcttcgagacacacgcagccgagcaagccgccctgaacatcgccagatcctggctgttcctgcggagccaggagtacaagaaataccagacaaacaagacaaccggcaacaccgataagagagccttcgtcgagacctggcagtccttttaccggaagaagcttaaggaggtgtggaaacctgccgtgcggtctggcggatctggcggaggctccacaagcctggtgaagttcgaggaggtggccgtggtgttcagcgaggacgagtggaacctgctgagcgaccagcagaggggcctgtacatggaggtgatgaaggagaactacgagcacctgatctacctgggctacgaggtgcccgtgatcctgagcctgctgcaggacggcggcggcatcagcagcgacgccggcagccagagcaagagccagcaggtggccgtggccgagggcagcaacgtgaacagcaccagccccaagaaaaagagaaaagtctaagctgccttctgcggggcttgccttctggccatgcccttcttctctcccttgcacctgtacctcttggtctttgaataaagcctgagtaggaaggctagcaaaaaaaaaaaaaaaaaaaaaaaaaaaaaaaaaaaaaaaaaaaaaaaaaaaaaaaaaaaaaaaaaaaaaaaaaaaaaaaa

SEQ ID NO: 2808 - RNA, 5419 nt, synthetic construct
  source 1..5419: mol_type = other RNA
aggaaataagagagaaaagaagagtaagaagaaatataagagccaccatggcccctaagaagaagcgtaaagtgagccgggtgaacggcagcggcagcggcggcggcatgaaccacgaccaggagttcgacccccctaaggtgtaccctcccgtccccgccgagaagagaaagcccatccgggtcctgagcctgttcgatggcatcgccaccggtctgctggtgctgaaggacctgggcatccaggtggataggtacattgcctccgaggtgtgcgaggactccatcaccgtgggaatggtgcgtcatcagggcaagatcatgtacgtgggcgacgtgcggagcgtgacacagaagcatatccaggagtggggccctttcgacctggtgatcggcggcagcccttgcaatgacctgagcatcgtgaacccagcccggaagggcctgtacgagggaaccggcagactgttcttcgagttttacagactgctgcacgacgcccggcctaaggaaggcgacgaccggcccttcttttggctgttcgagaatgtggtggccatgggagtcagcgacaagcgggatattagccggttcctggagagcaaccccgtgatgatcgatgccaaggaagtgagcgccgcccaccgggccagatacttctggggcaatctgcctggcatgaacagacccctggccagcaccgtgaacgacaagctggagctgcaggagtgcctggagcacggccggatcgccaagttcagcaaggtgagaaccatcaccacccgaagcaacagcatcaaacaaggcaaggaccagcactttcctgtgttcatgaacgagaaggaggacatcctgtggtgtaccgagatggagagagtgttcgggttcccagtccactacacagatgtcagcaacatgtctagactggccagacagagactgctgggaagaagctggtccgtccctgtgatcagacacctgttcgcccctctgaaggagtacttcgcctgcgtgagcagcggcaacagcaacgccaacagccggggccccagcttctctagcggcctggtgccactgtccctgagagggagccacatgggccccatggagatctacaaaaccgtgagcgcctggaagcggcagcctgtgcgcgtgctgagcctgtttcggaatatcgataaagtcctgaaaagcctgggattcctggagagcggctctggctccggcggtggcaccctgaagtacgtggaggatgtgacaaacgtggtcagacgggatgtggagaagtggggccccttcgatctggtgtacggcagcacccaacccctgggcagctcttgtgaccggtgccctggctggtacatgtttcagttccaccggatcctgcagtacgccctgccgagacaggagtcccagcggccattcttttggattttcatggacaacttgctgctgaccgaggatgaccaggaaactaccactcggttcctgcagaccgaagccgtgaccctgcaggacgtgagaggccgggactaccagaacgccatgcgggtgtggtccaacatccctggactgaaaagcaagcacgcacctctgacccctaaagaagaggagtacctgcaggcccaggtgcggagcagaagcaagctggacgcccctaaggtggatctgctggtgaagaattgcctcctgcccctgagagagtacttcaagtatttcagccagaatagtctgcccctgggcggcccaagcagcggcgcccctcctcccagcggcggcagcccagccggctccccaacctctaccgaggagggcacctctgagtccgccacccccgagagcggccctggcacctccaccgagcccagcgagggcagcgcacccggcagccctgccggcagccccacctccacagaggagggaaccagcaccgagcccagcgaaggcagcgccccaggcaccagcaccgagcctagtgagggcggctctggcggcggcagcgcccaggagattaaacggatcaacaagatcagaagaagacttgtgaaagacagcaacaccaagaaggccggcaagacaggccccatgaaaaccctgctggttagagtgatgacacccgatctgagagagcggctggaaaacctgagaaagaagcctgaaaatatcccccagcccatcagcaatacatctagagccaacctgaataagctgctgaccgattacaccgaaatgaagaaggcgatcctgcatgtgtactgggaagagttccagaaggaccctgtgggcctgatgagccgggtggcccagcctgccagcaagaagatcgatcagaacaagctgaaacctgagatggacgagaagggcaacctgaccaccgccggctttgcctgctctcagtgtggccagcccctgttcgtgtacaagctggagcaggtgtctgagaagggcaaggcttacaccaactacttcggacggtgcaatgtggccgagcacgaaaagctgatcctgctggcccagctgaagcccgagaaggatagcgacgaagccgtgacatatagcctgggaaagtttgggcagagggccctggatttctacagcattcatgtgaccaaggagtccacccaccccgtgaagcccctggcccagatcgccggaaacagatacgcctccggacctgtgggaaaggccctgagcgacgcatgtatgggcacaatcgcctccttcctgtctaagtaccaggacatcatcatcgaacaccagaaggtggtgaagggcaaccagaagagactggagagcctgcgggagctggccggcaaggaaaacctggaataccctagcgtgaccctgccacctcagcctcacaccaaggagggcgttgatgcctacaacgaagtgatcgcccgggtgcgaatgtgggtgaacctgaacctgtggcagaagctgaagctaagcagagatgatgccaagcctctgctgagactgaagggattcccttcctttcctctggtcgagagacaggccaacgaagtggactggtgggacatggtgtgtaacgtgaagaagctgatcaacgagaaaaaggaggatggcaaggtgttttggcagaatctggctggctacaagagacaggaagccctgagaccatacctgagcagcgaggaagatcggaagaagggaaagaaattcgctcggtaccagctgggcgacctgctgctgcacctggaaaagaagcacggcgaggactggggaaaggtgtacgacgaggcctgggagcggattgacaagaaagtggaaggcctgagcaagcacatcaagctggaagaggaacggagaagcgaggacgcccagagcaaggccgccctgaccgactggctgcgggctaaggccagcttcgtgatcgagggcctgaaggaggccgacaaggacgagttctgcagatgcgagctgaagctgcagaagtggtacggggacctgcggggaaagcccttcgccatcgaagccgagaacagcatcctggacatcagcggcttcagcaagcagtacaactgtgccttcatctggcagaaggacggcgtgaagaagctgaacctgtacctgatcatcaactacttcaagggcggcaagctgcggttcaagaagatcaaacctgaagccttcgaagccaacagattctacaccgtgatcaacaaaaagagcggcgagatcgtgcccatggaggtgaacttcaacttcgacgaccccaacctgatcatcctgcctctggcctttggcaagagacagggcagagaattcatctggaacgacctgctgtccctggaaaccggcagcctgaagctggccaacggaagagtgatcgagaagacactgtacaacagaagaacccggcaggatgagcctgccctgttcgtggccctgaccttcgagcggcgggaggtcctggactcctccaatatcaaaccaatgaacctgatcggcgtggcaagaggcgaaaacatccccgccgtgatcgccctgaccgaccccgagggctgcccactgagccggtttaaggatagcctgggaaacccaacccacatcctgagaatcggcgagagctataaggagaagcagcggaccatccaggccaagaaggaggtggagcagcggagagccggcggctacagccggaagtacgccagcaaagccaagaatctggcagacgatatggtgagaaacaccgctagagatctgctgtactacgccgtgacccaggatgccatgctgatcttcgccaacctgagccggggcttcggccggcagggcaagcggaccttcatggccgagagacagtacacacggatggaggactggctgaccgccaagctggcctacgagggcctgagcaagacctacctgtccaagacactggcccagtacacctccaagacatgcagcaactgtgggtttaccatcaccagcgccgactacgacagggtgctggagaagctgaagaagacagcaacaggctggatgaccacaattaacggcaaggagctgaaggtggagggccagattacctactacaacagatacaagagacagaacgtagtcaaggacctgtccgtcgagctggatagactgagcgaagaatctgtgaacaacgacatctcctcctggacaaagggcagaagcggagaagctctgagcctcctgaagaaaagattctcccatagacccgtgcaggagaagttcgtgtgcctgaactgcggcttcgagacacacgcagccgagcaagccgccctgaacatcgccagatcctggctgttcctgcggagccaggagtacaagaaataccagacaaacaagacaaccggcaacaccgataagagagccttcgtcgagacctggcagtccttttaccggaagaagcttaaggaggtgtggaaacctgccgtgcggtctggcggatctggcggaggctccacaagcctggcccccgaggaccacggcagcagctacgagggcagcgtgagcttcagggacgtggccatcgacttcagcagggaggagtggaggcacctggacctgagccagaggaacctgtacagggacgtgatgctggagacctacagccacctgctgagcgtgggctaccaggtgcccgaggccgaggtggtgatgctggagcagggcaacgagccctggagcctgcagggcgagaggccccaccagaccagccccaagaaaaagagaaaagtctaagctgccttctgcggggcttgccttctggccatgcccttcttctctcccttgcacctgtacctcttggtctttgaataaagcctgagtaggaaggctagcaaaaaaaaaaaaaaaaaaaaaaaaaaaaaaaaaaaaaaaaaaaaaaaaaaaaaaaaaaaaaaaaaaaaaaaaaaaaaaaa

SEQ ID NO: 2809 - RNA, 5419 nt, synthetic construct
  source 1..5419: mol_type = other RNA
aggaaataagagagaaaagaagagtaagaagaaatataagagccaccatggcccctaagaagaagcgtaaagtgagccgggtgaacggcagcggcagcggcggcggcatgaaccacgaccaggagttcgacccccctaaggtgtaccctcccgtccccgccgagaagagaaagcccatccgggtcctgagcctgttcgatggcatcgccaccggtctgctggtgctgaaggacctgggcatccaggtggataggtacattgcctccgaggtgtgcgaggactccatcaccgtgggaatggtgcgtcatcagggcaagatcatgtacgtgggcgacgtgcggagcgtgacacagaagcatatccaggagtggggccctttcgacctggtgatcggcggcagcccttgcaatgacctgagcatcgtgaacccagcccggaagggcctgtacgagggaaccggcagactgttcttcgagttttacagactgctgcacgacgcccggcctaaggaaggcgacgaccggcccttcttttggctgttcgagaatgtggtggccatgggagtcagcgacaagcgggatattagccggttcctggagagcaaccccgtgatgatcgatgccaaggaagtgagcgccgcccaccgggccagatacttctggggcaatctgcctggcatgaacagacccctggccagcaccgtgaacgacaagctggagctgcaggagtgcctggagcacggccggatcgccaagttcagcaaggtgagaaccatcaccacccgaagcaacagcatcaaacaaggcaaggaccagcactttcctgtgttcatgaacgagaaggaggacatcctgtggtgtaccgagatggagagagtgttcgggttcccagtccactacacagatgtcagcaacatgtctagactggccagacagagactgctgggaagaagctggtccgtccctgtgatcagacacctgttcgcccctctgaaggagtacttcgcctgcgtgagcagcggcaacagcaacgccaacagccggggccccagcttctctagcggcctggtgccactgtccctgagagggagccacatgggccccatggagatctacaaaaccgtgagcgcctggaagcggcagcctgtgcgcgtgctgagcctgtttcggaatatcgataaagtcctgaaaagcctgggattcctggagagcggctctggctccggcggtggcaccctgaagtacgtggaggatgtgacaaacgtggtcagacgggatgtggagaagtggggccccttcgatctggtgtacggcagcacccaacccctgggcagctcttgtgaccggtgccctggctggtacatgtttcagttccaccggatcctgcagtacgccctgccgagacaggagtcccagcggccattcttttggattttcatggacaacttgctgctgaccgaggatgaccaggaaactaccactcggttcctgcagaccgaagccgtgaccctgcaggacgtgagaggccgggactaccagaacgccatgcgggtgtggtccaacatccctggactgaaaagcaagcacgcacctctgacccctaaagaagaggagtacctgcaggcccaggtgcggagcagaagcaagctggacgcccctaaggtggatctgctggtgaagaattgcctcctgcccctgagagagtacttcaagtatttcagccagaatagtctgcccctgggcggcccaagcagcggcgcccctcctcccagcggcggcagcccagccggctccccaacctctaccgaggagggcacctctgagtccgccacccccgagagcggccctggcacctccaccgagcccagcgagggcagcgcacccggcagccctgccggcagccccacctccacagaggagggaaccagcaccgagcccagcgaaggcagcgccccaggcaccagcaccgagcctagtgagggcggctctggcggcggcagcgcccaggagattaaacggatcaacaagatcagaagaagacttgtgaaagacagcaacaccaagaaggccggcaagacaggccccatgaaaaccctgctggttagagtgatgacacccgatctgagagagcggctggaaaacctgagaaagaagcctgaaaatatcccccagcccatcagcaatacatctagagccaacctgaataagctgctgaccgattacaccgaaatgaagaaggcgatcctgcatgtgtactgggaagagttccagaaggaccctgtgggcctgatgagccgggtggcccagcctgccagcaagaagatcgatcagaacaagctgaaacctgagatggacgagaagggcaacctgaccaccgccggctttgcctgctctcagtgtggccagcccctgttcgtgtacaagctggagcaggtgtctgagaagggcaaggcttacaccaactacttcggacggtgcaatgtggccgagcacgaaaagctgatcctgctggcccagctgaagcccgagaaggatagcgacgaagccgtgacatatagcctgggaaagtttgggcagagggccctggatttctacagcattcatgtgaccaaggagtccacccaccccgtgaagcccctggcccagatcgccggaaacagatacgcctccggacctgtgggaaaggccctgagcgacgcatgtatgggcacaatcgcctccttcctgtctaagtaccaggacatcatcatcgaacaccagaaggtggtgaagggcaaccagaagagactggagagcctgcgggagctggccggcaaggaaaacctggaataccctagcgtgaccctgccacctcagcctcacaccaaggagggcgttgatgcctacaacgaagtgatcgcccgggtgcgaatgtgggtgaacctgaacctgtggcagaagctgaagctaagcagagatgatgccaagcctctgctgagactgaagggattcccttcctttcctctggtcgagagacaggccaacgaagtggactggtgggacatggtgtgtaacgtgaagaagctgatcaacgagaaaaaggaggatggcaaggtgttttggcagaatctggctggctacaagagacaggaagccctgagaccatacctgagcagcgaggaagatcggaagaagggaaagaaattcgctcggtaccagctgggcgacctgctgctgcacctggaaaagaagcacggcgaggactggggaaaggtgtacgacgaggcctgggagcggattgacaagaaagtggaaggcctgagcaagcacatcaagctggaagaggaacggagaagcgaggacgcccagagcaaggccgccctgaccgactggctgcgggctaaggccagcttcgtgatcgagggcctgaaggaggccgacaaggacgagttctgcagatgcgagctgaagctgcagaagtggtacggggacctgcggggaaagcccttcgccatcgaagccgagaacagcatcctggacatcagcggcttcagcaagcagtacaactgtgccttcatctggcagaaggacggcgtgaagaagctgaacctgtacctgatcatcaactacttcaagggcggcaagctgcggttcaagaagatcaaacctgaagccttcgaagccaacagattctacaccgtgatcaacaaaaagagcggcgagatcgtgcccatggaggtgaacttcaacttcgacgaccccaacctgatcatcctgcctctggcctttggcaagagacagggcagagaattcatctggaacgacctgctgtccctggaaaccggcagcctgaagctggccaacggaagagtgatcgagaagacactgtacaacagaagaacccggcaggatgagcctgccctgttcgtggccctgaccttcgagcggcgggaggtcctggactcctccaatatcaaaccaatgaacctgatcggcgtggcaagaggcgaaaacatccccgccgtgatcgccctgaccgaccccgagggctgcccactgagccggtttaaggatagcctgggaaacccaacccacatcctgagaatcggcgagagctataaggagaagcagcggaccatccaggccaagaaggaggtggagcagcggagagccggcggctacagccggaagtacgccagcaaagccaagaatctggcagacgatatggtgagaaacaccgctagagatctgctgtactacgccgtgacccaggatgccatgctgatcttcgccaacctgagccggggcttcggccggcagggcaagcggaccttcatggccgagagacagtacacacggatggaggactggctgaccgccaagctggcctacgagggcctgagcaagacctacctgtccaagacactggcccagtacacctccaagacatgcagcaactgtgggtttaccatcaccagcgccgactacgacagggtgctggagaagctgaagaagacagcaacaggctggatgaccacaattaacggcaaggagctgaaggtggagggccagattacctactacaacagatacaagagacagaacgtagtcaaggacctgtccgtcgagctggatagactgagcgaagaatctgtgaacaacgacatctcctcctggacaaagggcagaagcggagaagctctgagcctcctgaagaaaagattctcccatagacccgtgcaggagaagttcgtgtgcctgaactgcggcttcgagacacacgcagccgagcaagccgccctgaacatcgccagatcctggctgttcctgcggagccaggagtacaagaaataccagacaaacaagacaaccggcaacaccgataagagagccttcgtcgagacctggcagtccttttaccggaagaagcttaaggaggtgtggaaacctgccgtgcggtctggcggatctggcggaggctccacaagcagcaaggtgcccgtgaccttcggcgacctggccatctacttcagccaggaggagtgggagtggctgagccccatccagaaggacctgtacgaggacgtgatgctggagaactaccagaacctggtgagcgtgggcctgagcttcaggaggcccaacgtgatcaccctgctggagaagggcagggccccctggatggtggagcccgtgaggaagaggaggggcatggacagcggcagcaagtgcaccagccccaagaaaaagagaaaagtctaagctgccttctgcggggcttgccttctggccatgcccttcttctctcccttgcacctgtacctcttggtctttgaataaagcctgagtaggaaggctagcaaaaaaaaaaaaaaaaaaaaaaaaaaaaaaaaaaaaaaaaaaaaaaaaaaaaaaaaaaaaaaaaaaaaaaaaaaaaaaaa

SEQ ID NO: 2810 - RNA, 5419 nt, synthetic construct
  source 1..5419: mol_type = other RNA
aggaaataagagagaaaagaagagtaagaagaaatataagagccaccatggcccctaagaagaagcgtaaagtgagccgggtgaacggcagcggcagcggcggcggcatgaaccacgaccaggagttcgacccccctaaggtgtaccctcccgtccccgccgagaagagaaagcccatccgggtcctgagcctgttcgatggcatcgccaccggtctgctggtgctgaaggacctgggcatccaggtggataggtacattgcctccgaggtgtgcgaggactccatcaccgtgggaatggtgcgtcatcagggcaagatcatgtacgtgggcgacgtgcggagcgtgacacagaagcatatccaggagtggggccctttcgacctggtgatcggcggcagcccttgcaatgacctgagcatcgtgaacccagcccggaagggcctgtacgagggaaccggcagactgttcttcgagttttacagactgctgcacgacgcccggcctaaggaaggcgacgaccggcccttcttttggctgttcgagaatgtggtggccatgggagtcagcgacaagcgggatattagccggttcctggagagcaaccccgtgatgatcgatgccaaggaagtgagcgccgcccaccgggccagatacttctggggcaatctgcctggcatgaacagacccctggccagcaccgtgaacgacaagctggagctgcaggagtgcctggagcacggccggatcgccaagttcagcaaggtgagaaccatcaccacccgaagcaacagcatcaaacaaggcaaggaccagcactttcctgtgttcatgaacgagaaggaggacatcctgtggtgtaccgagatggagagagtgttcgggttcccagtccactacacagatgtcagcaacatgtctagactggccagacagagactgctgggaagaagctggtccgtccctgtgatcagacacctgttcgcccctctgaaggagtacttcgcctgcgtgagcagcggcaacagcaacgccaacagccggggccccagcttctctagcggcctggtgccactgtccctgagagggagccacatgggccccatggagatctacaaaaccgtgagcgcctggaagcggcagcctgtgcgcgtgctgagcctgtttcggaatatcgataaagtcctgaaaagcctgggattcctggagagcggctctggctccggcggtggcaccctgaagtacgtggaggatgtgacaaacgtggtcagacgggatgtggagaagtggggccccttcgatctggtgtacggcagcacccaacccctgggcagctcttgtgaccggtgccctggctggtacatgtttcagttccaccggatcctgcagtacgccctgccgagacaggagtcccagcggccattcttttggattttcatggacaacttgctgctgaccgaggatgaccaggaaactaccactcggttcctgcagaccgaagccgtgaccctgcaggacgtgagaggccgggactaccagaacgccatgcgggtgtggtccaacatccctggactgaaaagcaagcacgcacctctgacccctaaagaagaggagtacctgcaggcccaggtgcggagcagaagcaagctggacgcccctaaggtggatctgctggtgaagaattgcctcctgcccctgagagagtacttcaagtatttcagccagaatagtctgcccctgggcggcccaagcagcggcgcccctcctcccagcggcggcagcccagccggctccccaacctctaccgaggagggcacctctgagtccgccacccccgagagcggccctggcacctccaccgagcccagcgagggcagcgcacccggcagccctgccggcagccccacctccacagaggagggaaccagcaccgagcccagcgaaggcagcgccccaggcaccagcaccgagcctagtgagggcggctctggcggcggcagcgcccaggagattaaacggatcaacaagatcagaagaagacttgtgaaagacagcaacaccaagaaggccggcaagacaggccccatgaaaaccctgctggttagagtgatgacacccgatctgagagagcggctggaaaacctgagaaagaagcctgaaaatatcccccagcccatcagcaatacatctagagccaacctgaataagctgctgaccgattacaccgaaatgaagaaggcgatcctgcatgtgtactgggaagagttccagaaggaccctgtgggcctgatgagccgggtggcccagcctgccagcaagaagatcgatcagaacaagctgaaacctgagatggacgagaagggcaacctgaccaccgccggctttgcctgctctcagtgtggccagcccctgttcgtgtacaagctggagcaggtgtctgagaagggcaaggcttacaccaactacttcggacggtgcaatgtggccgagcacgaaaagctgatcctgctggcccagctgaagcccgagaaggatagcgacgaagccgtgacatatagcctgggaaagtttgggcagagggccctggatttctacagcattcatgtgaccaaggagtccacccaccccgtgaagcccctggcccagatcgccggaaacagatacgcctccggacctgtgggaaaggccctgagcgacgcatgtatgggcacaatcgcctccttcctgtctaagtaccaggacatcatcatcgaacaccagaaggtggtgaagggcaaccagaagagactggagagcctgcgggagctggccggcaaggaaaacctggaataccctagcgtgaccctgccacctcagcctcacaccaaggagggcgttgatgcctacaacgaagtgatcgcccgggtgcgaatgtgggtgaacctgaacctgtggcagaagctgaagctaagcagagatgatgccaagcctctgctgagactgaagggattcccttcctttcctctggtcgagagacaggccaacgaagtggactggtgggacatggtgtgtaacgtgaagaagctgatcaacgagaaaaaggaggatggcaaggtgttttggcagaatctggctggctacaagagacaggaagccctgagaccatacctgagcagcgaggaagatcggaagaagggaaagaaattcgctcggtaccagctgggcgacctgctgctgcacctggaaaagaagcacggcgaggactggggaaaggtgtacgacgaggcctgggagcggattgacaagaaagtggaaggcctgagcaagcacatcaagctggaagaggaacggagaagcgaggacgcccagagcaaggccgccctgaccgactggctgcgggctaaggccagcttcgtgatcgagggcctgaaggaggccgacaaggacgagttctgcagatgcgagctgaagctgcagaagtggtacggggacctgcggggaaagcccttcgccatcgaagccgagaacagcatcctggacatcagcggcttcagcaagcagtacaactgtgccttcatctggcagaaggacggcgtgaagaagctgaacctgtacctgatcatcaactacttcaagggcggcaagctgcggttcaagaagatcaaacctgaagccttcgaagccaacagattctacaccgtgatcaacaaaaagagcggcgagatcgtgcccatggaggtgaacttcaacttcgacgaccccaacctgatcatcctgcctctggcctttggcaagagacagggcagagaattcatctggaacgacctgctgtccctggaaaccggcagcctgaagctggccaacggaagagtgatcgagaagacactgtacaacagaagaacccggcaggatgagcctgccctgttcgtggccctgaccttcgagcggcgggaggtcctggactcctccaatatcaaaccaatgaacctgatcggcgtggcaagaggcgaaaacatccccgccgtgatcgccctgaccgaccccgagggctgcccactgagccggtttaaggatagcctgggaaacccaacccacatcctgagaatcggcgagagctataaggagaagcagcggaccatccaggccaagaaggaggtggagcagcggagagccggcggctacagccggaagtacgccagcaaagccaagaatctggcagacgatatggtgagaaacaccgctagagatctgctgtactacgccgtgacccaggatgccatgctgatcttcgccaacctgagccggggcttcggccggcagggcaagcggaccttcatggccgagagacagtacacacggatggaggactggctgaccgccaagctggcctacgagggcctgagcaagacctacctgtccaagacactggcccagtacacctccaagacatgcagcaactgtgggtttaccatcaccagcgccgactacgacagggtgctggagaagctgaagaagacagcaacaggctggatgaccacaattaacggcaaggagctgaaggtggagggccagattacctactacaacagatacaagagacagaacgtagtcaaggacctgtccgtcgagctggatagactgagcgaagaatctgtgaacaacgacatctcctcctggacaaagggcagaagcggagaagctctgagcctcctgaagaaaagattctcccatagacccgtgcaggagaagttcgtgtgcctgaactgcggcttcgagacacacgcagccgagcaagccgccctgaacatcgccagatcctggctgttcctgcggagccaggagtacaagaaataccagacaaacaagacaaccggcaacaccgataagagagccttcgtcgagacctggcagtccttttaccggaagaagcttaaggaggtgtggaaacctgccgtgcggtctggcggatctggcggaggctccacaagcagcgtggccttcgaggacgtggccgtgaacttcacccaggaggagtgggccctgctgagccccagccagaagaacctgtacagggacgtgatgctggagaccttcaggaacctggccagcgtgggcatccagtggaaggaccagaacatcgagaacctgtaccagaacctgggcatcaagctgaggagcctggtggagaggctgtgcggcccccaggagggcagcgagcacagggagaccttcaccagccccaagaaaaagagaaaagtctaagctgccttctgcggggcttgccttctggccatgcccttcttctctcccttgcacctgtacctcttggtctttgaataaagcctgagtaggaaggctagcaaaaaaaaaaaaaaaaaaaaaaaaaaaaaaaaaaaaaaaaaaaaaaaaaaaaaaaaaaaaaaaaaaaaaaaaaaaaaaaa

SEQ ID NO: 2811 - RNA, 5419 nt, synthetic construct
  source 1..5419: mol_type = other RNA
aggaaataagagagaaaagaagagtaagaagaaatataagagccaccatggcccctaagaagaagcgtaaagtgagccgggtgaacggcagcggcagcggcggcggcatgaaccacgaccaggagttcgacccccctaaggtgtaccctcccgtccccgccgagaagagaaagcccatccgggtcctgagcctgttcgatggcatcgccaccggtctgctggtgctgaaggacctgggcatccaggtggataggtacattgcctccgaggtgtgcgaggactccatcaccgtgggaatggtgcgtcatcagggcaagatcatgtacgtgggcgacgtgcggagcgtgacacagaagcatatccaggagtggggccctttcgacctggtgatcggcggcagcccttgcaatgacctgagcatcgtgaacccagcccggaagggcctgtacgagggaaccggcagactgttcttcgagttttacagactgctgcacgacgcccggcctaaggaaggcgacgaccggcccttcttttggctgttcgagaatgtggtggccatgggagtcagcgacaagcgggatattagccggttcctggagagcaaccccgtgatgatcgatgccaaggaagtgagcgccgcccaccgggccagatacttctggggcaatctgcctggcatgaacagacccctggccagcaccgtgaacgacaagctggagctgcaggagtgcctggagcacggccggatcgccaagttcagcaaggtgagaaccatcaccacccgaagcaacagcatcaaacaaggcaaggaccagcactttcctgtgttcatgaacgagaaggaggacatcctgtggtgtaccgagatggagagagtgttcgggttcccagtccactacacagatgtcagcaacatgtctagactggccagacagagactgctgggaagaagctggtccgtccctgtgatcagacacctgttcgcccctctgaaggagtacttcgcctgcgtgagcagcggcaacagcaacgccaacagccggggccccagcttctctagcggcctggtgccactgtccctgagagggagccacatgggccccatggagatctacaaaaccgtgagcgcctggaagcggcagcctgtgcgcgtgctgagcctgtttcggaatatcgataaagtcctgaaaagcctgggattcctggagagcggctctggctccggcggtggcaccctgaagtacgtggaggatgtgacaaacgtggtcagacgggatgtggagaagtggggccccttcgatctggtgtacggcagcacccaacccctgggcagctcttgtgaccggtgccctggctggtacatgtttcagttccaccggatcctgcagtacgccctgccgagacaggagtcccagcggccattcttttggattttcatggacaacttgctgctgaccgaggatgaccaggaaactaccactcggttcctgcagaccgaagccgtgaccctgcaggacgtgagaggccgggactaccagaacgccatgcgggtgtggtccaacatccctggactgaaaagcaagcacgcacctctgacccctaaagaagaggagtacctgcaggcccaggtgcggagcagaagcaagctggacgcccctaaggtggatctgctggtgaagaattgcctcctgcccctgagagagtacttcaagtatttcagccagaatagtctgcccctgggcggcccaagcagcggcgcccctcctcccagcggcggcagcccagccggctccccaacctctaccgaggagggcacctctgagtccgccacccccgagagcggccctggcacctccaccgagcccagcgagggcagcgcacccggcagccctgccggcagccccacctccacagaggagggaaccagcaccgagcccagcgaaggcagcgccccaggcaccagcaccgagcctagtgagggcggctctggcggcggcagcgcccaggagattaaacggatcaacaagatcagaagaagacttgtgaaagacagcaacaccaagaaggccggcaagacaggccccatgaaaaccctgctggttagagtgatgacacccgatctgagagagcggctggaaaacctgagaaagaagcctgaaaatatcccccagcccatcagcaatacatctagagccaacctgaataagctgctgaccgattacaccgaaatgaagaaggcgatcctgcatgtgtactgggaagagttccagaaggaccctgtgggcctgatgagccgggtggcccagcctgccagcaagaagatcgatcagaacaagctgaaacctgagatggacgagaagggcaacctgaccaccgccggctttgcctgctctcagtgtggccagcccctgttcgtgtacaagctggagcaggtgtctgagaagggcaaggcttacaccaactacttcggacggtgcaatgtggccgagcacgaaaagctgatcctgctggcccagctgaagcccgagaaggatagcgacgaagccgtgacatatagcctgggaaagtttgggcagagggccctggatttctacagcattcatgtgaccaaggagtccacccaccccgtgaagcccctggcccagatcgccggaaacagatacgcctccggacctgtgggaaaggccctgagcgacgcatgtatgggcacaatcgcctccttcctgtctaagtaccaggacatcatcatcgaacaccagaaggtggtgaagggcaaccagaagagactggagagcctgcgggagctggccggcaaggaaaacctggaataccctagcgtgaccctgccacctcagcctcacaccaaggagggcgttgatgcctacaacgaagtgatcgcccgggtgcgaatgtgggtgaacctgaacctgtggcagaagctgaagctaagcagagatgatgccaagcctctgctgagactgaagggattcccttcctttcctctggtcgagagacaggccaacgaagtggactggtgggacatggtgtgtaacgtgaagaagctgatcaacgagaaaaaggaggatggcaaggtgttttggcagaatctggctggctacaagagacaggaagccctgagaccatacctgagcagcgaggaagatcggaagaagggaaagaaattcgctcggtaccagctgggcgacctgctgctgcacctggaaaagaagcacggcgaggactggggaaaggtgtacgacgaggcctgggagcggattgacaagaaagtggaaggcctgagcaagcacatcaagctggaagaggaacggagaagcgaggacgcccagagcaaggccgccctgaccgactggctgcgggctaaggccagcttcgtgatcgagggcctgaaggaggccgacaaggacgagttctgcagatgcgagctgaagctgcagaagtggtacggggacctgcggggaaagcccttcgccatcgaagccgagaacagcatcctggacatcagcggcttcagcaagcagtacaactgtgccttcatctggcagaaggacggcgtgaagaagctgaacctgtacctgatcatcaactacttcaagggcggcaagctgcggttcaagaagatcaaacctgaagccttcgaagccaacagattctacaccgtgatcaacaaaaagagcggcgagatcgtgcccatggaggtgaacttcaacttcgacgaccccaacctgatcatcctgcctctggcctttggcaagagacagggcagagaattcatctggaacgacctgctgtccctggaaaccggcagcctgaagctggccaacggaagagtgatcgagaagacactgtacaacagaagaacccggcaggatgagcctgccctgttcgtggccctgaccttcgagcggcgggaggtcctggactcctccaatatcaaaccaatgaacctgatcggcgtggcaagaggcgaaaacatccccgccgtgatcgccctgaccgaccccgagggctgcccactgagccggtttaaggatagcctgggaaacccaacccacatcctgagaatcggcgagagctataaggagaagcagcggaccatccaggccaagaaggaggtggagcagcggagagccggcggctacagccggaagtacgccagcaaagccaagaatctggcagacgatatggtgagaaacaccgctagagatctgctgtactacgccgtgacccaggatgccatgctgatcttcgccaacctgagccggggcttcggccggcagggcaagcggaccttcatggccgagagacagtacacacggatggaggactggctgaccgccaagctggcctacgagggcctgagcaagacctacctgtccaagacactggcccagtacacctccaagacatgcagcaactgtgggtttaccatcaccagcgccgactacgacagggtgctggagaagctgaagaagacagcaacaggctggatgaccacaattaacggcaaggagctgaaggtggagggccagattacctactacaacagatacaagagacagaacgtagtcaaggacctgtccgtcgagctggatagactgagcgaagaatctgtgaacaacgacatctcctcctggacaaagggcagaagcggagaagctctgagcctcctgaagaaaagattctcccatagacccgtgcaggagaagttcgtgtgcctgaactgcggcttcgagacacacgcagccgagcaagccgccctgaacatcgccagatcctggctgttcctgcggagccaggagtacaagaaataccagacaaacaagacaaccggcaacaccgataagagagccttcgtcgagacctggcagtccttttaccggaagaagcttaaggaggtgtggaaacctgccgtgcggtctggcggatctggcggaggctccacaagcagccagagcctggtgaccttcggcgacgtggccgtggagttcagccccgaggagtgggcctggctggacagcgcccagaggagcctgtacaggagcgtgatgctggagaactacaggagcctggtgagcctgggcctgtgcgtgagcaagcccaagatgatcagcagcctggagcagaggaaggagccctgggccgccaagaggaccctgaccaggggcggctgccccgacagcagggccctgaccagccccaagaaaaagagaaaagtctaagctgccttctgcggggcttgccttctggccatgcccttcttctctcccttgcacctgtacctcttggtctttgaataaagcctgagtaggaaggctagcaaaaaaaaaaaaaaaaaaaaaaaaaaaaaaaaaaaaaaaaaaaaaaaaaaaaaaaaaaaaaaaaaaaaaaaaaaaaaaaa

SEQ ID NO: 2812 - RNA, 5419 nt, synthetic construct
  source 1..5419: mol_type = other RNA
aggaaataagagagaaaagaagagtaagaagaaatataagagccaccatggcccctaagaagaagcgtaaagtgagccgggtgaacggcagcggcagcggcggcggcatgaaccacgaccaggagttcgacccccctaaggtgtaccctcccgtccccgccgagaagagaaagcccatccgggtcctgagcctgttcgatggcatcgccaccggtctgctggtgctgaaggacctgggcatccaggtggataggtacattgcctccgaggtgtgcgaggactccatcaccgtgggaatggtgcgtcatcagggcaagatcatgtacgtgggcgacgtgcggagcgtgacacagaagcatatccaggagtggggccctttcgacctggtgatcggcggcagcccttgcaatgacctgagcatcgtgaacccagcccggaagggcctgtacgagggaaccggcagactgttcttcgagttttacagactgctgcacgacgcccggcctaaggaaggcgacgaccggcccttcttttggctgttcgagaatgtggtggccatgggagtcagcgacaagcgggatattagccggttcctggagagcaaccccgtgatgatcgatgccaaggaagtgagcgccgcccaccgggccagatacttctggggcaatctgcctggcatgaacagacccctggccagcaccgtgaacgacaagctggagctgcaggagtgcctggagcacggccggatcgccaagttcagcaaggtgagaaccatcaccacccgaagcaacagcatcaaacaaggcaaggaccagcactttcctgtgttcatgaacgagaaggaggacatcctgtggtgtaccgagatggagagagtgttcgggttcccagtccactacacagatgtcagcaacatgtctagactggccagacagagactgctgggaagaagctggtccgtccctgtgatcagacacctgttcgcccctctgaaggagtacttcgcctgcgtgagcagcggcaacagcaacgccaacagccggggccccagcttctctagcggcctggtgccactgtccctgagagggagccacatgggccccatggagatctacaaaaccgtgagcgcctggaagcggcagcctgtgcgcgtgctgagcctgtttcggaatatcgataaagtcctgaaaagcctgggattcctggagagcggctctggctccggcggtggcaccctgaagtacgtggaggatgtgacaaacgtggtcagacgggatgtggagaagtggggccccttcgatctggtgtacggcagcacccaacccctgggcagctcttgtgaccggtgccctggctggtacatgtttcagttccaccggatcctgcagtacgccctgccgagacaggagtcccagcggccattcttttggattttcatggacaacttgctgctgaccgaggatgaccaggaaactaccactcggttcctgcagaccgaagccgtgaccctgcaggacgtgagaggccgggactaccagaacgccatgcgggtgtggtccaacatccctggactgaaaagcaagcacgcacctctgacccctaaagaagaggagtacctgcaggcccaggtgcggagcagaagcaagctggacgcccctaaggtggatctgctggtgaagaattgcctcctgcccctgagagagtacttcaagtatttcagccagaatagtctgcccctgggcggcccaagcagcggcgcccctcctcccagcggcggcagcccagccggctccccaacctctaccgaggagggcacctctgagtccgccacccccgagagcggccctggcacctccaccgagcccagcgagggcagcgcacccggcagccctgccggcagccccacctccacagaggagggaaccagcaccgagcccagcgaaggcagcgccccaggcaccagcaccgagcctagtgagggcggctctggcggcggcagcgcccaggagattaaacggatcaacaagatcagaagaagacttgtgaaagacagcaacaccaagaaggccggcaagacaggccccatgaaaaccctgctggttagagtgatgacacccgatctgagagagcggctggaaaacctgagaaagaagcctgaaaatatcccccagcccatcagcaatacatctagagccaacctgaataagctgctgaccgattacaccgaaatgaagaaggcgatcctgcatgtgtactgggaagagttccagaaggaccctgtgggcctgatgagccgggtggcccagcctgccagcaagaagatcgatcagaacaagctgaaacctgagatggacgagaagggcaacctgaccaccgccggctttgcctgctctcagtgtggccagcccctgttcgtgtacaagctggagcaggtgtctgagaagggcaaggcttacaccaactacttcggacggtgcaatgtggccgagcacgaaaagctgatcctgctggcccagctgaagcccgagaaggatagcgacgaagccgtgacatatagcctgggaaagtttgggcagagggccctggatttctacagcattcatgtgaccaaggagtccacccaccccgtgaagcccctggcccagatcgccggaaacagatacgcctccggacctgtgggaaaggccctgagcgacgcatgtatgggcacaatcgcctccttcctgtctaagtaccaggacatcatcatcgaacaccagaaggtggtgaagggcaaccagaagagactggagagcctgcgggagctggccggcaaggaaaacctggaataccctagcgtgaccctgccacctcagcctcacaccaaggagggcgttgatgcctacaacgaagtgatcgcccgggtgcgaatgtgggtgaacctgaacctgtggcagaagctgaagctaagcagagatgatgccaagcctctgctgagactgaagggattcccttcctttcctctggtcgagagacaggccaacgaagtggactggtgggacatggtgtgtaacgtgaagaagctgatcaacgagaaaaaggaggatggcaaggtgttttggcagaatctggctggctacaagagacaggaagccctgagaccatacctgagcagcgaggaagatcggaagaagggaaagaaattcgctcggtaccagctgggcgacctgctgctgcacctggaaaagaagcacggcgaggactggggaaaggtgtacgacgaggcctgggagcggattgacaagaaagtggaaggcctgagcaagcacatcaagctggaagaggaacggagaagcgaggacgcccagagcaaggccgccctgaccgactggctgcgggctaaggccagcttcgtgatcgagggcctgaaggaggccgacaaggacgagttctgcagatgcgagctgaagctgcagaagtggtacggggacctgcggggaaagcccttcgccatcgaagccgagaacagcatcctggacatcagcggcttcagcaagcagtacaactgtgccttcatctggcagaaggacggcgtgaagaagctgaacctgtacctgatcatcaactacttcaagggcggcaagctgcggttcaagaagatcaaacctgaagccttcgaagccaacagattctacaccgtgatcaacaaaaagagcggcgagatcgtgcccatggaggtgaacttcaacttcgacgaccccaacctgatcatcctgcctctggcctttggcaagagacagggcagagaattcatctggaacgacctgctgtccctggaaaccggcagcctgaagctggccaacggaagagtgatcgagaagacactgtacaacagaagaacccggcaggatgagcctgccctgttcgtggccctgaccttcgagcggcgggaggtcctggactcctccaatatcaaaccaatgaacctgatcggcgtggcaagaggcgaaaacatccccgccgtgatcgccctgaccgaccccgagggctgcccactgagccggtttaaggatagcctgggaaacccaacccacatcctgagaatcggcgagagctataaggagaagcagcggaccatccaggccaagaaggaggtggagcagcggagagccggcggctacagccggaagtacgccagcaaagccaagaatctggcagacgatatggtgagaaacaccgctagagatctgctgtactacgccgtgacccaggatgccatgctgatcttcgccaacctgagccggggcttcggccggcagggcaagcggaccttcatggccgagagacagtacacacggatggaggactggctgaccgccaagctggcctacgagggcctgagcaagacctacctgtccaagacactggcccagtacacctccaagacatgcagcaactgtgggtttaccatcaccagcgccgactacgacagggtgctggagaagctgaagaagacagcaacaggctggatgaccacaattaacggcaaggagctgaaggtggagggccagattacctactacaacagatacaagagacagaacgtagtcaaggacctgtccgtcgagctggatagactgagcgaagaatctgtgaacaacgacatctcctcctggacaaagggcagaagcggagaagctctgagcctcctgaagaaaagattctcccatagacccgtgcaggagaagttcgtgtgcctgaactgcggcttcgagacacacgcagccgagcaagccgccctgaacatcgccagatcctggctgttcctgcggagccaggagtacaagaaataccagacaaacaagacaaccggcaacaccgataagagagccttcgtcgagacctggcagtccttttaccggaagaagcttaaggaggtgtggaaacctgccgtgcggtctggcggatctggcggaggctccacaagcgagcaggtgaccttcaaggacgtggccatcgagttcagcaagaccgagtggaagaggctggaccccgcccagagggccctgtacagggaggtgatgctggagaactacaggaacctggtgagcgtgggcaccagcccccccgacgtgaccgtgatcagcatgctggagcagggcgaggagccctggaccgccgagagcagggtgcagaggcccgaggtgcccggcggcagggagtggacccagaccagccccaagaaaaagagaaaagtctaagctgccttctgcggggcttgccttctggccatgcccttcttctctcccttgcacctgtacctcttggtctttgaataaagcctgagtaggaaggctagcaaaaaaaaaaaaaaaaaaaaaaaaaaaaaaaaaaaaaaaaaaaaaaaaaaaaaaaaaaaaaaaaaaaaaaaaaaaaaaaa

SEQ ID NO: 2813 - RNA, 5419 nt, synthetic construct
  source 1..5419: mol_type = other RNA
aggaaataagagagaaaagaagagtaagaagaaatataagagccaccatggcccctaagaagaagcgtaaagtgagccgggtgaacggcagcggcagcggcggcggcatgaaccacgaccaggagttcgacccccctaaggtgtaccctcccgtccccgccgagaagagaaagcccatccgggtcctgagcctgttcgatggcatcgccaccggtctgctggtgctgaaggacctgggcatccaggtggataggtacattgcctccgaggtgtgcgaggactccatcaccgtgggaatggtgcgtcatcagggcaagatcatgtacgtgggcgacgtgcggagcgtgacacagaagcatatccaggagtggggccctttcgacctggtgatcggcggcagcccttgcaatgacctgagcatcgtgaacccagcccggaagggcctgtacgagggaaccggcagactgttcttcgagttttacagactgctgcacgacgcccggcctaaggaaggcgacgaccggcccttcttttggctgttcgagaatgtggtggccatgggagtcagcgacaagcgggatattagccggttcctggagagcaaccccgtgatgatcgatgccaaggaagtgagcgccgcccaccgggccagatacttctggggcaatctgcctggcatgaacagacccctggccagcaccgtgaacgacaagctggagctgcaggagtgcctggagcacggccggatcgccaagttcagcaaggtgagaaccatcaccacccgaagcaacagcatcaaacaaggcaaggaccagcactttcctgtgttcatgaacgagaaggaggacatcctgtggtgtaccgagatggagagagtgttcgggttcccagtccactacacagatgtcagcaacatgtctagactggccagacagagactgctgggaagaagctggtccgtccctgtgatcagacacctgttcgcccctctgaaggagtacttcgcctgcgtgagcagcggcaacagcaacgccaacagccggggccccagcttctctagcggcctggtgccactgtccctgagagggagccacatgggccccatggagatctacaaaaccgtgagcgcctggaagcggcagcctgtgcgcgtgctgagcctgtttcggaatatcgataaagtcctgaaaagcctgggattcctggagagcggctctggctccggcggtggcaccctgaagtacgtggaggatgtgacaaacgtggtcagacgggatgtggagaagtggggccccttcgatctggtgtacggcagcacccaacccctgggcagctcttgtgaccggtgccctggctggtacatgtttcagttccaccggatcctgcagtacgccctgccgagacaggagtcccagcggccattcttttggattttcatggacaacttgctgctgaccgaggatgaccaggaaactaccactcggttcctgcagaccgaagccgtgaccctgcaggacgtgagaggccgggactaccagaacgccatgcgggtgtggtccaacatccctggactgaaaagcaagcacgcacctctgacccctaaagaagaggagtacctgcaggcccaggtgcggagcagaagcaagctggacgcccctaaggtggatctgctggtgaagaattgcctcctgcccctgagagagtacttcaagtatttcagccagaatagtctgcccctgggcggcccaagcagcggcgcccctcctcccagcggcggcagcccagccggctccccaacctctaccgaggagggcacctctgagtccgccacccccgagagcggccctggcacctccaccgagcccagcgagggcagcgcacccggcagccctgccggcagccccacctccacagaggagggaaccagcaccgagcccagcgaaggcagcgccccaggcaccagcaccgagcctagtgagggcggctctggcggcggcagcgcccaggagattaaacggatcaacaagatcagaagaagacttgtgaaagacagcaacaccaagaaggccggcaagacaggccccatgaaaaccctgctggttagagtgatgacacccgatctgagagagcggctggaaaacctgagaaagaagcctgaaaatatcccccagcccatcagcaatacatctagagccaacctgaataagctgctgaccgattacaccgaaatgaagaaggcgatcctgcatgtgtactgggaagagttccagaaggaccctgtgggcctgatgagccgggtggcccagcctgccagcaagaagatcgatcagaacaagctgaaacctgagatggacgagaagggcaacctgaccaccgccggctttgcctgctctcagtgtggccagcccctgttcgtgtacaagctggagcaggtgtctgagaagggcaaggcttacaccaactacttcggacggtgcaatgtggccgagcacgaaaagctgatcctgctggcccagctgaagcccgagaaggatagcgacgaagccgtgacatatagcctgggaaagtttgggcagagggccctggatttctacagcattcatgtgaccaaggagtccacccaccccgtgaagcccctggcccagatcgccggaaacagatacgcctccggacctgtgggaaaggccctgagcgacgcatgtatgggcacaatcgcctccttcctgtctaagtaccaggacatcatcatcgaacaccagaaggtggtgaagggcaaccagaagagactggagagcctgcgggagctggccggcaaggaaaacctggaataccctagcgtgaccctgccacctcagcctcacaccaaggagggcgttgatgcctacaacgaagtgatcgcccgggtgcgaatgtgggtgaacctgaacctgtggcagaagctgaagctaagcagagatgatgccaagcctctgctgagactgaagggattcccttcctttcctctggtcgagagacaggccaacgaagtggactggtgggacatggtgtgtaacgtgaagaagctgatcaacgagaaaaaggaggatggcaaggtgttttggcagaatctggctggctacaagagacaggaagccctgagaccatacctgagcagcgaggaagatcggaagaagggaaagaaattcgctcggtaccagctgggcgacctgctgctgcacctggaaaagaagcacggcgaggactggggaaaggtgtacgacgaggcctgggagcggattgacaagaaagtggaaggcctgagcaagcacatcaagctggaagaggaacggagaagcgaggacgcccagagcaaggccgccctgaccgactggctgcgggctaaggccagcttcgtgatcgagggcctgaaggaggccgacaaggacgagttctgcagatgcgagctgaagctgcagaagtggtacggggacctgcggggaaagcccttcgccatcgaagccgagaacagcatcctggacatcagcggcttcagcaagcagtacaactgtgccttcatctggcagaaggacggcgtgaagaagctgaacctgtacctgatcatcaactacttcaagggcggcaagctgcggttcaagaagatcaaacctgaagccttcgaagccaacagattctacaccgtgatcaacaaaaagagcggcgagatcgtgcccatggaggtgaacttcaacttcgacgaccccaacctgatcatcctgcctctggcctttggcaagagacagggcagagaattcatctggaacgacctgctgtccctggaaaccggcagcctgaagctggccaacggaagagtgatcgagaagacactgtacaacagaagaacccggcaggatgagcctgccctgttcgtggccctgaccttcgagcggcgggaggtcctggactcctccaatatcaaaccaatgaacctgatcggcgtggcaagaggcgaaaacatccccgccgtgatcgccctgaccgaccccgagggctgcccactgagccggtttaaggatagcctgggaaacccaacccacatcctgagaatcggcgagagctataaggagaagcagcggaccatccaggccaagaaggaggtggagcagcggagagccggcggctacagccggaagtacgccagcaaagccaagaatctggcagacgatatggtgagaaacaccgctagagatctgctgtactacgccgtgacccaggatgccatgctgatcttcgccaacctgagccggggcttcggccggcagggcaagcggaccttcatggccgagagacagtacacacggatggaggactggctgaccgccaagctggcctacgagggcctgagcaagacctacctgtccaagacactggcccagtacacctccaagacatgcagcaactgtgggtttaccatcaccagcgccgactacgacagggtgctggagaagctgaagaagacagcaacaggctggatgaccacaattaacggcaaggagctgaaggtggagggccagattacctactacaacagatacaagagacagaacgtagtcaaggacctgtccgtcgagctggatagactgagcgaagaatctgtgaacaacgacatctcctcctggacaaagggcagaagcggagaagctctgagcctcctgaagaaaagattctcccatagacccgtgcaggagaagttcgtgtgcctgaactgcggcttcgagacacacgcagccgagcaagccgccctgaacatcgccagatcctggctgttcctgcggagccaggagtacaagaaataccagacaaacaagacaaccggcaacaccgataagagagccttcgtcgagacctggcagtccttttaccggaagaagcttaaggaggtgtggaaacctgccgtgcggtctggcggatctggcggaggctccacaagcgccagggccagcctgagcttcgaggacgtggccgtgggcttcagctgggaggagtggcagctgctggcccccagccagaaggacctgtacagggaggtgatgctggagaactacaggaacctggtgagcgtgggctaccaggccagcaagcccgacagcctgttccacctggagcagggcgagcccccctggaccgtggtgggcgccgcccagagccagacctgccaggagatctgggagatcaccagccccaagaaaaagagaaaagtctaagctgccttctgcggggcttgccttctggccatgcccttcttctctcccttgcacctgtacctcttggtctttgaataaagcctgagtaggaaggctagcaaaaaaaaaaaaaaaaaaaaaaaaaaaaaaaaaaaaaaaaaaaaaaaaaaaaaaaaaaaaaaaaaaaaaaaaaaaaaaaa

SEQ ID NO: 2814 - RNA, 5419 nt, synthetic construct
  source 1..5419: mol_type = other RNA
aggaaataagagagaaaagaagagtaagaagaaatataagagccaccatggcccctaagaagaagcgtaaagtgagccgggtgaacggcagcggcagcggcggcggcatgaaccacgaccaggagttcgacccccctaaggtgtaccctcccgtccccgccgagaagagaaagcccatccgggtcctgagcctgttcgatggcatcgccaccggtctgctggtgctgaaggacctgggcatccaggtggataggtacattgcctccgaggtgtgcgaggactccatcaccgtgggaatggtgcgtcatcagggcaagatcatgtacgtgggcgacgtgcggagcgtgacacagaagcatatccaggagtggggccctttcgacctggtgatcggcggcagcccttgcaatgacctgagcatcgtgaacccagcccggaagggcctgtacgagggaaccggcagactgttcttcgagttttacagactgctgcacgacgcccggcctaaggaaggcgacgaccggcccttcttttggctgttcgagaatgtggtggccatgggagtcagcgacaagcgggatattagccggttcctggagagcaaccccgtgatgatcgatgccaaggaagtgagcgccgcccaccgggccagatacttctggggcaatctgcctggcatgaacagacccctggccagcaccgtgaacgacaagctggagctgcaggagtgcctggagcacggccggatcgccaagttcagcaaggtgagaaccatcaccacccgaagcaacagcatcaaacaaggcaaggaccagcactttcctgtgttcatgaacgagaaggaggacatcctgtggtgtaccgagatggagagagtgttcgggttcccagtccactacacagatgtcagcaacatgtctagactggccagacagagactgctgggaagaagctggtccgtccctgtgatcagacacctgttcgcccctctgaaggagtacttcgcctgcgtgagcagcggcaacagcaacgccaacagccggggccccagcttctctagcggcctggtgccactgtccctgagagggagccacatgggccccatggagatctacaaaaccgtgagcgcctggaagcggcagcctgtgcgcgtgctgagcctgtttcggaatatcgataaagtcctgaaaagcctgggattcctggagagcggctctggctccggcggtggcaccctgaagtacgtggaggatgtgacaaacgtggtcagacgggatgtggagaagtggggccccttcgatctggtgtacggcagcacccaacccctgggcagctcttgtgaccggtgccctggctggtacatgtttcagttccaccggatcctgcagtacgccctgccgagacaggagtcccagcggccattcttttggattttcatggacaacttgctgctgaccgaggatgaccaggaaactaccactcggttcctgcagaccgaagccgtgaccctgcaggacgtgagaggccgggactaccagaacgccatgcgggtgtggtccaacatccctggactgaaaagcaagcacgcacctctgacccctaaagaagaggagtacctgcaggcccaggtgcggagcagaagcaagctggacgcccctaaggtggatctgctggtgaagaattgcctcctgcccctgagagagtacttcaagtatttcagccagaatagtctgcccctgggcggcccaagcagcggcgcccctcctcccagcggcggcagcccagccggctccccaacctctaccgaggagggcacctctgagtccgccacccccgagagcggccctggcacctccaccgagcccagcgagggcagcgcacccggcagccctgccggcagccccacctccacagaggagggaaccagcaccgagcccagcgaaggcagcgccccaggcaccagcaccgagcctagtgagggcggctctggcggcggcagcgcccaggagattaaacggatcaacaagatcagaagaagacttgtgaaagacagcaacaccaagaaggccggcaagacaggccccatgaaaaccctgctggttagagtgatgacacccgatctgagagagcggctggaaaacctgagaaagaagcctgaaaatatcccccagcccatcagcaatacatctagagccaacctgaataagctgctgaccgattacaccgaaatgaagaaggcgatcctgcatgtgtactgggaagagttccagaaggaccctgtgggcctgatgagccgggtggcccagcctgccagcaagaagatcgatcagaacaagctgaaacctgagatggacgagaagggcaacctgaccaccgccggctttgcctgctctcagtgtggccagcccctgttcgtgtacaagctggagcaggtgtctgagaagggcaaggcttacaccaactacttcggacggtgcaatgtggccgagcacgaaaagctgatcctgctggcccagctgaagcccgagaaggatagcgacgaagccgtgacatatagcctgggaaagtttgggcagagggccctggatttctacagcattcatgtgaccaaggagtccacccaccccgtgaagcccctggcccagatcgccggaaacagatacgcctccggacctgtgggaaaggccctgagcgacgcatgtatgggcacaatcgcctccttcctgtctaagtaccaggacatcatcatcgaacaccagaaggtggtgaagggcaaccagaagagactggagagcctgcgggagctggccggcaaggaaaacctggaataccctagcgtgaccctgccacctcagcctcacaccaaggagggcgttgatgcctacaacgaagtgatcgcccgggtgcgaatgtgggtgaacctgaacctgtggcagaagctgaagctaagcagagatgatgccaagcctctgctgagactgaagggattcccttcctttcctctggtcgagagacaggccaacgaagtggactggtgggacatggtgtgtaacgtgaagaagctgatcaacgagaaaaaggaggatggcaaggtgttttggcagaatctggctggctacaagagacaggaagccctgagaccatacctgagcagcgaggaagatcggaagaagggaaagaaattcgctcggtaccagctgggcgacctgctgctgcacctggaaaagaagcacggcgaggactggggaaaggtgtacgacgaggcctgggagcggattgacaagaaagtggaaggcctgagcaagcacatcaagctggaagaggaacggagaagcgaggacgcccagagcaaggccgccctgaccgactggctgcgggctaaggccagcttcgtgatcgagggcctgaaggaggccgacaaggacgagttctgcagatgcgagctgaagctgcagaagtggtacggggacctgcggggaaagcccttcgccatcgaagccgagaacagcatcctggacatcagcggcttcagcaagcagtacaactgtgccttcatctggcagaaggacggcgtgaagaagctgaacctgtacctgatcatcaactacttcaagggcggcaagctgcggttcaagaagatcaaacctgaagccttcgaagccaacagattctacaccgtgatcaacaaaaagagcggcgagatcgtgcccatggaggtgaacttcaacttcgacgaccccaacctgatcatcctgcctctggcctttggcaagagacagggcagagaattcatctggaacgacctgctgtccctggaaaccggcagcctgaagctggccaacggaagagtgatcgagaagacactgtacaacagaagaacccggcaggatgagcctgccctgttcgtggccctgaccttcgagcggcgggaggtcctggactcctccaatatcaaaccaatgaacctgatcggcgtggcaagaggcgaaaacatccccgccgtgatcgccctgaccgaccccgagggctgcccactgagccggtttaaggatagcctgggaaacccaacccacatcctgagaatcggcgagagctataaggagaagcagcggaccatccaggccaagaaggaggtggagcagcggagagccggcggctacagccggaagtacgccagcaaagccaagaatctggcagacgatatggtgagaaacaccgctagagatctgctgtactacgccgtgacccaggatgccatgctgatcttcgccaacctgagccggggcttcggccggcagggcaagcggaccttcatggccgagagacagtacacacggatggaggactggctgaccgccaagctggcctacgagggcctgagcaagacctacctgtccaagacactggcccagtacacctccaagacatgcagcaactgtgggtttaccatcaccagcgccgactacgacagggtgctggagaagctgaagaagacagcaacaggctggatgaccacaattaacggcaaggagctgaaggtggagggccagattacctactacaacagatacaagagacagaacgtagtcaaggacctgtccgtcgagctggatagactgagcgaagaatctgtgaacaacgacatctcctcctggacaaagggcagaagcggagaagctctgagcctcctgaagaaaagattctcccatagacccgtgcaggagaagttcgtgtgcctgaactgcggcttcgagacacacgcagccgagcaagccgccctgaacatcgccagatcctggctgttcctgcggagccaggagtacaagaaataccagacaaacaagacaaccggcaacaccgataagagagccttcgtcgagacctggcagtccttttaccggaagaagcttaaggaggtgtggaaacctgccgtgcggtctggcggatctggcggaggctccacaagcatggccttcgaggacgtggccgtgtacttcagccaggaggagtggatgttcctggacgccgcccagagggccctgtacaggcacgtgatgctggagaacttcgccctggtggacagcatcggcctgagcgtgagcaggcccagggtgatcatccagctgcagaggggcgaggagccctgggtgcccaacaggaccaaccccggccccggcaggagcacctgcaggaggcccagcctgggcagcaccagccccaagaaaaagagaaaagtctaagctgccttctgcggggcttgccttctggccatgcccttcttctctcccttgcacctgtacctcttggtctttgaataaagcctgagtaggaaggctagcaaaaaaaaaaaaaaaaaaaaaaaaaaaaaaaaaaaaaaaaaaaaaaaaaaaaaaaaaaaaaaaaaaaaaaaaaaaaaaaa

SEQ ID NO: 2815 - RNA, 5419 nt, synthetic construct
  source 1..5419: mol_type = other RNA
aggaaataagagagaaaagaagagtaagaagaaatataagagccaccatggcccctaagaagaagcgtaaagtgagccgggtgaacggcagcggcagcggcggcggcatgaaccacgaccaggagttcgacccccctaaggtgtaccctcccgtccccgccgagaagagaaagcccatccgggtcctgagcctgttcgatggcatcgccaccggtctgctggtgctgaaggacctgggcatccaggtggataggtacattgcctccgaggtgtgcgaggactccatcaccgtgggaatggtgcgtcatcagggcaagatcatgtacgtgggcgacgtgcggagcgtgacacagaagcatatccaggagtggggccctttcgacctggtgatcggcggcagcccttgcaatgacctgagcatcgtgaacccagcccggaagggcctgtacgagggaaccggcagactgttcttcgagttttacagactgctgcacgacgcccggcctaaggaaggcgacgaccggcccttcttttggctgttcgagaatgtggtggccatgggagtcagcgacaagcgggatattagccggttcctggagagcaaccccgtgatgatcgatgccaaggaagtgagcgccgcccaccgggccagatacttctggggcaatctgcctggcatgaacagacccctggccagcaccgtgaacgacaagctggagctgcaggagtgcctggagcacggccggatcgccaagttcagcaaggtgagaaccatcaccacccgaagcaacagcatcaaacaaggcaaggaccagcactttcctgtgttcatgaacgagaaggaggacatcctgtggtgtaccgagatggagagagtgttcgggttcccagtccactacacagatgtcagcaacatgtctagactggccagacagagactgctgggaagaagctggtccgtccctgtgatcagacacctgttcgcccctctgaaggagtacttcgcctgcgtgagcagcggcaacagcaacgccaacagccggggccccagcttctctagcggcctggtgccactgtccctgagagggagccacatgggccccatggagatctacaaaaccgtgagcgcctggaagcggcagcctgtgcgcgtgctgagcctgtttcggaatatcgataaagtcctgaaaagcctgggattcctggagagcggctctggctccggcggtggcaccctgaagtacgtggaggatgtgacaaacgtggtcagacgggatgtggagaagtggggccccttcgatctggtgtacggcagcacccaacccctgggcagctcttgtgaccggtgccctggctggtacatgtttcagttccaccggatcctgcagtacgccctgccgagacaggagtcccagcggccattcttttggattttcatggacaacttgctgctgaccgaggatgaccaggaaactaccactcggttcctgcagaccgaagccgtgaccctgcaggacgtgagaggccgggactaccagaacgccatgcgggtgtggtccaacatccctggactgaaaagcaagcacgcacctctgacccctaaagaagaggagtacctgcaggcccaggtgcggagcagaagcaagctggacgcccctaaggtggatctgctggtgaagaattgcctcctgcccctgagagagtacttcaagtatttcagccagaatagtctgcccctgggcggcccaagcagcggcgcccctcctcccagcggcggcagcccagccggctccccaacctctaccgaggagggcacctctgagtccgccacccccgagagcggccctggcacctccaccgagcccagcgagggcagcgcacccggcagccctgccggcagccccacctccacagaggagggaaccagcaccgagcccagcgaaggcagcgccccaggcaccagcaccgagcctagtgagggcggctctggcggcggcagcgcccaggagattaaacggatcaacaagatcagaagaagacttgtgaaagacagcaacaccaagaaggccggcaagacaggccccatgaaaaccctgctggttagagtgatgacacccgatctgagagagcggctggaaaacctgagaaagaagcctgaaaatatcccccagcccatcagcaatacatctagagccaacctgaataagctgctgaccgattacaccgaaatgaagaaggcgatcctgcatgtgtactgggaagagttccagaaggaccctgtgggcctgatgagccgggtggcccagcctgccagcaagaagatcgatcagaacaagctgaaacctgagatggacgagaagggcaacctgaccaccgccggctttgcctgctctcagtgtggccagcccctgttcgtgtacaagctggagcaggtgtctgagaagggcaaggcttacaccaactacttcggacggtgcaatgtggccgagcacgaaaagctgatcctgctggcccagctgaagcccgagaaggatagcgacgaagccgtgacatatagcctgggaaagtttgggcagagggccctggatttctacagcattcatgtgaccaaggagtccacccaccccgtgaagcccctggcccagatcgccggaaacagatacgcctccggacctgtgggaaaggccctgagcgacgcatgtatgggcacaatcgcctccttcctgtctaagtaccaggacatcatcatcgaacaccagaaggtggtgaagggcaaccagaagagactggagagcctgcgggagctggccggcaaggaaaacctggaataccctagcgtgaccctgccacctcagcctcacaccaaggagggcgttgatgcctacaacgaagtgatcgcccgggtgcgaatgtgggtgaacctgaacctgtggcagaagctgaagctaagcagagatgatgccaagcctctgctgagactgaagggattcccttcctttcctctggtcgagagacaggccaacgaagtggactggtgggacatggtgtgtaacgtgaagaagctgatcaacgagaaaaaggaggatggcaaggtgttttggcagaatctggctggctacaagagacaggaagccctgagaccatacctgagcagcgaggaagatcggaagaagggaaagaaattcgctcggtaccagctgggcgacctgctgctgcacctggaaaagaagcacggcgaggactggggaaaggtgtacgacgaggcctgggagcggattgacaagaaagtggaaggcctgagcaagcacatcaagctggaagaggaacggagaagcgaggacgcccagagcaaggccgccctgaccgactggctgcgggctaaggccagcttcgtgatcgagggcctgaaggaggccgacaaggacgagttctgcagatgcgagctgaagctgcagaagtggtacggggacctgcggggaaagcccttcgccatcgaagccgagaacagcatcctggacatcagcggcttcagcaagcagtacaactgtgccttcatctggcagaaggacggcgtgaagaagctgaacctgtacctgatcatcaactacttcaagggcggcaagctgcggttcaagaagatcaaacctgaagccttcgaagccaacagattctacaccgtgatcaacaaaaagagcggcgagatcgtgcccatggaggtgaacttcaacttcgacgaccccaacctgatcatcctgcctctggcctttggcaagagacagggcagagaattcatctggaacgacctgctgtccctggaaaccggcagcctgaagctggccaacggaagagtgatcgagaagacactgtacaacagaagaacccggcaggatgagcctgccctgttcgtggccctgaccttcgagcggcgggaggtcctggactcctccaatatcaaaccaatgaacctgatcggcgtggcaagaggcgaaaacatccccgccgtgatcgccctgaccgaccccgagggctgcccactgagccggtttaaggatagcctgggaaacccaacccacatcctgagaatcggcgagagctataaggagaagcagcggaccatccaggccaagaaggaggtggagcagcggagagccggcggctacagccggaagtacgccagcaaagccaagaatctggcagacgatatggtgagaaacaccgctagagatctgctgtactacgccgtgacccaggatgccatgctgatcttcgccaacctgagccggggcttcggccggcagggcaagcggaccttcatggccgagagacagtacacacggatggaggactggctgaccgccaagctggcctacgagggcctgagcaagacctacctgtccaagacactggcccagtacacctccaagacatgcagcaactgtgggtttaccatcaccagcgccgactacgacagggtgctggagaagctgaagaagacagcaacaggctggatgaccacaattaacggcaaggagctgaaggtggagggccagattacctactacaacagatacaagagacagaacgtagtcaaggacctgtccgtcgagctggatagactgagcgaagaatctgtgaacaacgacatctcctcctggacaaagggcagaagcggagaagctctgagcctcctgaagaaaagattctcccatagacccgtgcaggagaagttcgtgtgcctgaactgcggcttcgagacacacgcagccgagcaagccgccctgaacatcgccagatcctggctgttcctgcggagccaggagtacaagaaataccagacaaacaagacaaccggcaacaccgataagagagccttcgtcgagacctggcagtccttttaccggaagaagcttaaggaggtgtggaaacctgccgtgcggtctggcggatctggcggaggctccacaagcatgagccagggcagcgtgaccttcagggacgtggccatcgacttcagccaggaggagtggaagtggctgcagcccgcccagagggacctgtacaggtgcgtgatgctggagaactacggccacctggtgagcctgggcctgagcatcagcaagcccgacgtggtgagcctgctggagcagggcaaggagccctggctgggcaagagggaggtgaagagggacctgttcagcggctggagcgccaccagccccaagaaaaagagaaaagtctaagctgccttctgcggggcttgccttctggccatgcccttcttctctcccttgcacctgtacctcttggtctttgaataaagcctgagtaggaaggctagcaaaaaaaaaaaaaaaaaaaaaaaaaaaaaaaaaaaaaaaaaaaaaaaaaaaaaaaaaaaaaaaaaaaaaaaaaaaaaaaa

SEQ ID NO: 2816 - RNA, 5419 nt, synthetic construct
  source 1..5419: mol_type = other RNA
aggaaataagagagaaaagaagagtaagaagaaatataagagccaccatggcccctaagaagaagcgtaaagtgagccgggtgaacggcagcggcagcggcggcggcatgaaccacgaccaggagttcgacccccctaaggtgtaccctcccgtccccgccgagaagagaaagcccatccgggtcctgagcctgttcgatggcatcgccaccggtctgctggtgctgaaggacctgggcatccaggtggataggtacattgcctccgaggtgtgcgaggactccatcaccgtgggaatggtgcgtcatcagggcaagatcatgtacgtgggcgacgtgcggagcgtgacacagaagcatatccaggagtggggccctttcgacctggtgatcggcggcagcccttgcaatgacctgagcatcgtgaacccagcccggaagggcctgtacgagggaaccggcagactgttcttcgagttttacagactgctgcacgacgcccggcctaaggaaggcgacgaccggcccttcttttggctgttcgagaatgtggtggccatgggagtcagcgacaagcgggatattagccggttcctggagagcaaccccgtgatgatcgatgccaaggaagtgagcgccgcccaccgggccagatacttctggggcaatctgcctggcatgaacagacccctggccagcaccgtgaacgacaagctggagctgcaggagtgcctggagcacggccggatcgccaagttcagcaaggtgagaaccatcaccacccgaagcaacagcatcaaacaaggcaaggaccagcactttcctgtgttcatgaacgagaaggaggacatcctgtggtgtaccgagatggagagagtgttcgggttcccagtccactacacagatgtcagcaacatgtctagactggccagacagagactgctgggaagaagctggtccgtccctgtgatcagacacctgttcgcccctctgaaggagtacttcgcctgcgtgagcagcggcaacagcaacgccaacagccggggccccagcttctctagcggcctggtgccactgtccctgagagggagccacatgggccccatggagatctacaaaaccgtgagcgcctggaagcggcagcctgtgcgcgtgctgagcctgtttcggaatatcgataaagtcctgaaaagcctgggattcctggagagcggctctggctccggcggtggcaccctgaagtacgtggaggatgtgacaaacgtggtcagacgggatgtggagaagtggggccccttcgatctggtgtacggcagcacccaacccctgggcagctcttgtgaccggtgccctggctggtacatgtttcagttccaccggatcctgcagtacgccctgccgagacaggagtcccagcggccattcttttggattttcatggacaacttgctgctgaccgaggatgaccaggaaactaccactcggttcctgcagaccgaagccgtgaccctgcaggacgtgagaggccgggactaccagaacgccatgcgggtgtggtccaacatccctggactgaaaagcaagcacgcacctctgacccctaaagaagaggagtacctgcaggcccaggtgcggagcagaagcaagctggacgcccctaaggtggatctgctggtgaagaattgcctcctgcccctgagagagtacttcaagtatttcagccagaatagtctgcccctgggcggcccaagcagcggcgcccctcctcccagcggcggcagcccagccggctccccaacctctaccgaggagggcacctctgagtccgccacccccgagagcggccctggcacctccaccgagcccagcgagggcagcgcacccggcagccctgccggcagccccacctccacagaggagggaaccagcaccgagcccagcgaaggcagcgccccaggcaccagcaccgagcctagtgagggcggctctggcggcggcagcgcccaggagattaaacggatcaacaagatcagaagaagacttgtgaaagacagcaacaccaagaaggccggcaagacaggccccatgaaaaccctgctggttagagtgatgacacccgatctgagagagcggctggaaaacctgagaaagaagcctgaaaatatcccccagcccatcagcaatacatctagagccaacctgaataagctgctgaccgattacaccgaaatgaagaaggcgatcctgcatgtgtactgggaagagttccagaaggaccctgtgggcctgatgagccgggtggcccagcctgccagcaagaagatcgatcagaacaagctgaaacctgagatggacgagaagggcaacctgaccaccgccggctttgcctgctctcagtgtggccagcccctgttcgtgtacaagctggagcaggtgtctgagaagggcaaggcttacaccaactacttcggacggtgcaatgtggccgagcacgaaaagctgatcctgctggcccagctgaagcccgagaaggatagcgacgaagccgtgacatatagcctgggaaagtttgggcagagggccctggatttctacagcattcatgtgaccaaggagtccacccaccccgtgaagcccctggcccagatcgccggaaacagatacgcctccggacctgtgggaaaggccctgagcgacgcatgtatgggcacaatcgcctccttcctgtctaagtaccaggacatcatcatcgaacaccagaaggtggtgaagggcaaccagaagagactggagagcctgcgggagctggccggcaaggaaaacctggaataccctagcgtgaccctgccacctcagcctcacaccaaggagggcgttgatgcctacaacgaagtgatcgcccgggtgcgaatgtgggtgaacctgaacctgtggcagaagctgaagctaagcagagatgatgccaagcctctgctgagactgaagggattcccttcctttcctctggtcgagagacaggccaacgaagtggactggtgggacatggtgtgtaacgtgaagaagctgatcaacgagaaaaaggaggatggcaaggtgttttggcagaatctggctggctacaagagacaggaagccctgagaccatacctgagcagcgaggaagatcggaagaagggaaagaaattcgctcggtaccagctgggcgacctgctgctgcacctggaaaagaagcacggcgaggactggggaaaggtgtacgacgaggcctgggagcggattgacaagaaagtggaaggcctgagcaagcacatcaagctggaagaggaacggagaagcgaggacgcccagagcaaggccgccctgaccgactggctgcgggctaaggccagcttcgtgatcgagggcctgaaggaggccgacaaggacgagttctgcagatgcgagctgaagctgcagaagtggtacggggacctgcggggaaagcccttcgccatcgaagccgagaacagcatcctggacatcagcggcttcagcaagcagtacaactgtgccttcatctggcagaaggacggcgtgaagaagctgaacctgtacctgatcatcaactacttcaagggcggcaagctgcggttcaagaagatcaaacctgaagccttcgaagccaacagattctacaccgtgatcaacaaaaagagcggcgagatcgtgcccatggaggtgaacttcaacttcgacgaccccaacctgatcatcctgcctctggcctttggcaagagacagggcagagaattcatctggaacgacctgctgtccctggaaaccggcagcctgaagctggccaacggaagagtgatcgagaagacactgtacaacagaagaacccggcaggatgagcctgccctgttcgtggccctgaccttcgagcggcgggaggtcctggactcctccaatatcaaaccaatgaacctgatcggcgtggcaagaggcgaaaacatccccgccgtgatcgccctgaccgaccccgagggctgcccactgagccggtttaaggatagcctgggaaacccaacccacatcctgagaatcggcgagagctataaggagaagcagcggaccatccaggccaagaaggaggtggagcagcggagagccggcggctacagccggaagtacgccagcaaagccaagaatctggcagacgatatggtgagaaacaccgctagagatctgctgtactacgccgtgacccaggatgccatgctgatcttcgccaacctgagccggggcttcggccggcagggcaagcggaccttcatggccgagagacagtacacacggatggaggactggctgaccgccaagctggcctacgagggcctgagcaagacctacctgtccaagacactggcccagtacacctccaagacatgcagcaactgtgggtttaccatcaccagcgccgactacgacagggtgctggagaagctgaagaagacagcaacaggctggatgaccacaattaacggcaaggagctgaaggtggagggccagattacctactacaacagatacaagagacagaacgtagtcaaggacctgtccgtcgagctggatagactgagcgaagaatctgtgaacaacgacatctcctcctggacaaagggcagaagcggagaagctctgagcctcctgaagaaaagattctcccatagacccgtgcaggagaagttcgtgtgcctgaactgcggcttcgagacacacgcagccgagcaagccgccctgaacatcgccagatcctggctgttcctgcggagccaggagtacaagaaataccagacaaacaagacaaccggcaacaccgataagagagccttcgtcgagacctggcagtccttttaccggaagaagcttaaggaggtgtggaaacctgccgtgcggtctggcggatctggcggaggctccacaagcgcccaccacctggtgatgttcagggacgtggccgtggacttcagccaggaggagtgggagtgcctgaacccctaccagaggaacctgtacagggacgtgatcctggagaactacagcaacctggtgagcgtgggctgcagcatcagcaagcccgacgtgatcaccctgctggagcagggcaaggagccctggatggtggtgagggacgagaggaggaggagcctggacctggagagcaggtacaccagccccaagaaaaagagaaaagtctaagctgccttctgcggggcttgccttctggccatgcccttcttctctcccttgcacctgtacctcttggtctttgaataaagcctgagtaggaaggctagcaaaaaaaaaaaaaaaaaaaaaaaaaaaaaaaaaaaaaaaaaaaaaaaaaaaaaaaaaaaaaaaaaaaaaaaaaaaaaaaa

SEQ ID NO: 2817 - RNA, 5419 nt, synthetic construct
  source 1..5419: mol_type = other RNA
aggaaataagagagaaaagaagagtaagaagaaatataagagccaccatggcccctaagaagaagcgtaaagtgagccgggtgaacggcagcggcagcggcggcggcatgaaccacgaccaggagttcgacccccctaaggtgtaccctcccgtccccgccgagaagagaaagcccatccgggtcctgagcctgttcgatggcatcgccaccggtctgctggtgctgaaggacctgggcatccaggtggataggtacattgcctccgaggtgtgcgaggactccatcaccgtgggaatggtgcgtcatcagggcaagatcatgtacgtgggcgacgtgcggagcgtgacacagaagcatatccaggagtggggccctttcgacctggtgatcggcggcagcccttgcaatgacctgagcatcgtgaacccagcccggaagggcctgtacgagggaaccggcagactgttcttcgagttttacagactgctgcacgacgcccggcctaaggaaggcgacgaccggcccttcttttggctgttcgagaatgtggtggccatgggagtcagcgacaagcgggatattagccggttcctggagagcaaccccgtgatgatcgatgccaaggaagtgagcgccgcccaccgggccagatacttctggggcaatctgcctggcatgaacagacccctggccagcaccgtgaacgacaagctggagctgcaggagtgcctggagcacggccggatcgccaagttcagcaaggtgagaaccatcaccacccgaagcaacagcatcaaacaaggcaaggaccagcactttcctgtgttcatgaacgagaaggaggacatcctgtggtgtaccgagatggagagagtgttcgggttcccagtccactacacagatgtcagcaacatgtctagactggccagacagagactgctgggaagaagctggtccgtccctgtgatcagacacctgttcgcccctctgaaggagtacttcgcctgcgtgagcagcggcaacagcaacgccaacagccggggccccagcttctctagcggcctggtgccactgtccctgagagggagccacatgggccccatggagatctacaaaaccgtgagcgcctggaagcggcagcctgtgcgcgtgctgagcctgtttcggaatatcgataaagtcctgaaaagcctgggattcctggagagcggctctggctccggcggtggcaccctgaagtacgtggaggatgtgacaaacgtggtcagacgggatgtggagaagtggggccccttcgatctggtgtacggcagcacccaacccctgggcagctcttgtgaccggtgccctggctggtacatgtttcagttccaccggatcctgcagtacgccctgccgagacaggagtcccagcggccattcttttggattttcatggacaacttgctgctgaccgaggatgaccaggaaactaccactcggttcctgcagaccgaagccgtgaccctgcaggacgtgagaggccgggactaccagaacgccatgcgggtgtggtccaacatccctggactgaaaagcaagcacgcacctctgacccctaaagaagaggagtacctgcaggcccaggtgcggagcagaagcaagctggacgcccctaaggtggatctgctggtgaagaattgcctcctgcccctgagagagtacttcaagtatttcagccagaatagtctgcccctgggcggcccaagcagcggcgcccctcctcccagcggcggcagcccagccggctccccaacctctaccgaggagggcacctctgagtccgccacccccgagagcggccctggcacctccaccgagcccagcgagggcagcgcacccggcagccctgccggcagccccacctccacagaggagggaaccagcaccgagcccagcgaaggcagcgccccaggcaccagcaccgagcctagtgagggcggctctggcggcggcagcgcccaggagattaaacggatcaacaagatcagaagaagacttgtgaaagacagcaacaccaagaaggccggcaagacaggccccatgaaaaccctgctggttagagtgatgacacccgatctgagagagcggctggaaaacctgagaaagaagcctgaaaatatcccccagcccatcagcaatacatctagagccaacctgaataagctgctgaccgattacaccgaaatgaagaaggcgatcctgcatgtgtactgggaagagttccagaaggaccctgtgggcctgatgagccgggtggcccagcctgccagcaagaagatcgatcagaacaagctgaaacctgagatggacgagaagggcaacctgaccaccgccggctttgcctgctctcagtgtggccagcccctgttcgtgtacaagctggagcaggtgtctgagaagggcaaggcttacaccaactacttcggacggtgcaatgtggccgagcacgaaaagctgatcctgctggcccagctgaagcccgagaaggatagcgacgaagccgtgacatatagcctgggaaagtttgggcagagggccctggatttctacagcattcatgtgaccaaggagtccacccaccccgtgaagcccctggcccagatcgccggaaacagatacgcctccggacctgtgggaaaggccctgagcgacgcatgtatgggcacaatcgcctccttcctgtctaagtaccaggacatcatcatcgaacaccagaaggtggtgaagggcaaccagaagagactggagagcctgcgggagctggccggcaaggaaaacctggaataccctagcgtgaccctgccacctcagcctcacaccaaggagggcgttgatgcctacaacgaagtgatcgcccgggtgcgaatgtgggtgaacctgaacctgtggcagaagctgaagctaagcagagatgatgccaagcctctgctgagactgaagggattcccttcctttcctctggtcgagagacaggccaacgaagtggactggtgggacatggtgtgtaacgtgaagaagctgatcaacgagaaaaaggaggatggcaaggtgttttggcagaatctggctggctacaagagacaggaagccctgagaccatacctgagcagcgaggaagatcggaagaagggaaagaaattcgctcggtaccagctgggcgacctgctgctgcacctggaaaagaagcacggcgaggactggggaaaggtgtacgacgaggcctgggagcggattgacaagaaagtggaaggcctgagcaagcacatcaagctggaagaggaacggagaagcgaggacgcccagagcaaggccgccctgaccgactggctgcgggctaaggccagcttcgtgatcgagggcctgaaggaggccgacaaggacgagttctgcagatgcgagctgaagctgcagaagtggtacggggacctgcggggaaagcccttcgccatcgaagccgagaacagcatcctggacatcagcggcttcagcaagcagtacaactgtgccttcatctggcagaaggacggcgtgaagaagctgaacctgtacctgatcatcaactacttcaagggcggcaagctgcggttcaagaagatcaaacctgaagccttcgaagccaacagattctacaccgtgatcaacaaaaagagcggcgagatcgtgcccatggaggtgaacttcaacttcgacgaccccaacctgatcatcctgcctctggcctttggcaagagacagggcagagaattcatctggaacgacctgctgtccctggaaaccggcagcctgaagctggccaacggaagagtgatcgagaagacactgtacaacagaagaacccggcaggatgagcctgccctgttcgtggccctgaccttcgagcggcgggaggtcctggactcctccaatatcaaaccaatgaacctgatcggcgtggcaagaggcgaaaacatccccgccgtgatcgccctgaccgaccccgagggctgcccactgagccggtttaaggatagcctgggaaacccaacccacatcctgagaatcggcgagagctataaggagaagcagcggaccatccaggccaagaaggaggtggagcagcggagagccggcggctacagccggaagtacgccagcaaagccaagaatctggcagacgatatggtgagaaacaccgctagagatctgctgtactacgccgtgacccaggatgccatgctgatcttcgccaacctgagccggggcttcggccggcagggcaagcggaccttcatggccgagagacagtacacacggatggaggactggctgaccgccaagctggcctacgagggcctgagcaagacctacctgtccaagacactggcccagtacacctccaagacatgcagcaactgtgggtttaccatcaccagcgccgactacgacagggtgctggagaagctgaagaagacagcaacaggctggatgaccacaattaacggcaaggagctgaaggtggagggccagattacctactacaacagatacaagagacagaacgtagtcaaggacctgtccgtcgagctggatagactgagcgaagaatctgtgaacaacgacatctcctcctggacaaagggcagaagcggagaagctctgagcctcctgaagaaaagattctcccatagacccgtgcaggagaagttcgtgtgcctgaactgcggcttcgagacacacgcagccgagcaagccgccctgaacatcgccagatcctggctgttcctgcggagccaggagtacaagaaataccagacaaacaagacaaccggcaacaccgataagagagccttcgtcgagacctggcagtccttttaccggaagaagcttaaggaggtgtggaaacctgccgtgcggtctggcggatctggcggaggctccacaagcccccaggagcccgtgaccttcgaggacgtggccgtgtacttcacccagaaccagtgggccagcctggaccccacccagagggccctgtacagggaggtgatgctggagaactacgccagcgtggccagcctggtgttccccttccccaagcccgacctggtgagccagctggagaggggcgaggccccctggggccccgacccctgggaggccgaggtgctgaggggcatctgccccggcggcaccagccccaagaaaaagagaaaagtctaagctgccttctgcggggcttgccttctggccatgcccttcttctctcccttgcacctgtacctcttggtctttgaataaagcctgagtaggaaggctagcaaaaaaaaaaaaaaaaaaaaaaaaaaaaaaaaaaaaaaaaaaaaaaaaaaaaaaaaaaaaaaaaaaaaaaaaaaaaaaaa

SEQ ID NO: 2818 - RNA, 5419 nt, synthetic construct
  source 1..5419: mol_type = other RNA
aggaaataagagagaaaagaagagtaagaagaaatataagagccaccatggcccctaagaagaagcgtaaagtgagccgggtgaacggcagcggcagcggcggcggcatgaaccacgaccaggagttcgacccccctaaggtgtaccctcccgtccccgccgagaagagaaagcccatccgggtcctgagcctgttcgatggcatcgccaccggtctgctggtgctgaaggacctgggcatccaggtggataggtacattgcctccgaggtgtgcgaggactccatcaccgtgggaatggtgcgtcatcagggcaagatcatgtacgtgggcgacgtgcggagcgtgacacagaagcatatccaggagtggggccctttcgacctggtgatcggcggcagcccttgcaatgacctgagcatcgtgaacccagcccggaagggcctgtacgagggaaccggcagactgttcttcgagttttacagactgctgcacgacgcccggcctaaggaaggcgacgaccggcccttcttttggctgttcgagaatgtggtggccatgggagtcagcgacaagcgggatattagccggttcctggagagcaaccccgtgatgatcgatgccaaggaagtgagcgccgcccaccgggccagatacttctggggcaatctgcctggcatgaacagacccctggccagcaccgtgaacgacaagctggagctgcaggagtgcctggagcacggccggatcgccaagttcagcaaggtgagaaccatcaccacccgaagcaacagcatcaaacaaggcaaggaccagcactttcctgtgttcatgaacgagaaggaggacatcctgtggtgtaccgagatggagagagtgttcgggttcccagtccactacacagatgtcagcaacatgtctagactggccagacagagactgctgggaagaagctggtccgtccctgtgatcagacacctgttcgcccctctgaaggagtacttcgcctgcgtgagcagcggcaacagcaacgccaacagccggggccccagcttctctagcggcctggtgccactgtccctgagagggagccacatgggccccatggagatctacaaaaccgtgagcgcctggaagcggcagcctgtgcgcgtgctgagcctgtttcggaatatcgataaagtcctgaaaagcctgggattcctggagagcggctctggctccggcggtggcaccctgaagtacgtggaggatgtgacaaacgtggtcagacgggatgtggagaagtggggccccttcgatctggtgtacggcagcacccaacccctgggcagctcttgtgaccggtgccctggctggtacatgtttcagttccaccggatcctgcagtacgccctgccgagacaggagtcccagcggccattcttttggattttcatggacaacttgctgctgaccgaggatgaccaggaaactaccactcggttcctgcagaccgaagccgtgaccctgcaggacgtgagaggccgggactaccagaacgccatgcgggtgtggtccaacatccctggactgaaaagcaagcacgcacctctgacccctaaagaagaggagtacctgcaggcccaggtgcggagcagaagcaagctggacgcccctaaggtggatctgctggtgaagaattgcctcctgcccctgagagagtacttcaagtatttcagccagaatagtctgcccctgggcggcccaagcagcggcgcccctcctcccagcggcggcagcccagccggctccccaacctctaccgaggagggcacctctgagtccgccacccccgagagcggccctggcacctccaccgagcccagcgagggcagcgcacccggcagccctgccggcagccccacctccacagaggagggaaccagcaccgagcccagcgaaggcagcgccccaggcaccagcaccgagcctagtgagggcggctctggcggcggcagcgcccaggagattaaacggatcaacaagatcagaagaagacttgtgaaagacagcaacaccaagaaggccggcaagacaggccccatgaaaaccctgctggttagagtgatgacacccgatctgagagagcggctggaaaacctgagaaagaagcctgaaaatatcccccagcccatcagcaatacatctagagccaacctgaataagctgctgaccgattacaccgaaatgaagaaggcgatcctgcatgtgtactgggaagagttccagaaggaccctgtgggcctgatgagccgggtggcccagcctgccagcaagaagatcgatcagaacaagctgaaacctgagatggacgagaagggcaacctgaccaccgccggctttgcctgctctcagtgtggccagcccctgttcgtgtacaagctggagcaggtgtctgagaagggcaaggcttacaccaactacttcggacggtgcaatgtggccgagcacgaaaagctgatcctgctggcccagctgaagcccgagaaggatagcgacgaagccgtgacatatagcctgggaaagtttgggcagagggccctggatttctacagcattcatgtgaccaaggagtccacccaccccgtgaagcccctggcccagatcgccggaaacagatacgcctccggacctgtgggaaaggccctgagcgacgcatgtatgggcacaatcgcctccttcctgtctaagtaccaggacatcatcatcgaacaccagaaggtggtgaagggcaaccagaagagactggagagcctgcgggagctggccggcaaggaaaacctggaataccctagcgtgaccctgccacctcagcctcacaccaaggagggcgttgatgcctacaacgaagtgatcgcccgggtgcgaatgtgggtgaacctgaacctgtggcagaagctgaagctaagcagagatgatgccaagcctctgctgagactgaagggattcccttcctttcctctggtcgagagacaggccaacgaagtggactggtgggacatggtgtgtaacgtgaagaagctgatcaacgagaaaaaggaggatggcaaggtgttttggcagaatctggctggctacaagagacaggaagccctgagaccatacctgagcagcgaggaagatcggaagaagggaaagaaattcgctcggtaccagctgggcgacctgctgctgcacctggaaaagaagcacggcgaggactggggaaaggtgtacgacgaggcctgggagcggattgacaagaaagtggaaggcctgagcaagcacatcaagctggaagaggaacggagaagcgaggacgcccagagcaaggccgccctgaccgactggctgcgggctaaggccagcttcgtgatcgagggcctgaaggaggccgacaaggacgagttctgcagatgcgagctgaagctgcagaagtggtacggggacctgcggggaaagcccttcgccatcgaagccgagaacagcatcctggacatcagcggcttcagcaagcagtacaactgtgccttcatctggcagaaggacggcgtgaagaagctgaacctgtacctgatcatcaactacttcaagggcggcaagctgcggttcaagaagatcaaacctgaagccttcgaagccaacagattctacaccgtgatcaacaaaaagagcggcgagatcgtgcccatggaggtgaacttcaacttcgacgaccccaacctgatcatcctgcctctggcctttggcaagagacagggcagagaattcatctggaacgacctgctgtccctggaaaccggcagcctgaagctggccaacggaagagtgatcgagaagacactgtacaacagaagaacccggcaggatgagcctgccctgttcgtggccctgaccttcgagcggcgggaggtcctggactcctccaatatcaaaccaatgaacctgatcggcgtggcaagaggcgaaaacatccccgccgtgatcgccctgaccgaccccgagggctgcccactgagccggtttaaggatagcctgggaaacccaacccacatcctgagaatcggcgagagctataaggagaagcagcggaccatccaggccaagaaggaggtggagcagcggagagccggcggctacagccggaagtacgccagcaaagccaagaatctggcagacgatatggtgagaaacaccgctagagatctgctgtactacgccgtgacccaggatgccatgctgatcttcgccaacctgagccggggcttcggccggcagggcaagcggaccttcatggccgagagacagtacacacggatggaggactggctgaccgccaagctggcctacgagggcctgagcaagacctacctgtccaagacactggcccagtacacctccaagacatgcagcaactgtgggtttaccatcaccagcgccgactacgacagggtgctggagaagctgaagaagacagcaacaggctggatgaccacaattaacggcaaggagctgaaggtggagggccagattacctactacaacagatacaagagacagaacgtagtcaaggacctgtccgtcgagctggatagactgagcgaagaatctgtgaacaacgacatctcctcctggacaaagggcagaagcggagaagctctgagcctcctgaagaaaagattctcccatagacccgtgcaggagaagttcgtgtgcctgaactgcggcttcgagacacacgcagccgagcaagccgccctgaacatcgccagatcctggctgttcctgcggagccaggagtacaagaaataccagacaaacaagacaaccggcaacaccgataagagagccttcgtcgagacctggcagtccttttaccggaagaagcttaaggaggtgtggaaacctgccgtgcggtctggcggatctggcggaggctccacaagcatggccttcgaggacgtggccgtgtacttcagccaggaggagtgggtgttcctggacgccgcccagagggccctgtacaggcacgtgatgctggagaacttcgccctggtggacagcatcggcctgagcatcagcaggcccagggtgatcatccagctgcagaggggcgaggagccctgggtgcccaacaggaccaacaccggccccggcaggggcaccaggaggaggcccagcctgggcagcaccagccccaagaaaaagagaaaagtctaagctgccttctgcggggcttgccttctggccatgcccttcttctctcccttgcacctgtacctcttggtctttgaataaagcctgagtaggaaggctagcaaaaaaaaaaaaaaaaaaaaaaaaaaaaaaaaaaaaaaaaaaaaaaaaaaaaaaaaaaaaaaaaaaaaaaaaaaaaaaaa

SEQ ID NO: 2819 - RNA, 5419 nt, synthetic construct
  source 1..5419: mol_type = other RNA
aggaaataagagagaaaagaagagtaagaagaaatataagagccaccatggcccctaagaagaagcgtaaagtgagccgggtgaacggcagcggcagcggcggcggcatgaaccacgaccaggagttcgacccccctaaggtgtaccctcccgtccccgccgagaagagaaagcccatccgggtcctgagcctgttcgatggcatcgccaccggtctgctggtgctgaaggacctgggcatccaggtggataggtacattgcctccgaggtgtgcgaggactccatcaccgtgggaatggtgcgtcatcagggcaagatcatgtacgtgggcgacgtgcggagcgtgacacagaagcatatccaggagtggggccctttcgacctggtgatcggcggcagcccttgcaatgacctgagcatcgtgaacccagcccggaagggcctgtacgagggaaccggcagactgttcttcgagttttacagactgctgcacgacgcccggcctaaggaaggcgacgaccggcccttcttttggctgttcgagaatgtggtggccatgggagtcagcgacaagcgggatattagccggttcctggagagcaaccccgtgatgatcgatgccaaggaagtgagcgccgcccaccgggccagatacttctggggcaatctgcctggcatgaacagacccctggccagcaccgtgaacgacaagctggagctgcaggagtgcctggagcacggccggatcgccaagttcagcaaggtgagaaccatcaccacccgaagcaacagcatcaaacaaggcaaggaccagcactttcctgtgttcatgaacgagaaggaggacatcctgtggtgtaccgagatggagagagtgttcgggttcccagtccactacacagatgtcagcaacatgtctagactggccagacagagactgctgggaagaagctggtccgtccctgtgatcagacacctgttcgcccctctgaaggagtacttcgcctgcgtgagcagcggcaacagcaacgccaacagccggggccccagcttctctagcggcctggtgccactgtccctgagagggagccacatgggccccatggagatctacaaaaccgtgagcgcctggaagcggcagcctgtgcgcgtgctgagcctgtttcggaatatcgataaagtcctgaaaagcctgggattcctggagagcggctctggctccggcggtggcaccctgaagtacgtggaggatgtgacaaacgtggtcagacgggatgtggagaagtggggccccttcgatctggtgtacggcagcacccaacccctgggcagctcttgtgaccggtgccctggctggtacatgtttcagttccaccggatcctgcagtacgccctgccgagacaggagtcccagcggccattcttttggattttcatggacaacttgctgctgaccgaggatgaccaggaaactaccactcggttcctgcagaccgaagccgtgaccctgcaggacgtgagaggccgggactaccagaacgccatgcgggtgtggtccaacatccctggactgaaaagcaagcacgcacctctgacccctaaagaagaggagtacctgcaggcccaggtgcggagcagaagcaagctggacgcccctaaggtggatctgctggtgaagaattgcctcctgcccctgagagagtacttcaagtatttcagccagaatagtctgcccctgggcggcccaagcagcggcgcccctcctcccagcggcggcagcccagccggctccccaacctctaccgaggagggcacctctgagtccgccacccccgagagcggccctggcacctccaccgagcccagcgagggcagcgcacccggcagccctgccggcagccccacctccacagaggagggaaccagcaccgagcccagcgaaggcagcgccccaggcaccagcaccgagcctagtgagggcggctctggcggcggcagcgcccaggagattaaacggatcaacaagatcagaagaagacttgtgaaagacagcaacaccaagaaggccggcaagacaggccccatgaaaaccctgctggttagagtgatgacacccgatctgagagagcggctggaaaacctgagaaagaagcctgaaaatatcccccagcccatcagcaatacatctagagccaacctgaataagctgctgaccgattacaccgaaatgaagaaggcgatcctgcatgtgtactgggaagagttccagaaggaccctgtgggcctgatgagccgggtggcccagcctgccagcaagaagatcgatcagaacaagctgaaacctgagatggacgagaagggcaacctgaccaccgccggctttgcctgctctcagtgtggccagcccctgttcgtgtacaagctggagcaggtgtctgagaagggcaaggcttacaccaactacttcggacggtgcaatgtggccgagcacgaaaagctgatcctgctggcccagctgaagcccgagaaggatagcgacgaagccgtgacatatagcctgggaaagtttgggcagagggccctggatttctacagcattcatgtgaccaaggagtccacccaccccgtgaagcccctggcccagatcgccggaaacagatacgcctccggacctgtgggaaaggccctgagcgacgcatgtatgggcacaatcgcctccttcctgtctaagtaccaggacatcatcatcgaacaccagaaggtggtgaagggcaaccagaagagactggagagcctgcgggagctggccggcaaggaaaacctggaataccctagcgtgaccctgccacctcagcctcacaccaaggagggcgttgatgcctacaacgaagtgatcgcccgggtgcgaatgtgggtgaacctgaacctgtggcagaagctgaagctaagcagagatgatgccaagcctctgctgagactgaagggattcccttcctttcctctggtcgagagacaggccaacgaagtggactggtgggacatggtgtgtaacgtgaagaagctgatcaacgagaaaaaggaggatggcaaggtgttttggcagaatctggctggctacaagagacaggaagccctgagaccatacctgagcagcgaggaagatcggaagaagggaaagaaattcgctcggtaccagctgggcgacctgctgctgcacctggaaaagaagcacggcgaggactggggaaaggtgtacgacgaggcctgggagcggattgacaagaaagtggaaggcctgagcaagcacatcaagctggaagaggaacggagaagcgaggacgcccagagcaaggccgccctgaccgactggctgcgggctaaggccagcttcgtgatcgagggcctgaaggaggccgacaaggacgagttctgcagatgcgagctgaagctgcagaagtggtacggggacctgcggggaaagcccttcgccatcgaagccgagaacagcatcctggacatcagcggcttcagcaagcagtacaactgtgccttcatctggcagaaggacggcgtgaagaagctgaacctgtacctgatcatcaactacttcaagggcggcaagctgcggttcaagaagatcaaacctgaagccttcgaagccaacagattctacaccgtgatcaacaaaaagagcggcgagatcgtgcccatggaggtgaacttcaacttcgacgaccccaacctgatcatcctgcctctggcctttggcaagagacagggcagagaattcatctggaacgacctgctgtccctggaaaccggcagcctgaagctggccaacggaagagtgatcgagaagacactgtacaacagaagaacccggcaggatgagcctgccctgttcgtggccctgaccttcgagcggcgggaggtcctggactcctccaatatcaaaccaatgaacctgatcggcgtggcaagaggcgaaaacatccccgccgtgatcgccctgaccgaccccgagggctgcccactgagccggtttaaggatagcctgggaaacccaacccacatcctgagaatcggcgagagctataaggagaagcagcggaccatccaggccaagaaggaggtggagcagcggagagccggcggctacagccggaagtacgccagcaaagccaagaatctggcagacgatatggtgagaaacaccgctagagatctgctgtactacgccgtgacccaggatgccatgctgatcttcgccaacctgagccggggcttcggccggcagggcaagcggaccttcatggccgagagacagtacacacggatggaggactggctgaccgccaagctggcctacgagggcctgagcaagacctacctgtccaagacactggcccagtacacctccaagacatgcagcaactgtgggtttaccatcaccagcgccgactacgacagggtgctggagaagctgaagaagacagcaacaggctggatgaccacaattaacggcaaggagctgaaggtggagggccagattacctactacaacagatacaagagacagaacgtagtcaaggacctgtccgtcgagctggatagactgagcgaagaatctgtgaacaacgacatctcctcctggacaaagggcagaagcggagaagctctgagcctcctgaagaaaagattctcccatagacccgtgcaggagaagttcgtgtgcctgaactgcggcttcgagacacacgcagccgagcaagccgccctgaacatcgccagatcctggctgttcctgcggagccaggagtacaagaaataccagacaaacaagacaaccggcaacaccgataagagagccttcgtcgagacctggcagtccttttaccggaagaagcttaaggaggtgtggaaacctgccgtgcggtctggcggatctggcggaggctccacaagcgaggagctgcccgtggtgttcgaggacgtggccgtgtacttcaccagggaggagtggggcatgctggtgaagaggcagaaggagctgtacagggacgtgatgaggatgaactacgagctgctggccagcctgggccccgccgccgccaagcccgacctgatcagcaagctggagaggagggccgccccctggatcaaggaccccaacggccccaagtggggcaagggcaggccccccggcaagaccagccccaagaaaaagagaaaagtctaagctgccttctgcggggcttgccttctggccatgcccttcttctctcccttgcacctgtacctcttggtctttgaataaagcctgagtaggaaggctagcaaaaaaaaaaaaaaaaaaaaaaaaaaaaaaaaaaaaaaaaaaaaaaaaaaaaaaaaaaaaaaaaaaaaaaaaaaaaaaaa

SEQ ID NO: 2820 - RNA, 5419 nt, synthetic construct
  source 1..5419: mol_type = other RNA
aggaaataagagagaaaagaagagtaagaagaaatataagagccaccatggcccctaagaagaagcgtaaagtgagccgggtgaacggcagcggcagcggcggcggcatgaaccacgaccaggagttcgacccccctaaggtgtaccctcccgtccccgccgagaagagaaagcccatccgggtcctgagcctgttcgatggcatcgccaccggtctgctggtgctgaaggacctgggcatccaggtggataggtacattgcctccgaggtgtgcgaggactccatcaccgtgggaatggtgcgtcatcagggcaagatcatgtacgtgggcgacgtgcggagcgtgacacagaagcatatccaggagtggggccctttcgacctggtgatcggcggcagcccttgcaatgacctgagcatcgtgaacccagcccggaagggcctgtacgagggaaccggcagactgttcttcgagttttacagactgctgcacgacgcccggcctaaggaaggcgacgaccggcccttcttttggctgttcgagaatgtggtggccatgggagtcagcgacaagcgggatattagccggttcctggagagcaaccccgtgatgatcgatgccaaggaagtgagcgccgcccaccgggccagatacttctggggcaatctgcctggcatgaacagacccctggccagcaccgtgaacgacaagctggagctgcaggagtgcctggagcacggccggatcgccaagttcagcaaggtgagaaccatcaccacccgaagcaacagcatcaaacaaggcaaggaccagcactttcctgtgttcatgaacgagaaggaggacatcctgtggtgtaccgagatggagagagtgttcgggttcccagtccactacacagatgtcagcaacatgtctagactggccagacagagactgctgggaagaagctggtccgtccctgtgatcagacacctgttcgcccctctgaaggagtacttcgcctgcgtgagcagcggcaacagcaacgccaacagccggggccccagcttctctagcggcctggtgccactgtccctgagagggagccacatgggccccatggagatctacaaaaccgtgagcgcctggaagcggcagcctgtgcgcgtgctgagcctgtttcggaatatcgataaagtcctgaaaagcctgggattcctggagagcggctctggctccggcggtggcaccctgaagtacgtggaggatgtgacaaacgtggtcagacgggatgtggagaagtggggccccttcgatctggtgtacggcagcacccaacccctgggcagctcttgtgaccggtgccctggctggtacatgtttcagttccaccggatcctgcagtacgccctgccgagacaggagtcccagcggccattcttttggattttcatggacaacttgctgctgaccgaggatgaccaggaaactaccactcggttcctgcagaccgaagccgtgaccctgcaggacgtgagaggccgggactaccagaacgccatgcgggtgtggtccaacatccctggactgaaaagcaagcacgcacctctgacccctaaagaagaggagtacctgcaggcccaggtgcggagcagaagcaagctggacgcccctaaggtggatctgctggtgaagaattgcctcctgcccctgagagagtacttcaagtatttcagccagaatagtctgcccctgggcggcccaagcagcggcgcccctcctcccagcggcggcagcccagccggctccccaacctctaccgaggagggcacctctgagtccgccacccccgagagcggccctggcacctccaccgagcccagcgagggcagcgcacccggcagccctgccggcagccccacctccacagaggagggaaccagcaccgagcccagcgaaggcagcgccccaggcaccagcaccgagcctagtgagggcggctctggcggcggcagcgcccaggagattaaacggatcaacaagatcagaagaagacttgtgaaagacagcaacaccaagaaggccggcaagacaggccccatgaaaaccctgctggttagagtgatgacacccgatctgagagagcggctggaaaacctgagaaagaagcctgaaaatatcccccagcccatcagcaatacatctagagccaacctgaataagctgctgaccgattacaccgaaatgaagaaggcgatcctgcatgtgtactgggaagagttccagaaggaccctgtgggcctgatgagccgggtggcccagcctgccagcaagaagatcgatcagaacaagctgaaacctgagatggacgagaagggcaacctgaccaccgccggctttgcctgctctcagtgtggccagcccctgttcgtgtacaagctggagcaggtgtctgagaagggcaaggcttacaccaactacttcggacggtgcaatgtggccgagcacgaaaagctgatcctgctggcccagctgaagcccgagaaggatagcgacgaagccgtgacatatagcctgggaaagtttgggcagagggccctggatttctacagcattcatgtgaccaaggagtccacccaccccgtgaagcccctggcccagatcgccggaaacagatacgcctccggacctgtgggaaaggccctgagcgacgcatgtatgggcacaatcgcctccttcctgtctaagtaccaggacatcatcatcgaacaccagaaggtggtgaagggcaaccagaagagactggagagcctgcgggagctggccggcaaggaaaacctggaataccctagcgtgaccctgccacctcagcctcacaccaaggagggcgttgatgcctacaacgaagtgatcgcccgggtgcgaatgtgggtgaacctgaacctgtggcagaagctgaagctaagcagagatgatgccaagcctctgctgagactgaagggattcccttcctttcctctggtcgagagacaggccaacgaagtggactggtgggacatggtgtgtaacgtgaagaagctgatcaacgagaaaaaggaggatggcaaggtgttttggcagaatctggctggctacaagagacaggaagccctgagaccatacctgagcagcgaggaagatcggaagaagggaaagaaattcgctcggtaccagctgggcgacctgctgctgcacctggaaaagaagcacggcgaggactggggaaaggtgtacgacgaggcctgggagcggattgacaagaaagtggaaggcctgagcaagcacatcaagctggaagaggaacggagaagcgaggacgcccagagcaaggccgccctgaccgactggctgcgggctaaggccagcttcgtgatcgagggcctgaaggaggccgacaaggacgagttctgcagatgcgagctgaagctgcagaagtggtacggggacctgcggggaaagcccttcgccatcgaagccgagaacagcatcctggacatcagcggcttcagcaagcagtacaactgtgccttcatctggcagaaggacggcgtgaagaagctgaacctgtacctgatcatcaactacttcaagggcggcaagctgcggttcaagaagatcaaacctgaagccttcgaagccaacagattctacaccgtgatcaacaaaaagagcggcgagatcgtgcccatggaggtgaacttcaacttcgacgaccccaacctgatcatcctgcctctggcctttggcaagagacagggcagagaattcatctggaacgacctgctgtccctggaaaccggcagcctgaagctggccaacggaagagtgatcgagaagacactgtacaacagaagaacccggcaggatgagcctgccctgttcgtggccctgaccttcgagcggcgggaggtcctggactcctccaatatcaaaccaatgaacctgatcggcgtggcaagaggcgaaaacatccccgccgtgatcgccctgaccgaccccgagggctgcccactgagccggtttaaggatagcctgggaaacccaacccacatcctgagaatcggcgagagctataaggagaagcagcggaccatccaggccaagaaggaggtggagcagcggagagccggcggctacagccggaagtacgccagcaaagccaagaatctggcagacgatatggtgagaaacaccgctagagatctgctgtactacgccgtgacccaggatgccatgctgatcttcgccaacctgagccggggcttcggccggcagggcaagcggaccttcatggccgagagacagtacacacggatggaggactggctgaccgccaagctggcctacgagggcctgagcaagacctacctgtccaagacactggcccagtacacctccaagacatgcagcaactgtgggtttaccatcaccagcgccgactacgacagggtgctggagaagctgaagaagacagcaacaggctggatgaccacaattaacggcaaggagctgaaggtggagggccagattacctactacaacagatacaagagacagaacgtagtcaaggacctgtccgtcgagctggatagactgagcgaagaatctgtgaacaacgacatctcctcctggacaaagggcagaagcggagaagctctgagcctcctgaagaaaagattctcccatagacccgtgcaggagaagttcgtgtgcctgaactgcggcttcgagacacacgcagccgagcaagccgccctgaacatcgccagatcctggctgttcctgcggagccaggagtacaagaaataccagacaaacaagacaaccggcaacaccgataagagagccttcgtcgagacctggcagtccttttaccggaagaagcttaaggaggtgtggaaacctgccgtgcggtctggcggatctggcggaggctccacaagcgcccaggagagcgtgatgttcagcgacgtgagcatcgacttcagccaggaggagtgggagtgcctgaacgacgaccagagggacctgtacagggacgtgatgctggagaactacagccacctggtgagcatgggccacagcgtgagcaagcccgacgtgatcagcttcctggagcagggcaaggagccctggctggtggacagggagctgaccagggaccactggcccgtgctggagagcaggaccagccccaagaaaaagagaaaagtctaagctgccttctgcggggcttgccttctggccatgcccttcttctctcccttgcacctgtacctcttggtctttgaataaagcctgagtaggaaggctagcaaaaaaaaaaaaaaaaaaaaaaaaaaaaaaaaaaaaaaaaaaaaaaaaaaaaaaaaaaaaaaaaaaaaaaaaaaaaaaaa

SEQ ID NO: 2821 - RNA, 5419 nt, synthetic construct
  source 1..5419: mol_type = other RNA
aggaaataagagagaaaagaagagtaagaagaaatataagagccaccatggcccctaagaagaagcgtaaagtgagccgggtgaacggcagcggcagcggcggcggcatgaaccacgaccaggagttcgacccccctaaggtgtaccctcccgtccccgccgagaagagaaagcccatccgggtcctgagcctgttcgatggcatcgccaccggtctgctggtgctgaaggacctgggcatccaggtggataggtacattgcctccgaggtgtgcgaggactccatcaccgtgggaatggtgcgtcatcagggcaagatcatgtacgtgggcgacgtgcggagcgtgacacagaagcatatccaggagtggggccctttcgacctggtgatcggcggcagcccttgcaatgacctgagcatcgtgaacccagcccggaagggcctgtacgagggaaccggcagactgttcttcgagttttacagactgctgcacgacgcccggcctaaggaaggcgacgaccggcccttcttttggctgttcgagaatgtggtggccatgggagtcagcgacaagcgggatattagccggttcctggagagcaaccccgtgatgatcgatgccaaggaagtgagcgccgcccaccgggccagatacttctggggcaatctgcctggcatgaacagacccctggccagcaccgtgaacgacaagctggagctgcaggagtgcctggagcacggccggatcgccaagttcagcaaggtgagaaccatcaccacccgaagcaacagcatcaaacaaggcaaggaccagcactttcctgtgttcatgaacgagaaggaggacatcctgtggtgtaccgagatggagagagtgttcgggttcccagtccactacacagatgtcagcaacatgtctagactggccagacagagactgctgggaagaagctggtccgtccctgtgatcagacacctgttcgcccctctgaaggagtacttcgcctgcgtgagcagcggcaacagcaacgccaacagccggggccccagcttctctagcggcctggtgccactgtccctgagagggagccacatgggccccatggagatctacaaaaccgtgagcgcctggaagcggcagcctgtgcgcgtgctgagcctgtttcggaatatcgataaagtcctgaaaagcctgggattcctggagagcggctctggctccggcggtggcaccctgaagtacgtggaggatgtgacaaacgtggtcagacgggatgtggagaagtggggccccttcgatctggtgtacggcagcacccaacccctgggcagctcttgtgaccggtgccctggctggtacatgtttcagttccaccggatcctgcagtacgccctgccgagacaggagtcccagcggccattcttttggattttcatggacaacttgctgctgaccgaggatgaccaggaaactaccactcggttcctgcagaccgaagccgtgaccctgcaggacgtgagaggccgggactaccagaacgccatgcgggtgtggtccaacatccctggactgaaaagcaagcacgcacctctgacccctaaagaagaggagtacctgcaggcccaggtgcggagcagaagcaagctggacgcccctaaggtggatctgctggtgaagaattgcctcctgcccctgagagagtacttcaagtatttcagccagaatagtctgcccctgggcggcccaagcagcggcgcccctcctcccagcggcggcagcccagccggctccccaacctctaccgaggagggcacctctgagtccgccacccccgagagcggccctggcacctccaccgagcccagcgagggcagcgcacccggcagccctgccggcagccccacctccacagaggagggaaccagcaccgagcccagcgaaggcagcgccccaggcaccagcaccgagcctagtgagggcggctctggcggcggcagcgcccaggagattaaacggatcaacaagatcagaagaagacttgtgaaagacagcaacaccaagaaggccggcaagacaggccccatgaaaaccctgctggttagagtgatgacacccgatctgagagagcggctggaaaacctgagaaagaagcctgaaaatatcccccagcccatcagcaatacatctagagccaacctgaataagctgctgaccgattacaccgaaatgaagaaggcgatcctgcatgtgtactgggaagagttccagaaggaccctgtgggcctgatgagccgggtggcccagcctgccagcaagaagatcgatcagaacaagctgaaacctgagatggacgagaagggcaacctgaccaccgccggctttgcctgctctcagtgtggccagcccctgttcgtgtacaagctggagcaggtgtctgagaagggcaaggcttacaccaactacttcggacggtgcaatgtggccgagcacgaaaagctgatcctgctggcccagctgaagcccgagaaggatagcgacgaagccgtgacatatagcctgggaaagtttgggcagagggccctggatttctacagcattcatgtgaccaaggagtccacccaccccgtgaagcccctggcccagatcgccggaaacagatacgcctccggacctgtgggaaaggccctgagcgacgcatgtatgggcacaatcgcctccttcctgtctaagtaccaggacatcatcatcgaacaccagaaggtggtgaagggcaaccagaagagactggagagcctgcgggagctggccggcaaggaaaacctggaataccctagcgtgaccctgccacctcagcctcacaccaaggagggcgttgatgcctacaacgaagtgatcgcccgggtgcgaatgtgggtgaacctgaacctgtggcagaagctgaagctaagcagagatgatgccaagcctctgctgagactgaagggattcccttcctttcctctggtcgagagacaggccaacgaagtggactggtgggacatggtgtgtaacgtgaagaagctgatcaacgagaaaaaggaggatggcaaggtgttttggcagaatctggctggctacaagagacaggaagccctgagaccatacctgagcagcgaggaagatcggaagaagggaaagaaattcgctcggtaccagctgggcgacctgctgctgcacctggaaaagaagcacggcgaggactggggaaaggtgtacgacgaggcctgggagcggattgacaagaaagtggaaggcctgagcaagcacatcaagctggaagaggaacggagaagcgaggacgcccagagcaaggccgccctgaccgactggctgcgggctaaggccagcttcgtgatcgagggcctgaaggaggccgacaaggacgagttctgcagatgcgagctgaagctgcagaagtggtacggggacctgcggggaaagcccttcgccatcgaagccgagaacagcatcctggacatcagcggcttcagcaagcagtacaactgtgccttcatctggcagaaggacggcgtgaagaagctgaacctgtacctgatcatcaactacttcaagggcggcaagctgcggttcaagaagatcaaacctgaagccttcgaagccaacagattctacaccgtgatcaacaaaaagagcggcgagatcgtgcccatggaggtgaacttcaacttcgacgaccccaacctgatcatcctgcctctggcctttggcaagagacagggcagagaattcatctggaacgacctgctgtccctggaaaccggcagcctgaagctggccaacggaagagtgatcgagaagacactgtacaacagaagaacccggcaggatgagcctgccctgttcgtggccctgaccttcgagcggcgggaggtcctggactcctccaatatcaaaccaatgaacctgatcggcgtggcaagaggcgaaaacatccccgccgtgatcgccctgaccgaccccgagggctgcccactgagccggtttaaggatagcctgggaaacccaacccacatcctgagaatcggcgagagctataaggagaagcagcggaccatccaggccaagaaggaggtggagcagcggagagccggcggctacagccggaagtacgccagcaaagccaagaatctggcagacgatatggtgagaaacaccgctagagatctgctgtactacgccgtgacccaggatgccatgctgatcttcgccaacctgagccggggcttcggccggcagggcaagcggaccttcatggccgagagacagtacacacggatggaggactggctgaccgccaagctggcctacgagggcctgagcaagacctacctgtccaagacactggcccagtacacctccaagacatgcagcaactgtgggtttaccatcaccagcgccgactacgacagggtgctggagaagctgaagaagacagcaacaggctggatgaccacaattaacggcaaggagctgaaggtggagggccagattacctactacaacagatacaagagacagaacgtagtcaaggacctgtccgtcgagctggatagactgagcgaagaatctgtgaacaacgacatctcctcctggacaaagggcagaagcggagaagctctgagcctcctgaagaaaagattctcccatagacccgtgcaggagaagttcgtgtgcctgaactgcggcttcgagacacacgcagccgagcaagccgccctgaacatcgccagatcctggctgttcctgcggagccaggagtacaagaaataccagacaaacaagacaaccggcaacaccgataagagagccttcgtcgagacctggcagtccttttaccggaagaagcttaaggaggtgtggaaacctgccgtgcggtctggcggatctggcggaggctccacaagcagccaggagagcgtgagcttcgaggacgtggccgtgtacttcacccagaaccagtgggccagcctggccagcgcccagaggaccctgtacagggaggtgatgctggagaactacgccaacgtgaccagcctggccgccttccccttccccaagcccgacctgatcttccagctggagaggggcgaggcccccggcggcctggacccctggaccagcatcaggagggaggtgaggggcgtgtgcaccagccccaagaaaaagagaaaagtctaagctgccttctgcggggcttgccttctggccatgcccttcttctctcccttgcacctgtacctcttggtctttgaataaagcctgagtaggaaggctagcaaaaaaaaaaaaaaaaaaaaaaaaaaaaaaaaaaaaaaaaaaaaaaaaaaaaaaaaaaaaaaaaaaaaaaaaaaaaaaaa

SEQ ID NO: 2822 - RNA, 5437 nt, synthetic construct
  source 1..5437: mol_type = other RNA
aggaaataagagagaaaagaagagtaagaagaaatataagagccaccatggcccctaagaagaagcgtaaagtgagccgggtgaacggcagcggcagcggcggcggcatgaaccacgaccaggagttcgacccccctaaggtgtaccctcccgtccccgccgagaagagaaagcccatccgggtcctgagcctgttcgatggcatcgccaccggtctgctggtgctgaaggacctgggcatccaggtggataggtacattgcctccgaggtgtgcgaggactccatcaccgtgggaatggtgcgtcatcagggcaagatcatgtacgtgggcgacgtgcggagcgtgacacagaagcatatccaggagtggggccctttcgacctggtgatcggcggcagcccttgcaatgacctgagcatcgtgaacccagcccggaagggcctgtacgagggaaccggcagactgttcttcgagttttacagactgctgcacgacgcccggcctaaggaaggcgacgaccggcccttcttttggctgttcgagaatgtggtggccatgggagtcagcgacaagcgggatattagccggttcctggagagcaaccccgtgatgatcgatgccaaggaagtgagcgccgcccaccgggccagatacttctggggcaatctgcctggcatgaacagacccctggccagcaccgtgaacgacaagctggagctgcaggagtgcctggagcacggccggatcgccaagttcagcaaggtgagaaccatcaccacccgaagcaacagcatcaaacaaggcaaggaccagcactttcctgtgttcatgaacgagaaggaggacatcctgtggtgtaccgagatggagagagtgttcgggttcccagtccactacacagatgtcagcaacatgtctagactggccagacagagactgctgggaagaagctggtccgtccctgtgatcagacacctgttcgcccctctgaaggagtacttcgcctgcgtgagcagcggcaacagcaacgccaacagccggggccccagcttctctagcggcctggtgccactgtccctgagagggagccacatgggccccatggagatctacaaaaccgtgagcgcctggaagcggcagcctgtgcgcgtgctgagcctgtttcggaatatcgataaagtcctgaaaagcctgggattcctggagagcggctctggctccggcggtggcaccctgaagtacgtggaggatgtgacaaacgtggtcagacgggatgtggagaagtggggccccttcgatctggtgtacggcagcacccaacccctgggcagctcttgtgaccggtgccctggctggtacatgtttcagttccaccggatcctgcagtacgccctgccgagacaggagtcccagcggccattcttttggattttcatggacaacttgctgctgaccgaggatgaccaggaaactaccactcggttcctgcagaccgaagccgtgaccctgcaggacgtgagaggccgggactaccagaacgccatgcgggtgtggtccaacatccctggactgaaaagcaagcacgcacctctgacccctaaagaagaggagtacctgcaggcccaggtgcggagcagaagcaagctggacgcccctaaggtggatctgctggtgaagaattgcctcctgcccctgagagagtacttcaagtatttcagccagaatagtctgcccctgggcggcccaagcagcggcgcccctcctcccagcggcggcagcccagccggctccccaacctctaccgaggagggcacctctgagtccgccacccccgagagcggccctggcacctccaccgagcccagcgagggcagcgcacccggcagccctgccggcagccccacctccacagaggagggaaccagcaccgagcccagcgaaggcagcgccccaggcaccagcaccgagcctagtgagggcggctctggcggcggcagcgcccaggagattaaacggatcaacaagatcagaagaagacttgtgaaagacagcaacaccaagaaggccggcaagacaggccccatgaaaaccctgctggttagagtgatgacacccgatctgagagagcggctggaaaacctgagaaagaagcctgaaaatatcccccagcccatcagcaatacatctagagccaacctgaataagctgctgaccgattacaccgaaatgaagaaggcgatcctgcatgtgtactgggaagagttccagaaggaccctgtgggcctgatgagccgggtggcccagcctgccagcaagaagatcgatcagaacaagctgaaacctgagatggacgagaagggcaacctgaccaccgccggctttgcctgctctcagtgtggccagcccctgttcgtgtacaagctggagcaggtgtctgagaagggcaaggcttacaccaactacttcggacggtgcaatgtggccgagcacgaaaagctgatcctgctggcccagctgaagcccgagaaggatagcgacgaagccgtgacatatagcctgggaaagtttgggcagagggccctggatttctacagcattcatgtgaccaaggagtccacccaccccgtgaagcccctggcccagatcgccggaaacagatacgcctccggacctgtgggaaaggccctgagcgacgcatgtatgggcacaatcgcctccttcctgtctaagtaccaggacatcatcatcgaacaccagaaggtggtgaagggcaaccagaagagactggagagcctgcgggagctggccggcaaggaaaacctggaataccctagcgtgaccctgccacctcagcctcacaccaaggagggcgttgatgcctacaacgaagtgatcgcccgggtgcgaatgtgggtgaacctgaacctgtggcagaagctgaagctaagcagagatgatgccaagcctctgctgagactgaagggattcccttcctttcctctggtcgagagacaggccaacgaagtggactggtgggacatggtgtgtaacgtgaagaagctgatcaacgagaaaaaggaggatggcaaggtgttttggcagaatctggctggctacaagagacaggaagccctgagaccatacctgagcagcgaggaagatcggaagaagggaaagaaattcgctcggtaccagctgggcgacctgctgctgcacctggaaaagaagcacggcgaggactggggaaaggtgtacgacgaggcctgggagcggattgacaagaaagtggaaggcctgagcaagcacatcaagctggaagaggaacggagaagcgaggacgcccagagcaaggccgccctgaccgactggctgcgggctaaggccagcttcgtgatcgagggcctgaaggaggccgacaaggacgagttctgcagatgcgagctgaagctgcagaagtggtacggggacctgcggggaaagcccttcgccatcgaagccgagaacagcatcctggacatcagcggcttcagcaagcagtacaactgtgccttcatctggcagaaggacggcgtgaagaagctgaacctgtacctgatcatcaactacttcaagggcggcaagctgcggttcaagaagatcaaacctgaagccttcgaagccaacagattctacaccgtgatcaacaaaaagagcggcgagatcgtgcccatggaggtgaacttcaacttcgacgaccccaacctgatcatcctgcctctggcctttggcaagagacagggcagagaattcatctggaacgacctgctgtccctggaaaccggcagcctgaagctggccaacggaagagtgatcgagaagacactgtacaacagaagaacccggcaggatgagcctgccctgttcgtggccctgaccttcgagcggcgggaggtcctggactcctccaatatcaaaccaatgaacctgatcggcgtggcaagaggcgaaaacatccccgccgtgatcgccctgaccgaccccgagggctgcccactgagccggtttaaggatagcctgggaaacccaacccacatcctgagaatcggcgagagctataaggagaagcagcggaccatccaggccaagaaggaggtggagcagcggagagccggcggctacagccggaagtacgccagcaaagccaagaatctggcagacgatatggtgagaaacaccgctagagatctgctgtactacgccgtgacccaggatgccatgctgatcttcgccaacctgagccggggcttcggccggcagggcaagcggaccttcatggccgagagacagtacacacggatggaggactggctgaccgccaagctggcctacgagggcctgagcaagacctacctgtccaagacactggcccagtacacctccaagacatgcagcaactgtgggtttaccatcaccagcgccgactacgacagggtgctggagaagctgaagaagacagcaacaggctggatgaccacaattaacggcaaggagctgaaggtggagggccagattacctactacaacagatacaagagacagaacgtagtcaaggacctgtccgtcgagctggatagactgagcgaagaatctgtgaacaacgacatctcctcctggacaaagggcagaagcggagaagctctgagcctcctgaagaaaagattctcccatagacccgtgcaggagaagttcgtgtgcctgaactgcggcttcgagacacacgcagccgagcaagccgccctgaacatcgccagatcctggctgttcctgcggagccaggagtacaagaaataccagacaaacaagacaaccggcaacaccgataagagagccttcgtcgagacctggcagtccttttaccggaagaagcttaaggaggtgtggaaacctgccgtgcggtctggcggatctggcggaggctccacaagcgtggccttcgaggacgtggccgtgaacttcacccaggaggagtgggccctgctggaccccagccagaagaacctgtacagggaggtgatgcaggagaccctgaggaacctggccagcatcggcaagaagtggaacaaccagtacatcgaggacgagcaccagaaccccaggaggaacctgaggaggctgatcaaggagaggctgagcgagagcaaggagagccaccagcacggcgagttcctgacccaggtgcccgacgacaccagccccaagaaaaagagaaaagtctaagctgccttctgcggggcttgccttctggccatgcccttcttctctcccttgcacctgtacctcttggtctttgaataaagcctgagtaggaaggctagcaaaaaaaaaaaaaaaaaaaaaaaaaaaaaaaaaaaaaaaaaaaaaaaaaaaaaaaaaaaaaaaaaaaaaaaaaaaaaaaa

SEQ ID NO: 2823 - RNA, 5419 nt, synthetic construct
  source 1..5419: mol_type = other RNA
aggaaataagagagaaaagaagagtaagaagaaatataagagccaccatggcccctaagaagaagcgtaaagtgagccgggtgaacggcagcggcagcggcggcggcatgaaccacgaccaggagttcgacccccctaaggtgtaccctcccgtccccgccgagaagagaaagcccatccgggtcctgagcctgttcgatggcatcgccaccggtctgctggtgctgaaggacctgggcatccaggtggataggtacattgcctccgaggtgtgcgaggactccatcaccgtgggaatggtgcgtcatcagggcaagatcatgtacgtgggcgacgtgcggagcgtgacacagaagcatatccaggagtggggccctttcgacctggtgatcggcggcagcccttgcaatgacctgagcatcgtgaacccagcccggaagggcctgtacgagggaaccggcagactgttcttcgagttttacagactgctgcacgacgcccggcctaaggaaggcgacgaccggcccttcttttggctgttcgagaatgtggtggccatgggagtcagcgacaagcgggatattagccggttcctggagagcaaccccgtgatgatcgatgccaaggaagtgagcgccgcccaccgggccagatacttctggggcaatctgcctggcatgaacagacccctggccagcaccgtgaacgacaagctggagctgcaggagtgcctggagcacggccggatcgccaagttcagcaaggtgagaaccatcaccacccgaagcaacagcatcaaacaaggcaaggaccagcactttcctgtgttcatgaacgagaaggaggacatcctgtggtgtaccgagatggagagagtgttcgggttcccagtccactacacagatgtcagcaacatgtctagactggccagacagagactgctgggaagaagctggtccgtccctgtgatcagacacctgttcgcccctctgaaggagtacttcgcctgcgtgagcagcggcaacagcaacgccaacagccggggccccagcttctctagcggcctggtgccactgtccctgagagggagccacatgggccccatggagatctacaaaaccgtgagcgcctggaagcggcagcctgtgcgcgtgctgagcctgtttcggaatatcgataaagtcctgaaaagcctgggattcctggagagcggctctggctccggcggtggcaccctgaagtacgtggaggatgtgacaaacgtggtcagacgggatgtggagaagtggggccccttcgatctggtgtacggcagcacccaacccctgggcagctcttgtgaccggtgccctggctggtacatgtttcagttccaccggatcctgcagtacgccctgccgagacaggagtcccagcggccattcttttggattttcatggacaacttgctgctgaccgaggatgaccaggaaactaccactcggttcctgcagaccgaagccgtgaccctgcaggacgtgagaggccgggactaccagaacgccatgcgggtgtggtccaacatccctggactgaaaagcaagcacgcacctctgacccctaaagaagaggagtacctgcaggcccaggtgcggagcagaagcaagctggacgcccctaaggtggatctgctggtgaagaattgcctcctgcccctgagagagtacttcaagtatttcagccagaatagtctgcccctgggcggcccaagcagcggcgcccctcctcccagcggcggcagcccagccggctccccaacctctaccgaggagggcacctctgagtccgccacccccgagagcggccctggcacctccaccgagcccagcgagggcagcgcacccggcagccctgccggcagccccacctccacagaggagggaaccagcaccgagcccagcgaaggcagcgccccaggcaccagcaccgagcctagtgagggcggctctggcggcggcagcgcccaggagattaaacggatcaacaagatcagaagaagacttgtgaaagacagcaacaccaagaaggccggcaagacaggccccatgaaaaccctgctggttagagtgatgacacccgatctgagagagcggctggaaaacctgagaaagaagcctgaaaatatcccccagcccatcagcaatacatctagagccaacctgaataagctgctgaccgattacaccgaaatgaagaaggcgatcctgcatgtgtactgggaagagttccagaaggaccctgtgggcctgatgagccgggtggcccagcctgccagcaagaagatcgatcagaacaagctgaaacctgagatggacgagaagggcaacctgaccaccgccggctttgcctgctctcagtgtggccagcccctgttcgtgtacaagctggagcaggtgtctgagaagggcaaggcttacaccaactacttcggacggtgcaatgtggccgagcacgaaaagctgatcctgctggcccagctgaagcccgagaaggatagcgacgaagccgtgacatatagcctgggaaagtttgggcagagggccctggatttctacagcattcatgtgaccaaggagtccacccaccccgtgaagcccctggcccagatcgccggaaacagatacgcctccggacctgtgggaaaggccctgagcgacgcatgtatgggcacaatcgcctccttcctgtctaagtaccaggacatcatcatcgaacaccagaaggtggtgaagggcaaccagaagagactggagagcctgcgggagctggccggcaaggaaaacctggaataccctagcgtgaccctgccacctcagcctcacaccaaggagggcgttgatgcctacaacgaagtgatcgcccgggtgcgaatgtgggtgaacctgaacctgtggcagaagctgaagctaagcagagatgatgccaagcctctgctgagactgaagggattcccttcctttcctctggtcgagagacaggccaacgaagtggactggtgggacatggtgtgtaacgtgaagaagctgatcaacgagaaaaaggaggatggcaaggtgttttggcagaatctggctggctacaagagacaggaagccctgagaccatacctgagcagcgaggaagatcggaagaagggaaagaaattcgctcggtaccagctgggcgacctgctgctgcacctggaaaagaagcacggcgaggactggggaaaggtgtacgacgaggcctgggagcggattgacaagaaagtggaaggcctgagcaagcacatcaagctggaagaggaacggagaagcgaggacgcccagagcaaggccgccctgaccgactggctgcgggctaaggccagcttcgtgatcgagggcctgaaggaggccgacaaggacgagttctgcagatgcgagctgaagctgcagaagtggtacggggacctgcggggaaagcccttcgccatcgaagccgagaacagcatcctggacatcagcggcttcagcaagcagtacaactgtgccttcatctggcagaaggacggcgtgaagaagctgaacctgtacctgatcatcaactacttcaagggcggcaagctgcggttcaagaagatcaaacctgaagccttcgaagccaacagattctacaccgtgatcaacaaaaagagcggcgagatcgtgcccatggaggtgaacttcaacttcgacgaccccaacctgatcatcctgcctctggcctttggcaagagacagggcagagaattcatctggaacgacctgctgtccctggaaaccggcagcctgaagctggccaacggaagagtgatcgagaagacactgtacaacagaagaacccggcaggatgagcctgccctgttcgtggccctgaccttcgagcggcgggaggtcctggactcctccaatatcaaaccaatgaacctgatcggcgtggcaagaggcgaaaacatccccgccgtgatcgccctgaccgaccccgagggctgcccactgagccggtttaaggatagcctgggaaacccaacccacatcctgagaatcggcgagagctataaggagaagcagcggaccatccaggccaagaaggaggtggagcagcggagagccggcggctacagccggaagtacgccagcaaagccaagaatctggcagacgatatggtgagaaacaccgctagagatctgctgtactacgccgtgacccaggatgccatgctgatcttcgccaacctgagccggggcttcggccggcagggcaagcggaccttcatggccgagagacagtacacacggatggaggactggctgaccgccaagctggcctacgagggcctgagcaagacctacctgtccaagacactggcccagtacacctccaagacatgcagcaactgtgggtttaccatcaccagcgccgactacgacagggtgctggagaagctgaagaagacagcaacaggctggatgaccacaattaacggcaaggagctgaaggtggagggccagattacctactacaacagatacaagagacagaacgtagtcaaggacctgtccgtcgagctggatagactgagcgaagaatctgtgaacaacgacatctcctcctggacaaagggcagaagcggagaagctctgagcctcctgaagaaaagattctcccatagacccgtgcaggagaagttcgtgtgcctgaactgcggcttcgagacacacgcagccgagcaagccgccctgaacatcgccagatcctggctgttcctgcggagccaggagtacaagaaataccagacaaacaagacaaccggcaacaccgataagagagccttcgtcgagacctggcagtccttttaccggaagaagcttaaggaggtgtggaaacctgccgtgcggtctggcggatctggcggaggctccacaagcctgctgaccttcgaggacgtggccgtgagcttcagcgaggaggagtgggagctgctggaccccccccagaagaccctgtacaacgacgtgatgcaggagaactacgagaccgtgatcagcctgggcctgaagctgaagaacgacaccggcaacgaccagcccatcagcatcagcgccctggagatgcaggccagcggcagcaaggtgctgaggaaggccaggatgaaggtggcccagaagaccaccagccccaagaaaaagagaaaagtctaagctgccttctgcggggcttgccttctggccatgcccttcttctctcccttgcacctgtacctcttggtctttgaataaagcctgagtaggaaggctagcaaaaaaaaaaaaaaaaaaaaaaaaaaaaaaaaaaaaaaaaaaaaaaaaaaaaaaaaaaaaaaaaaaaaaaaaaaaaaaaa

SEQ ID NO: 2824 - RNA, 5419 nt, synthetic construct
  source 1..5419: mol_type = other RNA
aggaaataagagagaaaagaagagtaagaagaaatataagagccaccatggcccctaagaagaagcgtaaagtgagccgggtgaacggcagcggcagcggcggcggcatgaaccacgaccaggagttcgacccccctaaggtgtaccctcccgtccccgccgagaagagaaagcccatccgggtcctgagcctgttcgatggcatcgccaccggtctgctggtgctgaaggacctgggcatccaggtggataggtacattgcctccgaggtgtgcgaggactccatcaccgtgggaatggtgcgtcatcagggcaagatcatgtacgtgggcgacgtgcggagcgtgacacagaagcatatccaggagtggggccctttcgacctggtgatcggcggcagcccttgcaatgacctgagcatcgtgaacccagcccggaagggcctgtacgagggaaccggcagactgttcttcgagttttacagactgctgcacgacgcccggcctaaggaaggcgacgaccggcccttcttttggctgttcgagaatgtggtggccatgggagtcagcgacaagcgggatattagccggttcctggagagcaaccccgtgatgatcgatgccaaggaagtgagcgccgcccaccgggccagatacttctggggcaatctgcctggcatgaacagacccctggccagcaccgtgaacgacaagctggagctgcaggagtgcctggagcacggccggatcgccaagttcagcaaggtgagaaccatcaccacccgaagcaacagcatcaaacaaggcaaggaccagcactttcctgtgttcatgaacgagaaggaggacatcctgtggtgtaccgagatggagagagtgttcgggttcccagtccactacacagatgtcagcaacatgtctagactggccagacagagactgctgggaagaagctggtccgtccctgtgatcagacacctgttcgcccctctgaaggagtacttcgcctgcgtgagcagcggcaacagcaacgccaacagccggggccccagcttctctagcggcctggtgccactgtccctgagagggagccacatgggccccatggagatctacaaaaccgtgagcgcctggaagcggcagcctgtgcgcgtgctgagcctgtttcggaatatcgataaagtcctgaaaagcctgggattcctggagagcggctctggctccggcggtggcaccctgaagtacgtggaggatgtgacaaacgtggtcagacgggatgtggagaagtggggccccttcgatctggtgtacggcagcacccaacccctgggcagctcttgtgaccggtgccctggctggtacatgtttcagttccaccggatcctgcagtacgccctgccgagacaggagtcccagcggccattcttttggattttcatggacaacttgctgctgaccgaggatgaccaggaaactaccactcggttcctgcagaccgaagccgtgaccctgcaggacgtgagaggccgggactaccagaacgccatgcgggtgtggtccaacatccctggactgaaaagcaagcacgcacctctgacccctaaagaagaggagtacctgcaggcccaggtgcggagcagaagcaagctggacgcccctaaggtggatctgctggtgaagaattgcctcctgcccctgagagagtacttcaagtatttcagccagaatagtctgcccctgggcggcccaagcagcggcgcccctcctcccagcggcggcagcccagccggctccccaacctctaccgaggagggcacctctgagtccgccacccccgagagcggccctggcacctccaccgagcccagcgagggcagcgcacccggcagccctgccggcagccccacctccacagaggagggaaccagcaccgagcccagcgaaggcagcgccccaggcaccagcaccgagcctagtgagggcggctctggcggcggcagcgcccaggagattaaacggatcaacaagatcagaagaagacttgtgaaagacagcaacaccaagaaggccggcaagacaggccccatgaaaaccctgctggttagagtgatgacacccgatctgagagagcggctggaaaacctgagaaagaagcctgaaaatatcccccagcccatcagcaatacatctagagccaacctgaataagctgctgaccgattacaccgaaatgaagaaggcgatcctgcatgtgtactgggaagagttccagaaggaccctgtgggcctgatgagccgggtggcccagcctgccagcaagaagatcgatcagaacaagctgaaacctgagatggacgagaagggcaacctgaccaccgccggctttgcctgctctcagtgtggccagcccctgttcgtgtacaagctggagcaggtgtctgagaagggcaaggcttacaccaactacttcggacggtgcaatgtggccgagcacgaaaagctgatcctgctggcccagctgaagcccgagaaggatagcgacgaagccgtgacatatagcctgggaaagtttgggcagagggccctggatttctacagcattcatgtgaccaaggagtccacccaccccgtgaagcccctggcccagatcgccggaaacagatacgcctccggacctgtgggaaaggccctgagcgacgcatgtatgggcacaatcgcctccttcctgtctaagtaccaggacatcatcatcgaacaccagaaggtggtgaagggcaaccagaagagactggagagcctgcgggagctggccggcaaggaaaacctggaataccctagcgtgaccctgccacctcagcctcacaccaaggagggcgttgatgcctacaacgaagtgatcgcccgggtgcgaatgtgggtgaacctgaacctgtggcagaagctgaagctaagcagagatgatgccaagcctctgctgagactgaagggattcccttcctttcctctggtcgagagacaggccaacgaagtggactggtgggacatggtgtgtaacgtgaagaagctgatcaacgagaaaaaggaggatggcaaggtgttttggcagaatctggctggctacaagagacaggaagccctgagaccatacctgagcagcgaggaagatcggaagaagggaaagaaattcgctcggtaccagctgggcgacctgctgctgcacctggaaaagaagcacggcgaggactggggaaaggtgtacgacgaggcctgggagcggattgacaagaaagtggaaggcctgagcaagcacatcaagctggaagaggaacggagaagcgaggacgcccagagcaaggccgccctgaccgactggctgcgggctaaggccagcttcgtgatcgagggcctgaaggaggccgacaaggacgagttctgcagatgcgagctgaagctgcagaagtggtacggggacctgcggggaaagcccttcgccatcgaagccgagaacagcatcctggacatcagcggcttcagcaagcagtacaactgtgccttcatctggcagaaggacggcgtgaagaagctgaacctgtacctgatcatcaactacttcaagggcggcaagctgcggttcaagaagatcaaacctgaagccttcgaagccaacagattctacaccgtgatcaacaaaaagagcggcgagatcgtgcccatggaggtgaacttcaacttcgacgaccccaacctgatcatcctgcctctggcctttggcaagagacagggcagagaattcatctggaacgacctgctgtccctggaaaccggcagcctgaagctggccaacggaagagtgatcgagaagacactgtacaacagaagaacccggcaggatgagcctgccctgttcgtggccctgaccttcgagcggcgggaggtcctggactcctccaatatcaaaccaatgaacctgatcggcgtggcaagaggcgaaaacatccccgccgtgatcgccctgaccgaccccgagggctgcccactgagccggtttaaggatagcctgggaaacccaacccacatcctgagaatcggcgagagctataaggagaagcagcggaccatccaggccaagaaggaggtggagcagcggagagccggcggctacagccggaagtacgccagcaaagccaagaatctggcagacgatatggtgagaaacaccgctagagatctgctgtactacgccgtgacccaggatgccatgctgatcttcgccaacctgagccggggcttcggccggcagggcaagcggaccttcatggccgagagacagtacacacggatggaggactggctgaccgccaagctggcctacgagggcctgagcaagacctacctgtccaagacactggcccagtacacctccaagacatgcagcaactgtgggtttaccatcaccagcgccgactacgacagggtgctggagaagctgaagaagacagcaacaggctggatgaccacaattaacggcaaggagctgaaggtggagggccagattacctactacaacagatacaagagacagaacgtagtcaaggacctgtccgtcgagctggatagactgagcgaagaatctgtgaacaacgacatctcctcctggacaaagggcagaagcggagaagctctgagcctcctgaagaaaagattctcccatagacccgtgcaggagaagttcgtgtgcctgaactgcggcttcgagacacacgcagccgagcaagccgccctgaacatcgccagatcctggctgttcctgcggagccaggagtacaagaaataccagacaaacaagacaaccggcaacaccgataagagagccttcgtcgagacctggcagtccttttaccggaagaagcttaaggaggtgtggaaacctgccgtgcggtctggcggatctggcggaggctccacaagcgagcccgtgagcttcgaggaggtggccgtgtacttcagcagggaggagtgggccctgctggaccccgcccagagggccctgtacaggcacgtgatgctggagacctacgagtgcgtggccagcctggcccccctgcccgcccccaagcccatggtgatcagcctgctggaggagggcgaggagccctggatccccgacgagggcagcaggcaggccgtggccggcgacgtgagccccggcgagaccagccccaagaaaaagagaaaagtctaagctgccttctgcggggcttgccttctggccatgcccttcttctctcccttgcacctgtacctcttggtctttgaataaagcctgagtaggaaggctagcaaaaaaaaaaaaaaaaaaaaaaaaaaaaaaaaaaaaaaaaaaaaaaaaaaaaaaaaaaaaaaaaaaaaaaaaaaaaaaaa

SEQ ID NO: 2825 - RNA, 5419 nt, synthetic construct
  source 1..5419: mol_type = other RNA
aggaaataagagagaaaagaagagtaagaagaaatataagagccaccatggcccctaagaagaagcgtaaagtgagccgggtgaacggcagcggcagcggcggcggcatgaaccacgaccaggagttcgacccccctaaggtgtaccctcccgtccccgccgagaagagaaagcccatccgggtcctgagcctgttcgatggcatcgccaccggtctgctggtgctgaaggacctgggcatccaggtggataggtacattgcctccgaggtgtgcgaggactccatcaccgtgggaatggtgcgtcatcagggcaagatcatgtacgtgggcgacgtgcggagcgtgacacagaagcatatccaggagtggggccctttcgacctggtgatcggcggcagcccttgcaatgacctgagcatcgtgaacccagcccggaagggcctgtacgagggaaccggcagactgttcttcgagttttacagactgctgcacgacgcccggcctaaggaaggcgacgaccggcccttcttttggctgttcgagaatgtggtggccatgggagtcagcgacaagcgggatattagccggttcctggagagcaaccccgtgatgatcgatgccaaggaagtgagcgccgcccaccgggccagatacttctggggcaatctgcctggcatgaacagacccctggccagcaccgtgaacgacaagctggagctgcaggagtgcctggagcacggccggatcgccaagttcagcaaggtgagaaccatcaccacccgaagcaacagcatcaaacaaggcaaggaccagcactttcctgtgttcatgaacgagaaggaggacatcctgtggtgtaccgagatggagagagtgttcgggttcccagtccactacacagatgtcagcaacatgtctagactggccagacagagactgctgggaagaagctggtccgtccctgtgatcagacacctgttcgcccctctgaaggagtacttcgcctgcgtgagcagcggcaacagcaacgccaacagccggggccccagcttctctagcggcctggtgccactgtccctgagagggagccacatgggccccatggagatctacaaaaccgtgagcgcctggaagcggcagcctgtgcgcgtgctgagcctgtttcggaatatcgataaagtcctgaaaagcctgggattcctggagagcggctctggctccggcggtggcaccctgaagtacgtggaggatgtgacaaacgtggtcagacgggatgtggagaagtggggccccttcgatctggtgtacggcagcacccaacccctgggcagctcttgtgaccggtgccctggctggtacatgtttcagttccaccggatcctgcagtacgccctgccgagacaggagtcccagcggccattcttttggattttcatggacaacttgctgctgaccgaggatgaccaggaaactaccactcggttcctgcagaccgaagccgtgaccctgcaggacgtgagaggccgggactaccagaacgccatgcgggtgtggtccaacatccctggactgaaaagcaagcacgcacctctgacccctaaagaagaggagtacctgcaggcccaggtgcggagcagaagcaagctggacgcccctaaggtggatctgctggtgaagaattgcctcctgcccctgagagagtacttcaagtatttcagccagaatagtctgcccctgggcggcccaagcagcggcgcccctcctcccagcggcggcagcccagccggctccccaacctctaccgaggagggcacctctgagtccgccacccccgagagcggccctggcacctccaccgagcccagcgagggcagcgcacccggcagccctgccggcagccccacctccacagaggagggaaccagcaccgagcccagcgaaggcagcgccccaggcaccagcaccgagcctagtgagggcggctctggcggcggcagcgcccaggagattaaacggatcaacaagatcagaagaagacttgtgaaagacagcaacaccaagaaggccggcaagacaggccccatgaaaaccctgctggttagagtgatgacacccgatctgagagagcggctggaaaacctgagaaagaagcctgaaaatatcccccagcccatcagcaatacatctagagccaacctgaataagctgctgaccgattacaccgaaatgaagaaggcgatcctgcatgtgtactgggaagagttccagaaggaccctgtgggcctgatgagccgggtggcccagcctgccagcaagaagatcgatcagaacaagctgaaacctgagatggacgagaagggcaacctgaccaccgccggctttgcctgctctcagtgtggccagcccctgttcgtgtacaagctggagcaggtgtctgagaagggcaaggcttacaccaactacttcggacggtgcaatgtggccgagcacgaaaagctgatcctgctggcccagctgaagcccgagaaggatagcgacgaagccgtgacatatagcctgggaaagtttgggcagagggccctggatttctacagcattcatgtgaccaaggagtccacccaccccgtgaagcccctggcccagatcgccggaaacagatacgcctccggacctgtgggaaaggccctgagcgacgcatgtatgggcacaatcgcctccttcctgtctaagtaccaggacatcatcatcgaacaccagaaggtggtgaagggcaaccagaagagactggagagcctgcgggagctggccggcaaggaaaacctggaataccctagcgtgaccctgccacctcagcctcacaccaaggagggcgttgatgcctacaacgaagtgatcgcccgggtgcgaatgtgggtgaacctgaacctgtggcagaagctgaagctaagcagagatgatgccaagcctctgctgagactgaagggattcccttcctttcctctggtcgagagacaggccaacgaagtggactggtgggacatggtgtgtaacgtgaagaagctgatcaacgagaaaaaggaggatggcaaggtgttttggcagaatctggctggctacaagagacaggaagccctgagaccatacctgagcagcgaggaagatcggaagaagggaaagaaattcgctcggtaccagctgggcgacctgctgctgcacctggaaaagaagcacggcgaggactggggaaaggtgtacgacgaggcctgggagcggattgacaagaaagtggaaggcctgagcaagcacatcaagctggaagaggaacggagaagcgaggacgcccagagcaaggccgccctgaccgactggctgcgggctaaggccagcttcgtgatcgagggcctgaaggaggccgacaaggacgagttctgcagatgcgagctgaagctgcagaagtggtacggggacctgcggggaaagcccttcgccatcgaagccgagaacagcatcctggacatcagcggcttcagcaagcagtacaactgtgccttcatctggcagaaggacggcgtgaagaagctgaacctgtacctgatcatcaactacttcaagggcggcaagctgcggttcaagaagatcaaacctgaagccttcgaagccaacagattctacaccgtgatcaacaaaaagagcggcgagatcgtgcccatggaggtgaacttcaacttcgacgaccccaacctgatcatcctgcctctggcctttggcaagagacagggcagagaattcatctggaacgacctgctgtccctggaaaccggcagcctgaagctggccaacggaagagtgatcgagaagacactgtacaacagaagaacccggcaggatgagcctgccctgttcgtggccctgaccttcgagcggcgggaggtcctggactcctccaatatcaaaccaatgaacctgatcggcgtggcaagaggcgaaaacatccccgccgtgatcgccctgaccgaccccgagggctgcccactgagccggtttaaggatagcctgggaaacccaacccacatcctgagaatcggcgagagctataaggagaagcagcggaccatccaggccaagaaggaggtggagcagcggagagccggcggctacagccggaagtacgccagcaaagccaagaatctggcagacgatatggtgagaaacaccgctagagatctgctgtactacgccgtgacccaggatgccatgctgatcttcgccaacctgagccggggcttcggccggcagggcaagcggaccttcatggccgagagacagtacacacggatggaggactggctgaccgccaagctggcctacgagggcctgagcaagacctacctgtccaagacactggcccagtacacctccaagacatgcagcaactgtgggtttaccatcaccagcgccgactacgacagggtgctggagaagctgaagaagacagcaacaggctggatgaccacaattaacggcaaggagctgaaggtggagggccagattacctactacaacagatacaagagacagaacgtagtcaaggacctgtccgtcgagctggatagactgagcgaagaatctgtgaacaacgacatctcctcctggacaaagggcagaagcggagaagctctgagcctcctgaagaaaagattctcccatagacccgtgcaggagaagttcgtgtgcctgaactgcggcttcgagacacacgcagccgagcaagccgccctgaacatcgccagatcctggctgttcctgcggagccaggagtacaagaaataccagacaaacaagacaaccggcaacaccgataagagagccttcgtcgagacctggcagtccttttaccggaagaagcttaaggaggtgtggaaacctgccgtgcggtctggcggatctggcggaggctccacaagccaggccgaggtgaccttcgaggacgtggccgtgctgttcagcagggaggagtggggcaggctgggccccgcccagaggggcctgtacagggacgtgatgctggagacctacaggaacctggtgagcctgggcgccggccccgccggccccaagcccggcgtgatcacccagctggagaggggcgacgagccctgggtgctggacgcccagggcaccgagggcaaggagaggctgagggtgagcaccagccccaagaaaaagagaaaagtctaagctgccttctgcggggcttgccttctggccatgcccttcttctctcccttgcacctgtacctcttggtctttgaataaagcctgagtaggaaggctagcaaaaaaaaaaaaaaaaaaaaaaaaaaaaaaaaaaaaaaaaaaaaaaaaaaaaaaaaaaaaaaaaaaaaaaaaaaaaaaaa

SEQ ID NO: 2826 - RNA, 5419 nt, synthetic construct
  source 1..5419: mol_type = other RNA
aggaaataagagagaaaagaagagtaagaagaaatataagagccaccatggcccctaagaagaagcgtaaagtgagccgggtgaacggcagcggcagcggcggcggcatgaaccacgaccaggagttcgacccccctaaggtgtaccctcccgtccccgccgagaagagaaagcccatccgggtcctgagcctgttcgatggcatcgccaccggtctgctggtgctgaaggacctgggcatccaggtggataggtacattgcctccgaggtgtgcgaggactccatcaccgtgggaatggtgcgtcatcagggcaagatcatgtacgtgggcgacgtgcggagcgtgacacagaagcatatccaggagtggggccctttcgacctggtgatcggcggcagcccttgcaatgacctgagcatcgtgaacccagcccggaagggcctgtacgagggaaccggcagactgttcttcgagttttacagactgctgcacgacgcccggcctaaggaaggcgacgaccggcccttcttttggctgttcgagaatgtggtggccatgggagtcagcgacaagcgggatattagccggttcctggagagcaaccccgtgatgatcgatgccaaggaagtgagcgccgcccaccgggccagatacttctggggcaatctgcctggcatgaacagacccctggccagcaccgtgaacgacaagctggagctgcaggagtgcctggagcacggccggatcgccaagttcagcaaggtgagaaccatcaccacccgaagcaacagcatcaaacaaggcaaggaccagcactttcctgtgttcatgaacgagaaggaggacatcctgtggtgtaccgagatggagagagtgttcgggttcccagtccactacacagatgtcagcaacatgtctagactggccagacagagactgctgggaagaagctggtccgtccctgtgatcagacacctgttcgcccctctgaaggagtacttcgcctgcgtgagcagcggcaacagcaacgccaacagccggggccccagcttctctagcggcctggtgccactgtccctgagagggagccacatgggccccatggagatctacaaaaccgtgagcgcctggaagcggcagcctgtgcgcgtgctgagcctgtttcggaatatcgataaagtcctgaaaagcctgggattcctggagagcggctctggctccggcggtggcaccctgaagtacgtggaggatgtgacaaacgtggtcagacgggatgtggagaagtggggccccttcgatctggtgtacggcagcacccaacccctgggcagctcttgtgaccggtgccctggctggtacatgtttcagttccaccggatcctgcagtacgccctgccgagacaggagtcccagcggccattcttttggattttcatggacaacttgctgctgaccgaggatgaccaggaaactaccactcggttcctgcagaccgaagccgtgaccctgcaggacgtgagaggccgggactaccagaacgccatgcgggtgtggtccaacatccctggactgaaaagcaagcacgcacctctgacccctaaagaagaggagtacctgcaggcccaggtgcggagcagaagcaagctggacgcccctaaggtggatctgctggtgaagaattgcctcctgcccctgagagagtacttcaagtatttcagccagaatagtctgcccctgggcggcccaagcagcggcgcccctcctcccagcggcggcagcccagccggctccccaacctctaccgaggagggcacctctgagtccgccacccccgagagcggccctggcacctccaccgagcccagcgagggcagcgcacccggcagccctgccggcagccccacctccacagaggagggaaccagcaccgagcccagcgaaggcagcgccccaggcaccagcaccgagcctagtgagggcggctctggcggcggcagcgcccaggagattaaacggatcaacaagatcagaagaagacttgtgaaagacagcaacaccaagaaggccggcaagacaggccccatgaaaaccctgctggttagagtgatgacacccgatctgagagagcggctggaaaacctgagaaagaagcctgaaaatatcccccagcccatcagcaatacatctagagccaacctgaataagctgctgaccgattacaccgaaatgaagaaggcgatcctgcatgtgtactgggaagagttccagaaggaccctgtgggcctgatgagccgggtggcccagcctgccagcaagaagatcgatcagaacaagctgaaacctgagatggacgagaagggcaacctgaccaccgccggctttgcctgctctcagtgtggccagcccctgttcgtgtacaagctggagcaggtgtctgagaagggcaaggcttacaccaactacttcggacggtgcaatgtggccgagcacgaaaagctgatcctgctggcccagctgaagcccgagaaggatagcgacgaagccgtgacatatagcctgggaaagtttgggcagagggccctggatttctacagcattcatgtgaccaaggagtccacccaccccgtgaagcccctggcccagatcgccggaaacagatacgcctccggacctgtgggaaaggccctgagcgacgcatgtatgggcacaatcgcctccttcctgtctaagtaccaggacatcatcatcgaacaccagaaggtggtgaagggcaaccagaagagactggagagcctgcgggagctggccggcaaggaaaacctggaataccctagcgtgaccctgccacctcagcctcacaccaaggagggcgttgatgcctacaacgaagtgatcgcccgggtgcgaatgtgggtgaacctgaacctgtggcagaagctgaagctaagcagagatgatgccaagcctctgctgagactgaagggattcccttcctttcctctggtcgagagacaggccaacgaagtggactggtgggacatggtgtgtaacgtgaagaagctgatcaacgagaaaaaggaggatggcaaggtgttttggcagaatctggctggctacaagagacaggaagccctgagaccatacctgagcagcgaggaagatcggaagaagggaaagaaattcgctcggtaccagctgggcgacctgctgctgcacctggaaaagaagcacggcgaggactggggaaaggtgtacgacgaggcctgggagcggattgacaagaaagtggaaggcctgagcaagcacatcaagctggaagaggaacggagaagcgaggacgcccagagcaaggccgccctgaccgactggctgcgggctaaggccagcttcgtgatcgagggcctgaaggaggccgacaaggacgagttctgcagatgcgagctgaagctgcagaagtggtacggggacctgcggggaaagcccttcgccatcgaagccgagaacagcatcctggacatcagcggcttcagcaagcagtacaactgtgccttcatctggcagaaggacggcgtgaagaagctgaacctgtacctgatcatcaactacttcaagggcggcaagctgcggttcaagaagatcaaacctgaagccttcgaagccaacagattctacaccgtgatcaacaaaaagagcggcgagatcgtgcccatggaggtgaacttcaacttcgacgaccccaacctgatcatcctgcctctggcctttggcaagagacagggcagagaattcatctggaacgacctgctgtccctggaaaccggcagcctgaagctggccaacggaagagtgatcgagaagacactgtacaacagaagaacccggcaggatgagcctgccctgttcgtggccctgaccttcgagcggcgggaggtcctggactcctccaatatcaaaccaatgaacctgatcggcgtggcaagaggcgaaaacatccccgccgtgatcgccctgaccgaccccgagggctgcccactgagccggtttaaggatagcctgggaaacccaacccacatcctgagaatcggcgagagctataaggagaagcagcggaccatccaggccaagaaggaggtggagcagcggagagccggcggctacagccggaagtacgccagcaaagccaagaatctggcagacgatatggtgagaaacaccgctagagatctgctgtactacgccgtgacccaggatgccatgctgatcttcgccaacctgagccggggcttcggccggcagggcaagcggaccttcatggccgagagacagtacacacggatggaggactggctgaccgccaagctggcctacgagggcctgagcaagacctacctgtccaagacactggcccagtacacctccaagacatgcagcaactgtgggtttaccatcaccagcgccgactacgacagggtgctggagaagctgaagaagacagcaacaggctggatgaccacaattaacggcaaggagctgaaggtggagggccagattacctactacaacagatacaagagacagaacgtagtcaaggacctgtccgtcgagctggatagactgagcgaagaatctgtgaacaacgacatctcctcctggacaaagggcagaagcggagaagctctgagcctcctgaagaaaagattctcccatagacccgtgcaggagaagttcgtgtgcctgaactgcggcttcgagacacacgcagccgagcaagccgccctgaacatcgccagatcctggctgttcctgcggagccaggagtacaagaaataccagacaaacaagacaaccggcaacaccgataagagagccttcgtcgagacctggcagtccttttaccggaagaagcttaaggaggtgtggaaacctgccgtgcggtctggcggatctggcggaggctccacaagccagccccagggcaccgtgaccttcaaggacgtggaggtgaccttcagccaggacgagtggggcctgctggacgccagccagaggaacctgtacagggacgtgatgctggagaactacggcaacatggccagcgtggtgggccccttcaccaagcccgccctgatcagctggctggaggccagggagccctggggcctgaacgtgcagggcgtgcagctgaagggcaaccccggcgccgcccccaccagccccaagaaaaagagaaaagtctaagctgccttctgcggggcttgccttctggccatgcccttcttctctcccttgcacctgtacctcttggtctttgaataaagcctgagtaggaaggctagcaaaaaaaaaaaaaaaaaaaaaaaaaaaaaaaaaaaaaaaaaaaaaaaaaaaaaaaaaaaaaaaaaaaaaaaaaaaaaaaa

SEQ ID NO: 2827 - RNA, 5419 nt, synthetic construct
  source 1..5419: mol_type = other RNA
aggaaataagagagaaaagaagagtaagaagaaatataagagccaccatggcccctaagaagaagcgtaaagtgagccgggtgaacggcagcggcagcggcggcggcatgaaccacgaccaggagttcgacccccctaaggtgtaccctcccgtccccgccgagaagagaaagcccatccgggtcctgagcctgttcgatggcatcgccaccggtctgctggtgctgaaggacctgggcatccaggtggataggtacattgcctccgaggtgtgcgaggactccatcaccgtgggaatggtgcgtcatcagggcaagatcatgtacgtgggcgacgtgcggagcgtgacacagaagcatatccaggagtggggccctttcgacctggtgatcggcggcagcccttgcaatgacctgagcatcgtgaacccagcccggaagggcctgtacgagggaaccggcagactgttcttcgagttttacagactgctgcacgacgcccggcctaaggaaggcgacgaccggcccttcttttggctgttcgagaatgtggtggccatgggagtcagcgacaagcgggatattagccggttcctggagagcaaccccgtgatgatcgatgccaaggaagtgagcgccgcccaccgggccagatacttctggggcaatctgcctggcatgaacagacccctggccagcaccgtgaacgacaagctggagctgcaggagtgcctggagcacggccggatcgccaagttcagcaaggtgagaaccatcaccacccgaagcaacagcatcaaacaaggcaaggaccagcactttcctgtgttcatgaacgagaaggaggacatcctgtggtgtaccgagatggagagagtgttcgggttcccagtccactacacagatgtcagcaacatgtctagactggccagacagagactgctgggaagaagctggtccgtccctgtgatcagacacctgttcgcccctctgaaggagtacttcgcctgcgtgagcagcggcaacagcaacgccaacagccggggccccagcttctctagcggcctggtgccactgtccctgagagggagccacatgggccccatggagatctacaaaaccgtgagcgcctggaagcggcagcctgtgcgcgtgctgagcctgtttcggaatatcgataaagtcctgaaaagcctgggattcctggagagcggctctggctccggcggtggcaccctgaagtacgtggaggatgtgacaaacgtggtcagacgggatgtggagaagtggggccccttcgatctggtgtacggcagcacccaacccctgggcagctcttgtgaccggtgccctggctggtacatgtttcagttccaccggatcctgcagtacgccctgccgagacaggagtcccagcggccattcttttggattttcatggacaacttgctgctgaccgaggatgaccaggaaactaccactcggttcctgcagaccgaagccgtgaccctgcaggacgtgagaggccgggactaccagaacgccatgcgggtgtggtccaacatccctggactgaaaagcaagcacgcacctctgacccctaaagaagaggagtacctgcaggcccaggtgcggagcagaagcaagctggacgcccctaaggtggatctgctggtgaagaattgcctcctgcccctgagagagtacttcaagtatttcagccagaatagtctgcccctgggcggcccaagcagcggcgcccctcctcccagcggcggcagcccagccggctccccaacctctaccgaggagggcacctctgagtccgccacccccgagagcggccctggcacctccaccgagcccagcgagggcagcgcacccggcagccctgccggcagccccacctccacagaggagggaaccagcaccgagcccagcgaaggcagcgccccaggcaccagcaccgagcctagtgagggcggctctggcggcggcagcgcccaggagattaaacggatcaacaagatcagaagaagacttgtgaaagacagcaacaccaagaaggccggcaagacaggccccatgaaaaccctgctggttagagtgatgacacccgatctgagagagcggctggaaaacctgagaaagaagcctgaaaatatcccccagcccatcagcaatacatctagagccaacctgaataagctgctgaccgattacaccgaaatgaagaaggcgatcctgcatgtgtactgggaagagttccagaaggaccctgtgggcctgatgagccgggtggcccagcctgccagcaagaagatcgatcagaacaagctgaaacctgagatggacgagaagggcaacctgaccaccgccggctttgcctgctctcagtgtggccagcccctgttcgtgtacaagctggagcaggtgtctgagaagggcaaggcttacaccaactacttcggacggtgcaatgtggccgagcacgaaaagctgatcctgctggcccagctgaagcccgagaaggatagcgacgaagccgtgacatatagcctgggaaagtttgggcagagggccctggatttctacagcattcatgtgaccaaggagtccacccaccccgtgaagcccctggcccagatcgccggaaacagatacgcctccggacctgtgggaaaggccctgagcgacgcatgtatgggcacaatcgcctccttcctgtctaagtaccaggacatcatcatcgaacaccagaaggtggtgaagggcaaccagaagagactggagagcctgcgggagctggccggcaaggaaaacctggaataccctagcgtgaccctgccacctcagcctcacaccaaggagggcgttgatgcctacaacgaagtgatcgcccgggtgcgaatgtgggtgaacctgaacctgtggcagaagctgaagctaagcagagatgatgccaagcctctgctgagactgaagggattcccttcctttcctctggtcgagagacaggccaacgaagtggactggtgggacatggtgtgtaacgtgaagaagctgatcaacgagaaaaaggaggatggcaaggtgttttggcagaatctggctggctacaagagacaggaagccctgagaccatacctgagcagcgaggaagatcggaagaagggaaagaaattcgctcggtaccagctgggcgacctgctgctgcacctggaaaagaagcacggcgaggactggggaaaggtgtacgacgaggcctgggagcggattgacaagaaagtggaaggcctgagcaagcacatcaagctggaagaggaacggagaagcgaggacgcccagagcaaggccgccctgaccgactggctgcgggctaaggccagcttcgtgatcgagggcctgaaggaggccgacaaggacgagttctgcagatgcgagctgaagctgcagaagtggtacggggacctgcggggaaagcccttcgccatcgaagccgagaacagcatcctggacatcagcggcttcagcaagcagtacaactgtgccttcatctggcagaaggacggcgtgaagaagctgaacctgtacctgatcatcaactacttcaagggcggcaagctgcggttcaagaagatcaaacctgaagccttcgaagccaacagattctacaccgtgatcaacaaaaagagcggcgagatcgtgcccatggaggtgaacttcaacttcgacgaccccaacctgatcatcctgcctctggcctttggcaagagacagggcagagaattcatctggaacgacctgctgtccctggaaaccggcagcctgaagctggccaacggaagagtgatcgagaagacactgtacaacagaagaacccggcaggatgagcctgccctgttcgtggccctgaccttcgagcggcgggaggtcctggactcctccaatatcaaaccaatgaacctgatcggcgtggcaagaggcgaaaacatccccgccgtgatcgccctgaccgaccccgagggctgcccactgagccggtttaaggatagcctgggaaacccaacccacatcctgagaatcggcgagagctataaggagaagcagcggaccatccaggccaagaaggaggtggagcagcggagagccggcggctacagccggaagtacgccagcaaagccaagaatctggcagacgatatggtgagaaacaccgctagagatctgctgtactacgccgtgacccaggatgccatgctgatcttcgccaacctgagccggggcttcggccggcagggcaagcggaccttcatggccgagagacagtacacacggatggaggactggctgaccgccaagctggcctacgagggcctgagcaagacctacctgtccaagacactggcccagtacacctccaagacatgcagcaactgtgggtttaccatcaccagcgccgactacgacagggtgctggagaagctgaagaagacagcaacaggctggatgaccacaattaacggcaaggagctgaaggtggagggccagattacctactacaacagatacaagagacagaacgtagtcaaggacctgtccgtcgagctggatagactgagcgaagaatctgtgaacaacgacatctcctcctggacaaagggcagaagcggagaagctctgagcctcctgaagaaaagattctcccatagacccgtgcaggagaagttcgtgtgcctgaactgcggcttcgagacacacgcagccgagcaagccgccctgaacatcgccagatcctggctgttcctgcggagccaggagtacaagaaataccagacaaacaagacaaccggcaacaccgataagagagccttcgtcgagacctggcagtccttttaccggaagaagcttaaggaggtgtggaaacctgccgtgcggtctggcggatctggcggaggctccacaagccagccccagggcaccgtgaccttcaaggacgtggaggtgaccttcagccaggacgagtggggcctgctggacgccagccagaggaacctgtacagggacgtgatgctggagaactacggcaacatggccagcgtggtgggccccttcaccaagcccgccctgatcagctggctggaggccagggagccctggggcctgaacgtgcagggcgtgcagttcaagggcaaccccggcgccgcccccaccagccccaagaaaaagagaaaagtctaagctgccttctgcggggcttgccttctggccatgcccttcttctctcccttgcacctgtacctcttggtctttgaataaagcctgagtaggaaggctagcaaaaaaaaaaaaaaaaaaaaaaaaaaaaaaaaaaaaaaaaaaaaaaaaaaaaaaaaaaaaaaaaaaaaaaaaaaaaaaaa

SEQ ID NO: 2828 - RNA, 5419 nt, synthetic construct
  source 1..5419: mol_type = other RNA
aggaaataagagagaaaagaagagtaagaagaaatataagagccaccatggcccctaagaagaagcgtaaagtgagccgggtgaacggcagcggcagcggcggcggcatgaaccacgaccaggagttcgacccccctaaggtgtaccctcccgtccccgccgagaagagaaagcccatccgggtcctgagcctgttcgatggcatcgccaccggtctgctggtgctgaaggacctgggcatccaggtggataggtacattgcctccgaggtgtgcgaggactccatcaccgtgggaatggtgcgtcatcagggcaagatcatgtacgtgggcgacgtgcggagcgtgacacagaagcatatccaggagtggggccctttcgacctggtgatcggcggcagcccttgcaatgacctgagcatcgtgaacccagcccggaagggcctgtacgagggaaccggcagactgttcttcgagttttacagactgctgcacgacgcccggcctaaggaaggcgacgaccggcccttcttttggctgttcgagaatgtggtggccatgggagtcagcgacaagcgggatattagccggttcctggagagcaaccccgtgatgatcgatgccaaggaagtgagcgccgcccaccgggccagatacttctggggcaatctgcctggcatgaacagacccctggccagcaccgtgaacgacaagctggagctgcaggagtgcctggagcacggccggatcgccaagttcagcaaggtgagaaccatcaccacccgaagcaacagcatcaaacaaggcaaggaccagcactttcctgtgttcatgaacgagaaggaggacatcctgtggtgtaccgagatggagagagtgttcgggttcccagtccactacacagatgtcagcaacatgtctagactggccagacagagactgctgggaagaagctggtccgtccctgtgatcagacacctgttcgcccctctgaaggagtacttcgcctgcgtgagcagcggcaacagcaacgccaacagccggggccccagcttctctagcggcctggtgccactgtccctgagagggagccacatgggccccatggagatctacaaaaccgtgagcgcctggaagcggcagcctgtgcgcgtgctgagcctgtttcggaatatcgataaagtcctgaaaagcctgggattcctggagagcggctctggctccggcggtggcaccctgaagtacgtggaggatgtgacaaacgtggtcagacgggatgtggagaagtggggccccttcgatctggtgtacggcagcacccaacccctgggcagctcttgtgaccggtgccctggctggtacatgtttcagttccaccggatcctgcagtacgccctgccgagacaggagtcccagcggccattcttttggattttcatggacaacttgctgctgaccgaggatgaccaggaaactaccactcggttcctgcagaccgaagccgtgaccctgcaggacgtgagaggccgggactaccagaacgccatgcgggtgtggtccaacatccctggactgaaaagcaagcacgcacctctgacccctaaagaagaggagtacctgcaggcccaggtgcggagcagaagcaagctggacgcccctaaggtggatctgctggtgaagaattgcctcctgcccctgagagagtacttcaagtatttcagccagaatagtctgcccctgggcggcccaagcagcggcgcccctcctcccagcggcggcagcccagccggctccccaacctctaccgaggagggcacctctgagtccgccacccccgagagcggccctggcacctccaccgagcccagcgagggcagcgcacccggcagccctgccggcagccccacctccacagaggagggaaccagcaccgagcccagcgaaggcagcgccccaggcaccagcaccgagcctagtgagggcggctctggcggcggcagcgcccaggagattaaacggatcaacaagatcagaagaagacttgtgaaagacagcaacaccaagaaggccggcaagacaggccccatgaaaaccctgctggttagagtgatgacacccgatctgagagagcggctggaaaacctgagaaagaagcctgaaaatatcccccagcccatcagcaatacatctagagccaacctgaataagctgctgaccgattacaccgaaatgaagaaggcgatcctgcatgtgtactgggaagagttccagaaggaccctgtgggcctgatgagccgggtggcccagcctgccagcaagaagatcgatcagaacaagctgaaacctgagatggacgagaagggcaacctgaccaccgccggctttgcctgctctcagtgtggccagcccctgttcgtgtacaagctggagcaggtgtctgagaagggcaaggcttacaccaactacttcggacggtgcaatgtggccgagcacgaaaagctgatcctgctggcccagctgaagcccgagaaggatagcgacgaagccgtgacatatagcctgggaaagtttgggcagagggccctggatttctacagcattcatgtgaccaaggagtccacccaccccgtgaagcccctggcccagatcgccggaaacagatacgcctccggacctgtgggaaaggccctgagcgacgcatgtatgggcacaatcgcctccttcctgtctaagtaccaggacatcatcatcgaacaccagaaggtggtgaagggcaaccagaagagactggagagcctgcgggagctggccggcaaggaaaacctggaataccctagcgtgaccctgccacctcagcctcacaccaaggagggcgttgatgcctacaacgaagtgatcgcccgggtgcgaatgtgggtgaacctgaacctgtggcagaagctgaagctaagcagagatgatgccaagcctctgctgagactgaagggattcccttcctttcctctggtcgagagacaggccaacgaagtggactggtgggacatggtgtgtaacgtgaagaagctgatcaacgagaaaaaggaggatggcaaggtgttttggcagaatctggctggctacaagagacaggaagccctgagaccatacctgagcagcgaggaagatcggaagaagggaaagaaattcgctcggtaccagctgggcgacctgctgctgcacctggaaaagaagcacggcgaggactggggaaaggtgtacgacgaggcctgggagcggattgacaagaaagtggaaggcctgagcaagcacatcaagctggaagaggaacggagaagcgaggacgcccagagcaaggccgccctgaccgactggctgcgggctaaggccagcttcgtgatcgagggcctgaaggaggccgacaaggacgagttctgcagatgcgagctgaagctgcagaagtggtacggggacctgcggggaaagcccttcgccatcgaagccgagaacagcatcctggacatcagcggcttcagcaagcagtacaactgtgccttcatctggcagaaggacggcgtgaagaagctgaacctgtacctgatcatcaactacttcaagggcggcaagctgcggttcaagaagatcaaacctgaagccttcgaagccaacagattctacaccgtgatcaacaaaaagagcggcgagatcgtgcccatggaggtgaacttcaacttcgacgaccccaacctgatcatcctgcctctggcctttggcaagagacagggcagagaattcatctggaacgacctgctgtccctggaaaccggcagcctgaagctggccaacggaagagtgatcgagaagacactgtacaacagaagaacccggcaggatgagcctgccctgttcgtggccctgaccttcgagcggcgggaggtcctggactcctccaatatcaaaccaatgaacctgatcggcgtggcaagaggcgaaaacatccccgccgtgatcgccctgaccgaccccgagggctgcccactgagccggtttaaggatagcctgggaaacccaacccacatcctgagaatcggcgagagctataaggagaagcagcggaccatccaggccaagaaggaggtggagcagcggagagccggcggctacagccggaagtacgccagcaaagccaagaatctggcagacgatatggtgagaaacaccgctagagatctgctgtactacgccgtgacccaggatgccatgctgatcttcgccaacctgagccggggcttcggccggcagggcaagcggaccttcatggccgagagacagtacacacggatggaggactggctgaccgccaagctggcctacgagggcctgagcaagacctacctgtccaagacactggcccagtacacctccaagacatgcagcaactgtgggtttaccatcaccagcgccgactacgacagggtgctggagaagctgaagaagacagcaacaggctggatgaccacaattaacggcaaggagctgaaggtggagggccagattacctactacaacagatacaagagacagaacgtagtcaaggacctgtccgtcgagctggatagactgagcgaagaatctgtgaacaacgacatctcctcctggacaaagggcagaagcggagaagctctgagcctcctgaagaaaagattctcccatagacccgtgcaggagaagttcgtgtgcctgaactgcggcttcgagacacacgcagccgagcaagccgccctgaacatcgccagatcctggctgttcctgcggagccaggagtacaagaaataccagacaaacaagacaaccggcaacaccgataagagagccttcgtcgagacctggcagtccttttaccggaagaagcttaaggaggtgtggaaacctgccgtgcggtctggcggatctggcggaggctccacaagcgtgcaggagcccgtgaccttcaaggacgtggccgtggacttcacccaggaggagtggggccagctggacctggtgcagaggaccctgtacagggacgtgatgctggagacctacggccacctgctgagcgtgggcaaccagatcgccaagcccgaggtgatcagcctgctggagcagggcgaggagccctggagcgtggagcaggcctgcccccagagggcctgccccgagtggatgaggaacaccagccccaagaaaaagagaaaagtctaagctgccttctgcggggcttgccttctggccatgcccttcttctctcccttgcacctgtacctcttggtctttgaataaagcctgagtaggaaggctagcaaaaaaaaaaaaaaaaaaaaaaaaaaaaaaaaaaaaaaaaaaaaaaaaaaaaaaaaaaaaaaaaaaaaaaaaaaaaaaaa

SEQ ID NO: 2829 - RNA, 5419 nt, synthetic construct
  source 1..5419: mol_type = other RNA
aggaaataagagagaaaagaagagtaagaagaaatataagagccaccatggcccctaagaagaagcgtaaagtgagccgggtgaacggcagcggcagcggcggcggcatgaaccacgaccaggagttcgacccccctaaggtgtaccctcccgtccccgccgagaagagaaagcccatccgggtcctgagcctgttcgatggcatcgccaccggtctgctggtgctgaaggacctgggcatccaggtggataggtacattgcctccgaggtgtgcgaggactccatcaccgtgggaatggtgcgtcatcagggcaagatcatgtacgtgggcgacgtgcggagcgtgacacagaagcatatccaggagtggggccctttcgacctggtgatcggcggcagcccttgcaatgacctgagcatcgtgaacccagcccggaagggcctgtacgagggaaccggcagactgttcttcgagttttacagactgctgcacgacgcccggcctaaggaaggcgacgaccggcccttcttttggctgttcgagaatgtggtggccatgggagtcagcgacaagcgggatattagccggttcctggagagcaaccccgtgatgatcgatgccaaggaagtgagcgccgcccaccgggccagatacttctggggcaatctgcctggcatgaacagacccctggccagcaccgtgaacgacaagctggagctgcaggagtgcctggagcacggccggatcgccaagttcagcaaggtgagaaccatcaccacccgaagcaacagcatcaaacaaggcaaggaccagcactttcctgtgttcatgaacgagaaggaggacatcctgtggtgtaccgagatggagagagtgttcgggttcccagtccactacacagatgtcagcaacatgtctagactggccagacagagactgctgggaagaagctggtccgtccctgtgatcagacacctgttcgcccctctgaaggagtacttcgcctgcgtgagcagcggcaacagcaacgccaacagccggggccccagcttctctagcggcctggtgccactgtccctgagagggagccacatgggccccatggagatctacaaaaccgtgagcgcctggaagcggcagcctgtgcgcgtgctgagcctgtttcggaatatcgataaagtcctgaaaagcctgggattcctggagagcggctctggctccggcggtggcaccctgaagtacgtggaggatgtgacaaacgtggtcagacgggatgtggagaagtggggccccttcgatctggtgtacggcagcacccaacccctgggcagctcttgtgaccggtgccctggctggtacatgtttcagttccaccggatcctgcagtacgccctgccgagacaggagtcccagcggccattcttttggattttcatggacaacttgctgctgaccgaggatgaccaggaaactaccactcggttcctgcagaccgaagccgtgaccctgcaggacgtgagaggccgggactaccagaacgccatgcgggtgtggtccaacatccctggactgaaaagcaagcacgcacctctgacccctaaagaagaggagtacctgcaggcccaggtgcggagcagaagcaagctggacgcccctaaggtggatctgctggtgaagaattgcctcctgcccctgagagagtacttcaagtatttcagccagaatagtctgcccctgggcggcccaagcagcggcgcccctcctcccagcggcggcagcccagccggctccccaacctctaccgaggagggcacctctgagtccgccacccccgagagcggccctggcacctccaccgagcccagcgagggcagcgcacccggcagccctgccggcagccccacctccacagaggagggaaccagcaccgagcccagcgaaggcagcgccccaggcaccagcaccgagcctagtgagggcggctctggcggcggcagcgcccaggagattaaacggatcaacaagatcagaagaagacttgtgaaagacagcaacaccaagaaggccggcaagacaggccccatgaaaaccctgctggttagagtgatgacacccgatctgagagagcggctggaaaacctgagaaagaagcctgaaaatatcccccagcccatcagcaatacatctagagccaacctgaataagctgctgaccgattacaccgaaatgaagaaggcgatcctgcatgtgtactgggaagagttccagaaggaccctgtgggcctgatgagccgggtggcccagcctgccagcaagaagatcgatcagaacaagctgaaacctgagatggacgagaagggcaacctgaccaccgccggctttgcctgctctcagtgtggccagcccctgttcgtgtacaagctggagcaggtgtctgagaagggcaaggcttacaccaactacttcggacggtgcaatgtggccgagcacgaaaagctgatcctgctggcccagctgaagcccgagaaggatagcgacgaagccgtgacatatagcctgggaaagtttgggcagagggccctggatttctacagcattcatgtgaccaaggagtccacccaccccgtgaagcccctggcccagatcgccggaaacagatacgcctccggacctgtgggaaaggccctgagcgacgcatgtatgggcacaatcgcctccttcctgtctaagtaccaggacatcatcatcgaacaccagaaggtggtgaagggcaaccagaagagactggagagcctgcgggagctggccggcaaggaaaacctggaataccctagcgtgaccctgccacctcagcctcacaccaaggagggcgttgatgcctacaacgaagtgatcgcccgggtgcgaatgtgggtgaacctgaacctgtggcagaagctgaagctaagcagagatgatgccaagcctctgctgagactgaagggattcccttcctttcctctggtcgagagacaggccaacgaagtggactggtgggacatggtgtgtaacgtgaagaagctgatcaacgagaaaaaggaggatggcaaggtgttttggcagaatctggctggctacaagagacaggaagccctgagaccatacctgagcagcgaggaagatcggaagaagggaaagaaattcgctcggtaccagctgggcgacctgctgctgcacctggaaaagaagcacggcgaggactggggaaaggtgtacgacgaggcctgggagcggattgacaagaaagtggaaggcctgagcaagcacatcaagctggaagaggaacggagaagcgaggacgcccagagcaaggccgccctgaccgactggctgcgggctaaggccagcttcgtgatcgagggcctgaaggaggccgacaaggacgagttctgcagatgcgagctgaagctgcagaagtggtacggggacctgcggggaaagcccttcgccatcgaagccgagaacagcatcctggacatcagcggcttcagcaagcagtacaactgtgccttcatctggcagaaggacggcgtgaagaagctgaacctgtacctgatcatcaactacttcaagggcggcaagctgcggttcaagaagatcaaacctgaagccttcgaagccaacagattctacaccgtgatcaacaaaaagagcggcgagatcgtgcccatggaggtgaacttcaacttcgacgaccccaacctgatcatcctgcctctggcctttggcaagagacagggcagagaattcatctggaacgacctgctgtccctggaaaccggcagcctgaagctggccaacggaagagtgatcgagaagacactgtacaacagaagaacccggcaggatgagcctgccctgttcgtggccctgaccttcgagcggcgggaggtcctggactcctccaatatcaaaccaatgaacctgatcggcgtggcaagaggcgaaaacatccccgccgtgatcgccctgaccgaccccgagggctgcccactgagccggtttaaggatagcctgggaaacccaacccacatcctgagaatcggcgagagctataaggagaagcagcggaccatccaggccaagaaggaggtggagcagcggagagccggcggctacagccggaagtacgccagcaaagccaagaatctggcagacgatatggtgagaaacaccgctagagatctgctgtactacgccgtgacccaggatgccatgctgatcttcgccaacctgagccggggcttcggccggcagggcaagcggaccttcatggccgagagacagtacacacggatggaggactggctgaccgccaagctggcctacgagggcctgagcaagacctacctgtccaagacactggcccagtacacctccaagacatgcagcaactgtgggtttaccatcaccagcgccgactacgacagggtgctggagaagctgaagaagacagcaacaggctggatgaccacaattaacggcaaggagctgaaggtggagggccagattacctactacaacagatacaagagacagaacgtagtcaaggacctgtccgtcgagctggatagactgagcgaagaatctgtgaacaacgacatctcctcctggacaaagggcagaagcggagaagctctgagcctcctgaagaaaagattctcccatagacccgtgcaggagaagttcgtgtgcctgaactgcggcttcgagacacacgcagccgagcaagccgccctgaacatcgccagatcctggctgttcctgcggagccaggagtacaagaaataccagacaaacaagacaaccggcaacaccgataagagagccttcgtcgagacctggcagtccttttaccggaagaagcttaaggaggtgtggaaacctgccgtgcggtctggcggatctggcggaggctccacaagcatgaacgccgtgacctacgacgacgtgcacgtggacttcacctgggacgagtgggccctgctggaccccagccagaagaacctgtacaagaacgtgatgctggagacctacaggaacctgaccgccatcggctacaagtgggaggagcacaacatcaacgagaagttccagaggagcaggaggaacaggaggcacgagaggagccacaccggcgagaagagctacgagtgcaaccagtgcggcaccagccccaagaaaaagagaaaagtctaagctgccttctgcggggcttgccttctggccatgcccttcttctctcccttgcacctgtacctcttggtctttgaataaagcctgagtaggaaggctagcaaaaaaaaaaaaaaaaaaaaaaaaaaaaaaaaaaaaaaaaaaaaaaaaaaaaaaaaaaaaaaaaaaaaaaaaaaaaaaaa

(The sequence listing continues in the following parts.)